United States Patent Application Publication US 2024/0327476 A1 - sequence listing, part 36

SEQ ID NO: 55849 - protein, 165 aa, Homo sapiens
MSREMQDVDLAEVKPLVEKGETITGLLQEFDVQEQDIETLHGSVHVTLCGTPKGNRPVILTYHDIGMNHKTCYNPLFNYEDMQEITQHFAVCHVDAPGQQDGAASFPAGYMYPSMDQLAEMLPGVLQQFGLKSIIGMGTGAGAYILTRFALNNPEMVEGLVLINV

SEQ ID NO: 55850 - protein, 158 aa, Homo sapiens
MSREMQDVDLAEVKPLVEKGETITGLLQEFDVQEQDIETLHGSVHVTLCGTPKGNRPVILTYHDIGMNHKTCYNPLFNYEDMQEITQHFAVCHVDAPGQQDGAASFPAGYMYPSMDQLAEMLPGVLQQFGLKSIIGMGTGAGAYILTRFALNNPEMVE

SEQ ID NO: 55851 - protein, 133 aa, Homo sapiens
MSREMQDVDLAEVKPLVEKGETITGLLQEFDVQEQDIETLHGSVHVTLCGTPKGNRPVILTYHDIGMNHKTCYNPLFNYEDMQEITQHFAVCHVDAPGQQDGAASFPAGYMYPSMDQLAEMLPGVLQQFGLKS

SEQ ID NO: 55852 - protein, 158 aa, Homo sapiens; identical to SEQ ID NO: 55850

SEQ ID NO: 55853 - protein, 222 aa, Homo sapiens
MDWAASKISGWTQALPDMVVSHLFGKEEMQSNVEVVHTYRQHIVNDMNPGNLHLFINAYNSRRDLEIERPMPGTHTVTLQCPALLVVGDSSPAVDAVVECNSKLDPTKTTLLKMADCGGLPQISQPAKLAEAFKYFVQGMGYMPSASMTRLMRSRTASGSSVTSLDGTRSRSHTSEGTRSRSHTSEGTRSRSHTSEGAHLDITPNSGAAGNSAGPKSMEVSC

SEQ ID NO: 55854 - protein, 149 aa, Homo sapiens
MSREMQDVDLAEVKPLVEKGETITGLLQEFDVQEQDIETLHGSVHVTLCGTPPAKLAEAFKYFVQGMGYMPSASMTRLMRSRTASGSSVTSLDGTRSRSHTSEGTRSRSHTSEGTRSRSHTSEGAHLDITPNSGAAGNSAGPKSMEVSC

SEQ ID NO: 55855 - protein, 313 aa, Homo sapiens
MQEITQHFAVCHVDAPGQQDGAASFPAGYMYPSMDQLAEMLPGVLQQFGLKSIIGMGTGAGAYILTRFALNNPEMVEGLVLINVNPCAEGWMDWAASKISGWTQALPDMVVSHLFGKEEMQSNVEVVHTYRQHIVNDMNPGNLHLFINAYNSRRDLEIERPMPGTHTVTLQCPALLVVGDSSPAVDAVVECNSKLDPTKTTLLKMADCGGLPQISQPAKLAEAFKYFVQGMGYMPSASMTRLMRSRTASGSSVTSLDGTRSRSHTSEGTRSRSHTSEGTRSRSHTSEGAHLDITPNSGAAGNSAGPKSMEVSC

SEQ ID NO: 55856 - protein, 95 aa, Homo sapiens
MSREMQDVDLAEVKPLVEKGETITGLLQEFDVQTKPATTPSSTTRTCRRSPSTLPSATWTPLASRTAQPPSPQGTCTPPWISWLKCFLESFNSLG

SEQ ID NO: 55857 - protein, 496 aa, Homo sapiens
MADESETAVKPPAPPLPQMMEGNGNGHEHCSDCENEEDNSYNRGGLSPANDTGAKKKKKKQKKKKEKGSETDSAQDQPVKMNSLPAERIQEIQKAIELFSVGQGPAKTMEEASKRSYQFWDTQPVPKLGEVVNTHGPVEPDKDNIRQEPYTLPQGFTWDALDLGDRGVLKELYTLLNENYVEDDDNMFRFDYSPEFLLWALRPPGWLPQWHCGVRVVSSRKLVGFISAIPANIHIYDTEKKMVEINFLCVHKKLRSKRVAPVLIREITRRVHLEGIFQAVYTAGVVLPKPVGTCRYWHRSLNPRKLIEVKFSHLSRNMTMQRTMKLYRLPETPKTAGLRPMETKDIPVVHQLLTRYLKQFHLTPVMSQEEVEHWFYPQENIIDTFVVENANGEVTDFLSFYTLPSTIMNHPTHKSLKAAYSFYNVHTQTPLLDLMSDALVLAKMKGFDVFNALDLMENKTFLEKLKFGIGDGNLQYYLYNWKCPSMGAEKVGLVLQ

SEQ ID NO: 55858 - protein, 137 aa, Homo sapiens
MADESETAVKPPAPPLPQMMEGNGNGHEHCSDCENEEDNSYNRGGLSPANDTGAKKKKKKQKKKKEKGSETDSAQDQPVKMNSLPAERIQEIQKAIELFSVGQGPAKTMEEASKRSYQFWDTQPVPKLAKRTVHPPE

SEQ ID NO: 55859 - protein, 496 aa, Homo sapiens; identical to SEQ ID NO: 55857

SEQ ID NO: 55860 - protein, 529 aa, Homo sapiens
MAEDSESAASQQSLELDDQDTCGIDGDNEEETEHAKGSPGGYLGAKKKKKKQKRKKEKPNSGGTKSDSASDSQEIKIQQPSKHNTIWQQISAGAAMGSATMEGEWTGMRNDHKNPSVPMQKLQDIQRAMELLSACQGPARNIDEAAKHRYQFWDTQPVPKLDEVITSHGAIEPDKDNVRQEPYSLPQGFMWDTLDLSDAEVLKELYTLLNENYVEDDDNMFRFDYSPEFLLWALRPPGWLLQWHCGVRVSSNKKLVGFISAIPANIRIYDSVKKMVEINFLCVHKKLRSKRVAPVLIREITRRVNLEGIFQAVYTAGVVLPKPIATCRYWHRSLNPRKLVEVKFSHLSRNMTLQRTMKLYRLPDVTKTSGLRPMEPKDIKSVRELINTYLKQFHLAPVMDEEEVAHWFLPREHIIDTFVVESPNGKLTDFLSFYTLPSTVMHHPAHKSLKAAYSFYNIHTETPLLDLMSDALILAKSKGFDVFNALDLMENKTFLEKLKFGIGDGNLQYYLYNWRCPGTDSEKVGLVLQ

SEQ ID NO: 55861 - protein, 485 aa, Homo sapiens
MRRRRSTPKEVLEGIWEPKRKRRNRREKRRNQIPEAPSQTRHLIPRRLKFSSLRNTTPSGSRFQREQPWNPSVPMQKLQDIQRAMELLSACQGPARNIDEAAKHRYQFWDTQPVPKLDEVITSHGAIEPDKDNVRQEPYSLPQGFMWDTLDLSDAEVLKELYTLLNENYVEDDDNMFRFDYSPEFLLWALRPPGWLLQWHCGVRVSSNKKLVGFISAIPANIRIYDSVKKMVEINFLCVHKKLRSKRVAPVLIREITRRVNLEGIFQAVYTAGVVLPKPIATCRYWHRSLNPRKLVEVKFSHLSRNMTLQRTMKLYRLPDVTKTSGLRPMEPKDIKSVRELINTYLKQFHLAPVMDEEEVAHWFLPREHIIDTFVVESPNGKLTDFLSFYTLPSTVMHHPAHKSLKAAYSFYNIHTETPLLDLMSDALILAKSKGFDVFNALDLMENKTFLEKLKFGIGDGNLQYYLYNWRCPGTDSEKVGLVLQ

SEQ ID NO: 55862 - protein, 498 aa, Homo sapiens
MAEDSESAASQQSLELDDQDTCGIDGDNEEETEHAKGSPGGYLGAKKKKKKQKRKKEKPNSGGTKSDSASDSQEIKIQQPSKNPSVPMQKLQDIQRAMELLSACQGPARNIDEAAKHRYQFWDTQPVPKLDEVITSHGAIEPDKDNVRQEPYSLPQGFMWDTLDLSDAEVLKELYTLLNENYVEDDDNMFRFDYSPEFLLWALRPPGWLLQWHCGVRVSSNKKLVGFISAIPANIRIYDSVKKMVEINFLCVHKKLRSKRVAPVLIREITRRVNLEGIFQAVYTAGVVLPKPIATCRYWHRSLNPRKLVEVKFSHLSRNMTLQRTMKLYRLPDVTKTSGLRPMEPKDIKSVRELINTYLKQFHLAPVMDEEEVAHWFLPREHIIDTFVVESPNGKLTDFLSFYTLPSTVMHHPAHKSLKAAYSFYNIHTETPLLDLMSDALILAKSKGFDVFNALDLMENKTFLEKLKFGIGDGNLQYYLYNWRCPGTDSEKVGLVLQ

SEQ ID NO: 55863 - protein, 77 aa, Homo sapiens
MSDALILAKSKGFDVFNALDLMENKTFLEKLKFGIGDGNLQYYLYNWRCPGTDSEKGSGNFVNANGKLLPDVCRRPP

SEQ ID NO: 55864 - protein, 485 aa, Homo sapiens
MASPWRGAHEVLEGIWEPKRKRRNRREKRRNQIPEAPSQTRHLIPRRLKFSSLRNTTPSGSRFQREQPWNPSVPMQKLQDIQRAMELLSACQGPARNIDEAAKHRYQFWDTQPVPKLDEVITSHGAIEPDKDNVRQEPYSLPQGFMWDTLDLSDAEVLKELYTLLNENYVEDDDNMFRFDYSPEFLLWALRPPGWLLQWHCGVRVSSNKKLVGFISAIPANIRIYDSVKKMVEINFLCVHKKLRSKRVAPVLIREITRRVNLEGIFQAVYTAGVVLPKPIATCRYWHRSLNPRKLVEVKFSHLSRNMTLQRTMKLYRLPDVTKTSGLRPMEPKDIKSVRELINTYLKQFHLAPVMDEEEVAHWFLPREHIIDTFVVESPNGKLTDFLSFYTLPSTVMHHPAHKSLKAAYSFYNIHTETPLLDLMSDALILAKSKGFDVFNALDLMENKTFLEKLKFGIGDGNLQYYLYNWRCPGTDSEKVGLVLQ

SEQ ID NO: 55865 - protein, 310 aa, Homo sapiens
MFRFDYSPEFLLWALRPPGWLLQWHCGVRVSSNKKLVGFISAIPANIRIYDSVKKMVEINFLCVHKKLRSKRVAPVLIREITRRVNLEGIFQAVYTAGVVLPKPIATCRYWHRSLNPRKLVEVKFSHLSRNMTLQRTMKLYRLPDVTKTSGLRPMEPKDIKSVRELINTYLKQFHLAPVMDEEEVAHWFLPREHIIDTFVVESPNGKLTDFLSFYTLPSTVMHHPAHKSLKAAYSFYNIHTETPLLDLMSDALILAKSKGFDVFNALDLMENKTFLEKLKFGIGDGNLQYYLYNWRCPGTDSEKVGLVLQ

SEQ ID NO: 55866 - protein, 574 aa, Homo sapiens
MEPTENPCQGPLGQKAGEKPLAAGPGEEELLRGSAPHAQDTQSEELPPSCTISGEKKPPAVSGEATGADAGRLCPPPRSRAPHKDRTLARSRPQTQGEDCSLPVGEVKIGKRSYSPAPGKQKKPNAMGLAPTSSPGAPNSARATHNPVPCGSGRGPCHLANLLSTLAQSNQNRDHKQGPPEVTCQIRKKTRTLYRSDQLEELEKIFQEDHYPDSDKRREIAQTVGVTPQRIMVWFQNRRAKWRKMEKLNGKESKDNPAAPGPASSQCSSAAEILPAVPMEPKPDPFPQESPLDTFPEPPMLLTSDQTLAPTQPSEGAQRVVTPPLFSPPPVRRADLPFPLGPVHTPQLMPLLMDVAGSDSSHKDGPCGSWGTSITLPPPCSYLEELEPQDYQQSNQPGPFQFSQAPQPPLFQSPQPKLPYLPTFPFSMPSSLTLPPPEDSLFMFPCGPSGGTSQGYCPGASSGQILMQPPAGNIGTASWSDPCLPELPFPGPFCPQALGHPPGGDGYFPDLFPTPCPQALGRQPSSALSWMPEGARPGTGPLLSKAKEEPPAASLDQPSALEEARGDDKNSHVP

SEQ ID NO: 55867 - protein, 691 aa, Homo sapiens
MALLLTLTSPDLEGTWDTRDKDGFKAQEGPPLAVPEFPVCGLYRIYGVCGSFSSFFIIRCSLCALETLKSPQHDPLEIPEQSLKLIPLVSGKRELTRGQKAGEKPLAAGPGEEELLRGSAPHAQDTQSEELPPSCTISGEKKPPAVSGEATGADAGRLCPPPRSRAPHKDRTLARSRPQTQGEDCSLPVGEVKIGKRSYSPAPGKQKKPNAMGLAPTSSPGAPNSARATHNPVPCGSGRGPCHLANLLSTLAQSNQNRDHKQGPPEVTCQIRKKTRTLYRSDQLEELEKIFQEDHYPDSDKRREIAQTVGVTPQRIMVKGAGSLVAGWSGGGPTIETLELQSERSAVAWVWFQNRRAKWRKMEKLNGKESKDNPAAPGPASSQCSSAAEILPAVPMEPKPDPFPQESPLDTFPEPPMLLTSDQTLAPTQPSEGAQRVVTPPLFSPPPVRRADLPFPLGPVHTPQLMPLLMDVAGSDSSHKDGPCGSWGTSITLPPPCSYLEELEPQDYQQSNQPGPFQFSQAPQPPLFQSPQPKLPYLPTFPFSMPSSLTLPPPEDSLFMFPCGPSGGTSQGYCPGASSGQILMQPPAGNIGTASWSDPCLPELPFPGPFCPQALGHPPGGDGYFPDLFPTPCPQALGRQPSSALSWMPEGARPGTGPLLSKAKEEPPAASLDQPSALEEARGDDKNSHVP

SEQ ID NO: 55868 - protein, 232 aa, Homo sapiens
MERCPSLGVTLYALVVVLGLRATPAGGQHYLHIRPAPSDNLPLVDLIEHPDPIFDPKEKDLNETLLRSLLGGHYDPGFMATSPPEDRPGGGGGAAGGAEDLAELDQLLRQRPSGAMPSEIKGLEFSEGLAQGKKQRLSKKLRRKLQMWLWSQTFCPVLYAWNDLGSRFWPRYVKVGSCFSKRSCSVPEGMVCKPSKSVHLTVLRWRCQRRGGQRCGWIPIQYPIISECKCSC

SEQ ID NO: 55869 - protein, 329 aa, Homo sapiens
MGTAAAAAAAAAAAAAGEGARSPSPAAVSLGLGVAVVSSLVNGSTFVLQKKGIVRAKRRGTSYLTDIVWWAGTIAMAVGQIGNFLAYTAVPTVLVTPLGALGVPFGSILASYLLKEKLNILGKLGCLLSCAGSVVLIIHSPKSESVTTQAELEEKLTNPVFVGYLCIVLLMLLLLIFWIAPAHGPTNIMVYISICSLLGSFTVPSTKGIGLAAQDILHNNPSSQRALCLCLVLLAVLGCSIIVQFRYINKALECFDSSVFGAIYYVVFTTLVLLASAILFREWSNVGLVDFLGMACGFTTVSVGIVLIQVFKEFNFNLGEMNKSNMKTD

SEQ ID NO: 55870 - protein, 254 aa, Homo sapiens
MAVGQIGNFLAYTAVPTVLVTPLGALGVPFGSILASYLLKEKLNILGKLGCLLSCAGSVVLIIHSPKSESVTTQAELEEKLTNPVFVGYLCIVLLMLLLLIFWIAPAHGPTNIMVYISICSLLGSFTVPSTKGIGLAAQDILHNNPSSQRALCLCLVLLAVLGCSIIVQFRYINKALECFDSSVFGAIYYVVFTTLVLLASAILFREWSNVGLVDFLGMACGFTTVSVGIVLIQVFKEFNFNLGEMNKSNMKTD

SEQ ID NO: 55871 - protein, 159 aa, Homo sapiens
MLLLLIFWIAPAHGPTNIMVYISICSLLGSFTVPSTKGIGLAAQDILHNNPSSQRALCLCLVLLAVLGCSIIVQFRYINKALECFDSSVFGAIYYVVFTTLVLLASAILFREWSNVGLVDFLGMACGFTTVSVGIVLIQVFKEFNFNLGEMNKSNMKTD

SEQ ID NO: 55872 - protein, 254 aa, Homo sapiens; identical to SEQ ID NO: 55870

SEQ ID NO: 55873 - protein, 360 aa, Homo sapiens
MSQGRGKYDFYIGLGLAMSSSIFIGGSFILKKKGLLRLARKGSMRAGQGGHAYLKEWLWWAGLLSMGAGEVANFAAYAFAPATLVTPLGALSVLVSAILSSYFLNERLNLHGKIGCLLSILGSTVMVIHAPKEEEIETLNEMSHKLGDPGFVVFATLVVIVALILIFVVGPRHGQTNILVYITICSVIGAFSVSCVKGLGIAIKELFAGKPVLRHPLAWILLLSLIVCVSTQINYLNRALDIFNTSIVTPIYYVFFTTSVLTCSAILFKEWQDMPVDDVIGTLSGFFTIIVGIFLLHAFKDVSFSLASLPVSFRKDEKAMNGNLSNMYEVLNNNEESLTCGIEQHTGENVSRRNGNLTAF

SEQ ID NO: 55874 - protein, 341 aa, Homo sapiens
MSQGRGKYDFYIGLGLAMSSSIFIGGSFILKKKGLLRLARKGSMRAVGAGEVANFAAYAFAPATLVTPLGALSVLVSAILSSYFLNERLNLHGKIGCLLSILGSTVMVIHAPKEEEIETLNEMSHKLGDPGFVVFATLVVIVALILIFVVGPRHGQTNILVYITICSVIGAFSVSCVKGLGIAIKELFAGKPVLRHPLAWILLLSLIVCVSTQINYLNRALDIFNTSIVTPIYYVFFTTSVLTCSAILFKEWQDMPVDDVIGTLSGFFTIIVGIFLLHAFKDVSFSLASLPVSFRKDEKAMNGNLSNMYEVLNNNEESLTCGIEQHTGENVSRRNGNLTAF

SEQ ID NO: 55875 - protein, 360 aa, Homo sapiens; identical to SEQ ID NO: 55873

SEQ ID NO: 55876 - protein, 360 aa, Homo sapiens; identical to SEQ ID NO: 55873

SEQ ID NO: 55877 - protein, 341 aa, Homo sapiens; identical to SEQ ID NO: 55874

SEQ ID NO: 55878 - protein, 59 aa, Homo sapiens
MSQGRGKYDFYIGLGLAMSSSIFIGGSFILKKKGLLRLARKGSMRAGQGGHAYLKEWLW

SEQ ID NO: 55879 - protein, 299 aa, Homo sapiens
MEELEQGLLMQPWAWLQLAENSLLAKVFITKQGYALLVSDLQQVWHEQVDTSVVSQRAKELNKRLTAPPAAFLCHLDNLLRPLLKDAAHPSEATFSCDCVADALILRVRSELSGLPFYWNFHCMLASPSLVSQHLIRPLMGMSLALQCQVRELATLLHMKDLEIQDYQESGATLIRDRLKTEPFEENSFLEQFMIEKLPEACSIGDGKPFVMNLQDLYMAVTTQEVQVGQKHQGAGDPHTSNSASLQGIDSQCVNQPEQLVSSAPTLSAPEKESTGTSGPLQRPQLSKVKRKKPRGLFS

SEQ ID NO: 55880 - protein, 316 aa, Homo sapiens
MEELEQGLLMQPWAWLQLAENSLLAKVFITKQGYALLVSDLQQVWHEQVDTSVVSQRAKELNKRLTAPPAAFLCHLDNLLRPLLKDAAHPSEATFSCDCVADALILRVRSELSGLPFYWNFHCMLASPSLVSQHLIRPLMGMSLALQCQVRELATLLHMKDLEIQDYQESGATLIRDRLKTEPFEENSFLEQFMIEKLPEACSIGDGKPFVMNLQDLYMAVTTQEVQVGQKHQGAGDPHTSNSASLQGIDSQCVNQPEQLVSSAPTLSAPEKESTALCRDLSCQRSRGRSQGVSSVNLLWPQLLRMDLENSFQASP

SEQ ID NO: 55881 - protein, 229 aa, Homo sapiens
MEELEQGLLMQPWAWLQLAENSLLAKVFITKQGYALLVSDLQQVWHEQVDTSVVSQRAKELNKRLTAPPAAFLCHLDNLLRPLLKDAAHPSEATFSCDCVADALILRVRSELSGLPFYWNFHCMLASPSLVSQHLIRPLMGMSLALQCQVRELATLLHMKDLEIQDYQESGATLIRDRLKTEPFEENSFLEQFMIEKLPEACSIGDGKPFVMNLQDLYMAVTTQEVQVG

SEQ ID NO: 55882 - protein, 267 aa, Homo sapiens
MANCERTFIAIKPDGVQRGLVGEIIKRFEQKGFRLVGLKFMQASEDLLKEHYVDLKDRPFFAGLVKYMHSGPVVAMVWEGLNVVKTGRVMLGETNPADSKPGTIRGDFCIQVGRTMANLERTFIAIKPDGVQRGLVGEIIKRFEQKGFRLVAMKFLRASEEHLKQHYIDLKDRPFFPGLVKYMNSGPVVAMVWEGLNVVKTGRVMLGETNPADSKPGTIRGDFCIQVGRNIIHGSDSVKSAEKEISLWFKPEELVDYKSCAHDWVYE

SEQ ID NO: 55883 - protein, 77 aa, Homo sapiens [sequence omitted]

SEQ ID NO: 55884 - protein, 77 aa, Homo sapiens [sequence omitted]

SEQ ID NO: 55885 - protein, 152 aa, Homo sapiens
MANLERTFIAIKPDGVQRGLVGEIIKRFEQKGFRLVAMKFLRASEEHLKQHYIDLKDRPFFPGLVKYMNSGPVVAMVWEGLNVVKTGRVMLGETNPADSKPGTIRGDFCIQVGRNIIHGSDSVKSAEKEISLWFKPEELVDYKSCAHDWVYE

SEQ ID NO: 55886 - protein, 152 aa, Homo sapiens; identical to SEQ ID NO: 55885

SEQ ID NO: 55887 - protein, 152 aa, Homo sapiens; identical to SEQ ID NO: 55885

SEQ ID NO: 55888 - protein, 152 aa, Homo sapiens; identical to SEQ ID NO: 55885

SEQ ID NO: 55889 - protein, 152 aa, Homo sapiens; identical to SEQ ID NO: 55885

SEQ ID NO: 55890 - protein, 292 aa, Homo sapiens
MVLLSTLGIVFQGEGPPISSCDTGTMANCERTFIAIKPDGVQRGLVGEIIKRFEQKGFRLVGLKFMQASEDLLKEHYVDLKDRPFFAGLVKYMHSGPVVAMVWEGLNVVKTGRVMLGETNPADSKPGTIRGDFCIQVGRTMANLERTFIAIKPDGVQRGLVGEIIKRFEQKGFRLVAMKFLRASEEHLKQHYIDLKDRPFFPGLVKYMNSGPVVAMVWEGLNVVKTGRVMLGETNPADSKPGTIRGDFCIQVGRNIIHGSDSVKSAEKEISLWFKPEELVDYKSCAHDWVYE

SEQ ID NO: 55891 - protein, 169 aa, Homo sapiens
MICLVLTIFANLFPAACTGAHERTFLAVKPDGVQRRLVGEIVRRFERKGFKLVALKLVQASEELLREHYAELRERPFYGRLVKYMASGPVVAMVWQGLDVVRTSRALIGATNPADAPPGTIRGDFCIEVGKNLIHGSDSVESARREIALWFRADELLCWEDSAGHWLYE

SEQ ID NO: 55892 - protein, 212 aa, Homo sapiens
MEISMPPPQIYVEKTLAIIKPDIVDKEEEIQDIILRSGFTIVQRRKLRLSPEQCSNFYVEKYGKMFFPNLTAYMSSGPLVAMILARHKAISYWLELLGPNNSLVAKETHPDSLRAIYGTDDLRNALHGSNDFAAAEREIRFMFPEVIVEPIPIGQAAKDYLNLHIMPTLLEGLTELCKQKPADPLIWLADWLLKNNPNKPKLCHHPIVEEPY

SEQ ID NO: 55893 - protein, 186 aa, Homo sapiens
MASILRSPQALQLTLALIKPDAVAHPLILEAVHQQILSNKFLIVRMRELLWRKEDCQRFYREHEGRFFYQRLVEFMASGPIRAYILAHKDAIQLWRTLMGPTRVFRARHVAPDSIRGSFGLTDTRNTTHGSDSVVSASREIAAFFPDFSEQRWYEEEEPQLRCGPVCYSPEGGVHYVAGTGGLGPA

SEQ ID NO: 55894 - protein, 194 aa, Homo sapiens
MTQNLGSEMASILRSPQALQLTLALIKPDAVAHPLILEAVHQQILSNKFLIVRMRELLWRKEDCQRFYREHEGRFFYQRLVEFMASGPIRAYILAHKDAIQLWRTLMGPTRVFRARHVAPDSIRGSFGLTDTRNTTHGSDSVVSASREIAAFFPDFSEQRWYEEEEPQLRCGPVCYSPEGGVHYVAGTGGLGPA

SEQ ID NO: 55895 - protein, 186 aa, Homo sapiens; identical to SEQ ID NO: 55893

SEQ ID NO: 55896 - protein, 119 aa, Homo sapiens
MASILRSPQALQLTLALIKPDAVAHPLILEAVHQQILSNKFLIVRMRELLWRKEDCQRFYREHEDSVVSASREIAAFFPDFSEQRWYEEEEPQLRCGPVCYSPEGGVHYVAGTGGLGPA

SEQ ID NO: 55897 - protein, 186 aa, Homo sapiens; identical to SEQ ID NO: 55893

SEQ ID NO: 55898 - protein, 163 aa, Homo sapiens
MASILRSPQALQLTLALIKPDAVAHPLILEAVHQQILSNKFLIVRMRELLWRKEDCQRFYREHEAGQSEPTSLPTRMPSSSGGRSWDPPECSEHAMWPQILSVGVSASLTPATPPMVRTLWFQPAERLQPSSLTSVNSAGMRRKSPSCAVALCAIAQREVSTM

SEQ ID NO: 55899 - protein, 186 aa, Homo sapiens; identical to SEQ ID NO: 55893

SEQ ID NO: 55900 - protein, 376 aa, Homo sapiens
MNHSERFVFIAEWYDPNASLLRRYELLFYPGDGSVEMHDVKNHRTFLKRTKYDNLHLEDLFIGNKVNVFSRQLVLIDYGDQYTARQLGSRKEKTLALIKPDAISKAGEIIEIINKAGFTITKLKMMMLSRKEALDFHVDHQSRPFFNELIQFITTGPIIAMEILRDDAICEWKRLLGPANSGVARTDASESIRALFGTDGIRNAAHGPDSFASAAREMELFFPSSGGCGPANTAKFTNCTCCIVKPHAVSEGLLGKILMAIRDAGFEISAMQMFNMDRVNVEEFYEVYKGVVTEYHDMVTEMYSGPCVAMEIQQNNATKTFREFCGPADPEIARHLRPGTLRAIFGKTKIQNAVHCTDLPEDGLLEVQYFFKILDN

SEQ ID NO: 55901 - protein, 340 aa, Homo sapiens
MHDVKNHRTFLKRTKYDNLHLEDLFIGNKVNVFSRQLVLIDYGDQYTARQLGSRKEKTLALIKPDAISKAGEIIEIINKAGFTITKLKMMMLSRKEALDFHVDHQSRPFFNELIQFITTGPIIAMEILRDDAICEWKRLLGPANSGVARTDASESIRALFGTDGIRNAAHGPDSFASAAREMELFFPSSGGCGPANTAKFTNCTCCIVKPHAVSEGLLGKILMAIRDAGFEISAMQMFNMDRVNVEEFYEVYKGVVTEYHDMVTEMYSGPCVAMEIQQNNATKTFREFCGPADPEIARHLRPGTLRAIFGKTKIQNAVHCTDLPEDGLLEVQYFFKILDN

SEQ ID NO: 55902 - protein, 471 aa, Homo sapiens
MQSNKTFNLEKQNHTPRKHHQHHHQQQHHQQQQQQPPPPPIPANGQQASSQNEGLTIDLKNFRKPGEKTFTQRSRLFVGNLPPDITEEEMRKLFEKYGKAGEVFIHKDKGFGFIRLETRTLAEIAKVELDNMPLRGKQLRVRFACHSASLTVRNLPQYVSNELLEEAFSVFGQVERAVVIVDDRGRPSGKGIVEFSGKPAARKALDRCSEGSFLLTTFPRPVTVEPMDQLDDEEGLPEKLVIKNQQFHKEREQPPRFAQPGSFEYEYAMRWKALIEMEKQQQDQVDRNIKEAREKLEMEMEAARHEHQVMLMRQDLMRRQEELRRMEELHNQEVQKRKQLELRQEEERRRREEEMRRQQEEMMRRQQEGFKGTFPDAREQEIRMGQMAMGGAMGINNRGAMPPAPVPAGTPAPPGPATMMPDGTLGLTPPTTERFGQAATMEGIGAIGGTPPAFNRAAPGAEFAPNKRRRY

SEQ ID NO: 55903 - protein, 471 aa, Homo sapiens; identical to SEQ ID NO: 55902

SEQ ID NO: 55904 - protein, 471 aa, Homo sapiens; identical to SEQ ID NO: 55902

SEQ ID NO: 55905 - protein, 248 aa, Homo sapiens [sequence omitted]

SEQ ID NO: 55906 - protein, 235 aa, Homo sapiens
  VARIANT 1: note = MOD_RES - Any amino acid
XPDITEEEMRKLFEKYGKAGEVFIHKDKGFGFIRLVERAVVIVDDRGRPSGKGIVEFSGKPAARKALDRCSEGSFLLTTFPRPVTVEPMDQLDDEEGLPEKLVIKNQQFHKEREQPPRFAQPGSFEYEYAMRWKALIEMEKQQQDQVDRNIKEAREKLEMEMEAARHEHQVMLMRQDLMRRQEELRRMEELHNQEVQKRKQLELRQEEERRRREEEMRRQQEEMMRRQQEGFKGT

SEQ ID NO: 55907 - protein, 124 aa, Homo sapiens
MQSNKTFNLEKQNHTPRKHHQHHHQQQHHQQQQQQPPPPPIPANGQQASSQNEGLTIDLKNFRKPGEKTFTQRSRLFVGNLPPDITEEEMRKLFEKYGKETRTLAEIAKVELDNMPLRGKQLRV

SEQ ID NO: 55908 - protein, 66 aa, Homo sapiens
MQSNKTFNLEKQNHTPRKHHQHHHQQQHHQQQQQQPPPPPIPANGQQASSQNEGLTIDLKNFRKPG

SEQ ID NO: 55909 - protein, 207 aa, Homo sapiens
MQSNKTFNLEKQNHTPRKHHQHHHQQQHHQQQQQQPPPPPIPANGQQASSQNEGLTIDLKNFRKPGEKTFTQRSRLFVGNLPPDITEEEMRKLFEKYGKAGEVFIHKDKGFGFIRLETRTLAEIAKVELDNMPLRGKQLRVRFACHSASLTVRNLPQYVSNELLEEAFSVFGQVERAVVIVDDRGRPSGKGIVEFSGKPAARKALDR

SEQ ID NO: 55910 - protein, 382 aa, Homo sapiens
MRKLFEKYGKAGEVFIHKDKGFGFIRLETRTLAEIAKVELDNMPLRGKQLRVRFACHSASLTVRNLPQYVSNELLEEAFSVFGQVERAVVIVDDRGRPSGKGIVEFSGKPAARKALDRCSEGSFLLTTFPRPVTVEPMDQLDDEEGLPEKLVIKNQQFHKEREQPPRFAQPGSFEYEYAMRWKALIEMEKQQQDQVDRNIKEAREKLEMEMEAARHEHQVMLMRQDLMRRQEELRRMEELHNQEVQKRKQLELRQEEERRRREEEMRRQQEEMMRRQQEGFKGTFPDAREQEIRMGQMAMGGAMGINNRGAMPPAPVPAGTPAPPGPATMMPDGTLGLTPPTTERFGQAATMEGIGAIGGTPPAFNRAAPGAEFAPNKRRRY

SEQ ID NO: 55911 - protein, 1015 aa, Homo sapiens
MGAERRLLSIKEAFRLAQQPHQNQAKLVVALSRTYRTMDDKTVFHEEFIHYLKYVMVVYKREPAVERVIEFAAKFVTSFHQSDMEDDEEEEDGGLLNYLFTFLLKSHEANSNAVRFRVCLLINKLLGSMPENAQIDDDVFDKINKAMLIRLKDKIPNVRIQAVLALSRLQDPKDDECPVVNAYATLIENDSNPEVRRAVLSCIAPSAKTLPKIVGRTKDVKEAVRKLAYQVLAEKVHMRAMSIAQRVMLLQQGLNDRSDAVKQAMQKHLLQGWLRFSEGNILELLHRLDVENSSEVAVSVLNALFSITPLSELVGLCKNNDGRKLIPVETLTPEIALYWCALCEYLKSKGDEGEEFLEQILPEPVVYADYLLSYIQSIPVVNEEHRGDFSYIGNLMTKEFIGQQLILIIKSLDTSEEGGRKKLLAVLQEILILPTIPISLVSFLVERLLHIIIDDNKRTQIVTEIISEIRAPIVTVGVNNDPADVRKKELKMAEIKVKLIEAKEALENCITLQDFNRASELKEEIKALEDARINLLKETEQLEIKEVHIEKNDAETLQKCLILCYELLKQMSISTGLSATMNGIIESLILPGIISIHPVVRNLAVLCLGCCGLQNQDFARKHFVLLLQVLQIDDVTIKISALKAIFDQLMTFGIEPFKTKKIKTLHCEGTEINSDDEQESKEVEETATAKNVLKLLSDFLDSEVSELRTGAAEGLAKLMFSGLLVSSRILSRLILLWYNPVTEEDVQLRHCLGVFFPVFAYASRTNQECFEEAFLPTLQTLANAPASSPLAEIDITNVAELLVDLTRPSGLNPQAKTSQDYQALTVHDNLAMKICNEILTSPCSPEIRVYTKALSSLELSSHLAKDLLVLLNEILEQVKDRTCLRALEKIKIQLEKGNKEFGDQAEAAQDATLTTTTFQNEDEKNKEVYMTPLRGVKATQASKSTQLKTNRGQRKVTVSARTNRRCQTAEADSESDHEVPEPESEMKMRLPRRAKTAALEKSKLNLAQFLNEDLS

SEQ ID NO: 55912 - protein, 316 aa, Homo sapiens
MSGDSSGRGPEGRGRGRDPHRDRTRSRSRSRSPLSPRSRRGSARERREAPERPSLEDTEPSDSGDEMMDPASLEAEADQGLCRQIRHQYRALINSVQQNREDILNAGDKLTEVLEEANTLFNEVSRAREAVLDAHFLVLASDLGKEKAKQLRSDLSSFDMLRYVETLLTHMGVNPLEAEELIRDEDSPDFEFIVYDSWKITGRTAENTFNKTHTFHFLLGSIYGECPVPKPRVDRPRKVPVIQEERAMPAQLRRMEESHQEATEKEVERILGLLQTYFREDRDSLTLSPRLECSGTISTHCNLHLLDSSNSPASAS

SEQ ID NO: 55913 - protein, 385 aa, Homo sapiens
MSGDSSGRGPEGRGRGRDPHRDRTRSRSRSRSPLSPRSRRGSARERREAPERPSLEDTEPSDSGDEMMDPASLEAEADQGLCRQIRHQYRALINSVQQNREDILNAGDKLTEVLEEANTLFNEVSRAREAVLDAHFLVLASDLGKEKAKQLRSDLSSFDMLRYVETLLTHMGVNPLEAEELIRDEDSPDFEFIVYDSWKITGRTAENTFNKTHTFHFLLGSIYGECPVPKPRVDRPRKVPVIQEERAMPAQLRRMEESHQEATEKEVERILGLLQTYFREDPDTPMSFFDFVVDPHSFPRTVENIFHVSFIIRDGFARIRLDQDRLPVIEPVSINEENEGFEHNTQVRNQGIIALSYRDWEEIVKTFEISEPVITPSQRQQKPSA

SEQ ID NO: 55914 - protein, 172 aa, Homo sapiens [sequence omitted]

SEQ ID NO: 55915 - protein, 857 aa, Homo sapiens
MAKAKKVGARRKASGAPAGARGGPAKANSNPFEVKVNRQKFQILGRKTRHDVGLPGVSRARALRKRTQTLLKEYKERDKSNVFRDKRFGEYNSNMSPEEKMMKRFALEQQRHHEKKSIYNLNEDEELTHYGQSLADIEKHNDIVDSDSDAEDRGTLSAELTAAHFGGGGGLLHKKTQQEGEEREKPKSRKELIEELIAKSKQEKRERQAQREDALELTEKLDQDWKEIQTLLSHKTPKSENRDKKEKPKPDAYDMMVRELGFEMKAQPSNRMKTEAELAKEEQEHLRKLEAERLRRMLGKDEDENVKKPKHMSADDLNDGFVLDKDDRRLLSYKDGKMNVEEDVQEEQSKEASDPESNEEEGDSSGGEDTEESDSPDSHLDLESNVESEEENEKPAKEQRQTPGKGLISGKERAGKATRDELPYTFAAPESYEELRSLLLGRSMEEQLLVVERIQKCNHPSLAEGNKAKLEKLFGFLLEYVGDLATDDPPDLTVIDKLVVHLYHLCQMFPESASDAIKFVLRDAMHEMEEMIETKGRAALPGLDVLIYLKITGLLFPTSDFWHPVVTPALVCLSQLLTKCPILSLQDVVKGLFVCCLFLEYVALSQRFIPELINFLLGILYIATPNKASQGSTLVHPFRALGKNSELLVVSAREDVATWQQSSLSLRWASRLRAPTSTEANHIRLSCLAVGLALLKRCVLMYGSLPSFHAIMGPLQALLTDHLADCSHPQELQELCQSTLTEMESQKQLCRPLTCEKSKPVPLKLFTPRLVKVLEFGRKQGSSKEEQERKRLIHKHKREFKGAVREIRKDNQFLARMQLSEIMERDAERKRKVKQLFNSLATQEGEWKALKRKKFKK

SEQ ID NO: 55916 - protein, 806 aa, Homo sapiens
MAKAKKVGARRKASGAPAGARGGPAKANSNPFEVKVNRQKFQILGRKTRHDVGLPGVSRARALRKRTQTLLKEYKERDKSNVFRDKRFGEYNSNMSPEEKMMKRFALEQQRHHEKKSIYNLNEDEELTHYGQSLADIEKHNDIVDSDSDAEDRGTLSAELTAAHFGGGGGLLHKKTQQEGEEREKPKSRKELIEELIAKSKQEKRERQAQREDALELTEKLDQDWKEIQTLLSHKTPKSENRDKKEKPKPDAYDMMVRELGFEMKAQPSNRMKTEAELAKEEQEHLRKLEAERLRRMLGKDEDENVKKPKHMSADDLNDGFVLDKDDRRLLSYKDGKMNVEEDVQEEQSKEASDPESNEEEGDSSGGEDTEESDSPDSHLDLESNVESEEENEKPAKEQRQTPGKGLISGKERAGKATRDELPYTFAAPESYEELRSLLLGRSMEEQLLVVERIQKCNHPSLAEGNKAKLEKLFGFLLEYVGDLATDDPPDLTVIDKLVVHLYHLCQMFPESASDAIKFVLRDAMHEMEEMIETKGRAALPGLDVLIYLKITGLLFPTSDFWHPVVTPALVCLSQLLTKCPILSLQDVVKGLFVCCLFLEYVALSQRFIPELINFLLGILYIATPNKASQGSTLVHPFRALGKNSELLVVSAREDVATWQQSSLSLRWASRLRAPTSTEANHIRLSCLAVGLALLKRCVLMYGSLPSFHAIMGPLQALLTDHLADCSHPQELQELCQSTLTEMESQKQLCRPLTCEKSKPVPLKLFTPRLVSNSRPQVIHLPWPPNYRCEPQHPAKKVIFFRVIML

SEQ ID NO: 55917 - protein, 857 aa, Homo sapiens; identical to SEQ ID NO: 55915

SEQ ID NO: 55918 - protein, 575 aa, Homo sapiens
MKRFALEQQRHHEKKSIYNLNEDEELTHYGQSLADIEKHNDIVDSDSDAEDRGTLSAELTAAHFGGGGGLLHKKTQQEGEEREKPKSRKELIEELIAKSKQEKRERQAQREDALELTEKLDQDWKEIQTLLSHKTPKSENRDKKEKPKPDAYDMMVRELGFEMKAQPSNRMKTEAELAKEEQEHLRKLEAERLRRMLGKDEDENVKKPKHMSADDLNDGFVLDKDDRRLLSYKDGKMNVEEDVQEEQSKEASDPESNEEEGDSSGGEDTEESDSPDSHLDLESNVESEEENEKPAKEQRQTPGKGLISGKERAGKATRDELPYTFAAPESYEELRSLLLGRSMEEQLLVVERIQKCNHPSLAEGNKAKLEKLFGFLLEYVGDLATDDPPDLTVIDKLVVHLYHLCQMFPESASDAIKFVLRDAMHEMEEMIETKGRAALPGLDVLIYLKITGLLFPTSDFWHPVVTPALVCLSQLLTKCPILSLQDVVKGLFVCCLFLEYVALSQRFIPELINFLLGILYIATPNKASQGSTLVHPFRALGKNSELLVVSAREDVATWQQSSLSLRWWSRIPDLR

SEQ ID NO: 55919 - protein, 767 aa, Homo sapiens
MGRRSRGRRLQQQQRPEDAEDGAEGGGKRGEAGWEGGYPEIVKENKLFEHYYQELKIVPEGEWGQFMDALREPLPATLRITGYKSHAKEILHCLKNKYFKELEDLEVDGQKVEVPQPLSWYPEELAWHTNLSRKILRKSPHLEKFHQFLVSETESGNISRQEAVSMIPPLLLNVRPHHKILDMCAAPGSKTTQLIEMLHADMNVPFPEGFVIANDVDNKRCYLLVHQAKRLSSPCIMVVNHDASSIPRLQIDVDGRKEILFYDRILCDVPCSGDGTMRKNIDVWKKWTTLNSLQLHGLQLRIATRGAEQLAEGGRMVYSTCSLNPIEDEAVIASLLEKSEGALELADVSNELPGLKWMPGITQWKVMTKDGQWFTDWDAVPHSRHTQIRPTMFPPKDPEKLQAMHLERCLRILPHHQNTGGFFVAVLVKKSSMPWNKRQPKLQGKSAETRESTQLSPADLTEGKPTDPSKLESPSFTGTGDTEIAHATEDLENNGSKKDGVCGPPPSKKMKLFGFKEDPFVFIPEDDPLFPPIEKFYALDPSFPRMNLLTRTTEGKKRQLYMVSKELRNVLLNNSEKMKVINTGIKVWCRNNSGEEFDCAFRLAQEGIYTLYPFINSRIITVSMEDVKILLTQENPFFRKLSSETYSQAKDLAKGSIVLKYEPDSANPDALQCPIVLCGWRGKASIRTFVPKNERLHYLRMMGLEVLGEKKKEGVILTNESAASTGQPDNDVTEGQRAGEPNSPDAEEANSPDVTAGCDPAGVHPPR

SEQ ID NO: 55920 - protein, 531 aa, Homo sapiens
MVVNHDASSIPRLQIDVDGRKEILFYDRILCDVPCSGDGTMRKNIDVWKKWTTLNSLQLHGLQLRIATRGAEQLAEGGRMVYSTCSLNPIEDEAVIASLLEKSEGALELADVSNELPGLKWMPGITQWKVMTKDGQWFTDWDAVPHSRHTQIRPTMFPPKDPEKLQAMHLERCLRILPHHQNTGGFFVAVLVKKSSMPWNKRQPKLQGKSAETRESTQLSPADLTEGKPTDPSKLESPSFTGTGDTEIAHATEDLENNGSKKDGVCGPPPSKKMKLFGFKEDPFVFIPEDDPLFPPIEKFYALDPSFPRMNLLTRTTEGKKRQLYMVSKELRNVLLNNSEKMKVINTGIKVWCRNNSGEEFDCAFRLAQEGIYTLYPFINSRIITVSMEDVKILLTQENPFFRKLSSETYSQAKDLAKGSIVLKYEPDSANPDALQCPIVLCGWRGKASIRTFVPKNERLHYLRMMGLEVLGEKKKEGVILTNESAASTGQPDNDVTEGQRAGEPNSPDAEEANSPDVTAGCDPAGVHPPR

SEQ ID NO: 55921 - protein, 732 aa, Homo sapiens
MGRRSRGRRLQQQQRPEDAEDGAEGGGKRGEAGWEGGYPEIVKENKLFEHYYQELKIVPEGEWGQFMDALREPLPATLRITGYKRYPEELAWHTNLSRKILRKSPHLEKFHQFLVSETESGNISRQEAVSMIPPLLLNVRPHHKILDMCAAPGSKTTQLIEMLHADMNVPFPEGFVIANDVDNKRCYLLVHQAKRLSSPCIMVVNHDASSIPRLQIDVDGRKEILFYDRILCDVPCSGDGTMRKNIDVWKKWTTLNSLQLHGLQLRIATRGAEQLAEGGRMVYSTCSLNPIEDEAVIASLLEKSEGALELADVSNELPGLKWMPGITQWKVMTKDGQWFTDWDAVPHSRHTQIRPTMFPPKDPEKLQAMHLERCLRILPHHQNTGGFFVAVLVKKSSMPWNKRQPKLQGKSAETRESTQLSPADLTEGKPTDPSKLESPSFTGTGDTEIAHATEDLENNGSKKDGVCGPPPSKKMKLFGFKEDPFVFIPEDDPLFPPIEKFYALDPSFPRMNLLTRTTEGKKRQLYMVSKELRNVLLNNSEKMKVINTGIKVWCRNNSGEEFDCAFRLAQEGIYTLYPFINSRIITVSMEDVKILLTQENPFFRKLSSETYSQAKDLAKGSIVLKYEPDSANPDALQCPIVLCGWRGKASIRTFVPKNERLHYLRMMGLEVLGEKKKEGVILTNESAASTGQPDNDVTEGQRAGEPNSPDAEEANSPDVTAGCDPAGVHPPR

SEQ ID NO: 55922 - protein, 594 aa, Homo sapiens
MVLLHVLFEHAVGYALLALKEVEEISLLQPQVEESVLNLGKFHSIVRLVAFCPFASSQVALENANAVSEGVVHEDLRLLLETHLPSKKKKVLLGVGDPKIGAAIQEELGYNCQTGGVIAEILRGVRLHFHNLVKGLTDLSACKAQLGLGHSYSRAKVKFNVNRVDNMIIQSISLLDQLDKDINTFSMRVREWYGYHFPELVKIINDNATYCRLAQFIGNRRELNEDKLEKLEELTMDGAKAKAILDASRSSMGMDISAIDLINIESFSSRVVSLSEYRQSLHTYLRSKMSQVAPSLSALIGEAVGARLIAHAGSLTNLAKYPASTVQILGAEKALFRALKTRGNTPKYGLIFHSTFIGRAAAKNKGRISRYLANKCSIASRIDCFSEVPTSVFGEKLREQVEERLSFYETGEIPRKNLDVMKEAMVQAEEAAAEITRKLEKQEKKRLKKEKKRLAALALASSENSSSTPEECEEMSEKPKKKKKQKPQEVPQENGMEDPSISFSKPKKKKSFSKEELMSSDLEETAGSTSIPKRKKSTPKEETVNDPEEAGHRSGSKKKRKFSKEEPVSSGPEEAVGKSSSKKKKKFHKASQED

SEQ ID NO: 55923 - protein, 225 aa, Homo sapiens
MDISAIDLINIESFSSRVVSLSEYRQSLHTYLRSKMSQVAPSLSALIGEAVGARLIAHAGSLTNLAKYPASTVQILGAEKALFRALKTRGNTPKYGLIFHSTFIGRAAAKNKGRISRYLANKCSIASRIDCFSEVPTSVFGEKLREQVEERLSFYETGEIPRKNLDVMKEAMVQAEEAAAEITRKLEKQEKKRLKKEKKRLAALALASSENSSSTPEECEEGDRC

SEQ ID NO: 55924 - protein, 219 aa, Homo sapiens
  VARIANT 1: note = MOD_RES - Any amino acid
XLINIESFSSRVVSLSEYRQSLHTYLRSKMSQVAPSLSALIGEAVGARLIAHAGSLTNLAKYPASTVQILGAEKALFRALKTRGNTPKYGLIFHSTFIGRAAAKNKGRISRYLANKCSIASRIDCFSEVPTSVFGEKLREQVEERLSFYETGEIPRKNLDVMKEAMVQAEEAAAEITRKLEKQEKKRLKKEKKRLAALALASSENSSSTPEECEEGDRC

SEQ ID NO: 55925 - protein, 281 aa, Homo sapiens
MVLLHVLFEHAVGYALLALKEVEEISLLQPQVEESVLNLGKFHSIVRLVAFCPFASSQVALENANAVSEGVVHEDLRLLLETHLPSKKKKVLLGVGDPKIGAAIQEELGYNCQTGGVIAEILRGVRLHFHNLVKGLTDLSACKAQLGLGHSYSRAKVKFNVNRVDNMIIQSISLLDQLDKDINTFSMRVRQSRCGEGKAVALWFLMKQLGQGVTVALCREWYGYHFPELVKIINDNATYCRLAQFIGNRRELNEDKLEKLEELTMDGAKAKAILDASRSSM

SEQ ID NO: 55926 - protein, 133 aa, Homo sapiens
MRKHVLAASFSMLSLLVIMGDTDSKTDSSFIMDSDPRRCMRHHYVDSISHPLYKCSSKMVLLARCEGHCSQASRSEPLVSFSTVLKQPFRSSCHCCRPQTSKLKALRLRCSGGMRLTATYRYILSCHCEECNS

SEQ ID NO: 55927 - protein, 2471 aa, Homo sapiens
MPALRPALLWALLALWLCCAAPAHALQCRDGYEPCVNEGMCVTYHNGTGYCKCPEGFLGEYCQHRDPCEKNRCQNGGTCVAQAMLGKATCRCASGFTGEDCQYSTSHPCFVSRPCLNGGTCHMLSRDTYECTCQVGFTGKECQWTDACLSHPCANGSTCTTVANQFSCKCLTGFTGQKCETDVNECDIPGHCQHGGTCLNLPGSYQCQCPQGFTGQYCDSLYVPCAPSPCVNGGTCRQTGDFTFECNCLPGFEGSTCERNIDDCPNHRCQNGGVCVDGVNTYNCRCPPQWTGQFCTEDVDECLLQPNACQNGGTCANRNGGYGCVCVNGWSGDDCSENIDDCAFASCTPGSTCIDRVASFSCMCPEGKAGLLCHLDDACISNPCHKGALCDTNPLNGQYICTCPQGYKGADCTEDVDECAMANSNPCEHAGKCVNTDGAFHCECLKGYAGPRCEMDINECHSDPCQNDATCLDKIGGFTCLCMPGFKGVHCELEINECQSNPCVNNGQCVDKVNRFQCLCPPGFTGPVCQIDIDDCSSTPCLNGAKCIDHPNGYECQCATGFTGVLCEENIDNCDPDPCHHGQCQDGIDSYTCICNPGYMGAICSDQIDECYSSPCLNDGRCIDLVNGYQCNCQPGTSGVNCEINFDDCASNPCIHGICMDGINRYSCVCSPGFTGQRCNIDIDECASNPCRKGATCINGVNGFRCICPEGPHHPSCYSQVNECLSNPCIHGNCTGGLSGYKCLCDAGWVGINCEVDKNECLSNPCQNGGTCDNLVNGYRCTCKKGFKGYNCQVNIDECASNPCLNQGTCFDDISGYTCHCVLPYTGKNCQTVLAPCSPNPCENAAVCKESPNFESYTCLCAPGWQGQRCTIDIDECISKPCMNHGLCHNTQGSYMCECPPGFSGMDCEEDIDDCLANPCQNGGSCMDGVNTFSCLCLPGFTGDKCQTDMNECLSEPCKNGGTCSDYVNSYTCKCQAGFDGVHCENNINECTESSCFNGGTCVDGINSFSCLCPVGFTGSFCLHEINECSSHPCLNEGTCVDGLGTYRCSCPLGYTGKNCQTLVNLCSRSPCKNKGTCVQKKAESQCLCPSGWAGAYCDVPNVSCDIAASRRGVLVEHLCQHSGVCINAGNTHYCQCPLGYTGSYCEEQLDECASNPCQHGATCSDFIGGYRCECVPGYQGVNCEYEVDECQNQPCQNGGTCIDLVNHFKCSCPPGTRGLLCEENIDDCARGPHCLNGGQCMDRIGGYSCRCLPGFAGERCEGDINECLSNPCSSEGSLDCIQLTNDYLCVCRSAFTGRHCETFVDVCPQMPCLNGGTCAVASNMPDGFICRCPPGFSGARCQSSCGQVKCRKGEQCVHTASGPRCFCPSPRDCESGCASSPCQHGGSCHPQRQPPYYSCQCAPPFSGSRCELYTAPPSTPPATCLSQYCADKARDGVCDEACNSHACQWDGGDCSLTMENPWANCSSPLPCWDYINNQCDELCNTVECLFDNFECQGNSKTCKYDKYCADHFKDNHCDQGCNSEECGWDGLDCAADQPENLAEGTLVIVVLMPPEQLLQDARSFLRALGTLLHTNLRIKRDSQGELMVYPYYGEKSAAMKKQRMTRRSLPGEQEQEVAGSKVFLEIDNRQCVQDSDHCFKNTDAAAALLASHAIQGTLSYPLVSVVSESLTPERTQLLYLLAVAVVIILFIILLGVIMAKRKRKHGSLWLPEGFTLRRDASNHKRREPVGQDAVGLKNLSVQVSEANLIGTGTSEHWVDDEGPQPKKVKAEDEALLSEEDDPIDRRPWTQQHLEAADIRRTPSLALTPPQAEQEVDVLDVNVRGPDGCTPLMLASLRGGSSDLSDEDEDAEDSSANIITDLVYQGASLQAQTDRTGEMALHLAARYSRADAAKRLLDAGADANAQDNMGRCPLHAAVAADAQGVFQILIRNRVTDLDARMNDGTTPLILAARLAVEGMVAELINCQADVNAVDDHGKSALHWAAAVNNVEATLLLLKNGANRDMQDNKEETPLFLAAREGSYEAAKILLDHFANRDITDHMDRLPRDVARDRMHHDIVRLLDEYNVTPSPPGTVLTSALSPVICGPNRSFLSLKHTPMGKKSRRPSAKSTMPTSLPNLAKEAKDAKGSRRKKSLSEKVQLSESSVTLSPVDSLESPHTYVSDTTSSPMITSPGILQASPNPMLATAAPPAPVHAQHALSFSNLHEMQPLAHGASTVLPSVSQLLSHHHIVSPGSGSAGSLSRLHPVPVPADWMNRMEVNETQYNEMFGMVLAPAEGTHPGIAPQSRPPEGKHITTPREPLPPIVTFQLIPKGSIAQPAGAPQPQSTCPPAVAGPLPTMYQIPEMARLPSVAFPTAMMPQQDGQVAQTILPAYHPFPASVGKYPTPPSQHSYASSNAAERTPSHSGHLQGEHPYLTPSPESPDQWSSSSPHSASDWSDVTTSPTPGGAGGGQRGPGTHMSEPPHNNMQVYA

SEQ ID NO: 55928 - protein, 236 aa, Homo sapiens [sequence omitted]

SEQ ID NO: 55929 - protein, 239 aa, Homo sapiens
CRDGYEPCVNEGMCVTYHNGTGYCKCPEGFLGEYCQHRDPCEKNRCQNGGTCVAQAMLGKATCRCASGFTGEDCQYSTSHPCFVSRPCLNGGTCHMLSRDTYECTCQVGFTGKECQWTDACLSHPCANGSTCTTVANQFSCKCLTGFTGQKCETDVNECDIPGHCQHGGTCLNLPGSYQCQCPQGFTGQYCDSLYVPCAPSPCVNGGTCRQTGDFTFECNCLPACWPRTPDLRLLLGEK

SEQ ID NO: 55930 - protein, 223 aa, Homo sapiens
MWICPGGGGGGGGGGDREDARPPLCCGRCWRSGCAARPPRMVSIGLRGAVRGARGCHLGRPFSPSVLLCVGRPGSAAGAERGHSLGSQEFGHRRGPLPWCPANRRGSPPSAPRGPGPLTRLLGRREAGSKSQKLLFRSARVQGGGQFCPSGSAFLGVEREPTAGLGGAERRNARFWRGERGQGRQAKRPAPSQPASPLPGGGTWAGCVGLVWMGTGFCGAPEF

SEQ ID NO: 55931 - protein, 863 aa, Homo sapiens [sequence omitted]

SEQ ID NO: 55932 - protein, 2321 aa, Homo sapiens
MGPGARGRRRRRRPMSPPPPPPPVRALPLLLLLAGPGAAAPPCLDGSPCANGGRCTQLPSREAACLCPPGWVGERCQLEDPCHSGPCAGRGVCQSSVVAGTARFSCRCPRGFRGPDCSLPDPCLSSPCAHGARCSVGPDGRFLCSCPPGYQGRSCRSDVDECRVGEPCRHGGTCLNTPGSFRCQCPAGYTGPLCENPAVPCAPSPCRNGGTCRQSGDLTYDCACLPGFEGQNCEVNVDDCPGHRCLNGGTCVDGVNTYNCQCPPEWTGQFCTEDVDECQLQPNACHNGGTCFNTLGGHSCVCVNGWTGESCSQNIDDCATAVCFHGATCHDRVASFYCACPMGKTGLLCHLDDACVSNPCHEDAICDTNPVNGRAICTCPPGFTGGACDQDVDECSIGANPCEHLGRCVNTQGSFLCQCGRGYTGPRCETDVNECLSGPCRNQATCLDRIGQFTCICMAGFTGTYCEVDIDECQSSPCVNGGVCKDRVNGFSCTCPSGFSGSTCQLDVDECASTPCRNGAKCVDQPDGYECRCAEGFEGTLCDRNVDDCSPDPCHHGRCVDGIASFSCACAPGYTGTRCESQVDECRSQPCRHGGKCLDLVDKYLCRCPSGTTGVNCEVNIDDCASNPCTFGVCRDGINRYDCVCQPGFTGPLCNVEINECASSPCGEGGSCVDGENGFRCLCPPGSLPPLCLPPSHPCAHEPCSHGICYDAPGGFRCVCEPGWSGPRCSQSLARDACESQPCRAGGTCSSDGMGFHCTCPPGVQGRQCELLSPCTPNPCEHGGRCESAPGQLPVCSCPQGWQGPRCQQDVDECAGPAPCGPHGICTNLAGSFSCTCHGGYTGPSCDQDINDCDPNPCLNGGSCQDGVGSFSCSCLPGFAGPRCARDVDECLSNPCGPGTCTDHVASFTCTCPPGYGGFHCEQDLPDCSPSSCFNGGTCVDGVNSFSCLCRPGYTGAHCQHEADPCLSRPCLHGGVCSAAHPGFRCTCLESFTGPQCQTLVDWCSRQPCQNGGRCVQTGAYCLCPPGWSGRLCDIRSLPCREAAAQIGVRLEQLCQAGGQCVDEDSSHYCVCPEGRTGSHCEQEVDPCLAQPCQHGGTCRGYMGGYMCECLPGYNGDNCEDDVDECASQPCQHGGSCIDLVARYLCSCPPGTLGVLCEINEDDCGPGPPLDSGPRCLHNGTCVDLVGGFRCTCPPGYTGLRCEADINECRSGACHAAHTRDCLQDPGGGFRCLCHAGFSGPRCQTVLSPCESQPCQHGGQCRPSPGPGGGLTFTCHCAQPFWGPRCERVARSCRELQCPVGVPCQQTPRGPRCACPPGLSGPSCRSFPGSPPGASNASCAAAPCLHGGSCRPAPLAPFFRCACAQGWTGPRCEAPAAAPEVSEEPRCPRAACQAKRGDQRCDRECNSPGCGWDGGDCSLSVGDPWRQCEALQCWRLFNNSRCDPACSSPACLYDNFDCHAGGRERTCNPVYEKYCADHFADGRCDQGCNTEECGWDGLDCASEVPALLARGVLVLTVLLPPEELLRSSADFLQRLSAILRTSLRFRLDAHGQAMVFPYHRPSPGSEPRARRELAPEVIGSVVMLEIDNRLCLQSPENDHCFPDAQSAADYLGALSAVERLDFPYPLRDVRGEPLEPPEPSVPLLPLLVAGAVLLLVILVLGVMVARRKREHSTLWFPEGFSLHKDVASGHKGRREPVGQDALGMKNMAKGESLMGEVATDWMDTECPEAKRLKVEEPGMGAEEAVDCRQWTQHHLVAADIRVAPAMALTPPQGDADADGMDVNVRGPDGFTPLMLASFCGGALEPMPTEEDEADDTSASIISDLICQGAQLGARTDRTGETALHLAARYARADAAKRLLDAGADTNAQDHSGRTPLHTAVTADAQGVFQILIRNRSTDLDARMADGSTALILAARLAVEGMVEELIASHADVNAVDELGKSALHWAAAVNNVEATLALLKNGANKDMQDSKEETPLFLAAREGSYEAAKLLLDHFANREITDHLDRLPRDVAQERLHQDIVRLLDQPSGPRSPPGPHGLGPLLCPPGAFLPGLKAAQSGSKKSRRPPGKAGLGPQGPRGRGKKLTLACPGPLADSSVTLSPVDSLDSPRPFGGPPASPGGFPLEGPYAAATATAVSLAQLGGPGRAGLGRQPPGGCVLSLGLLNPVAVPLDWARLPPPAPPGPSFLLPLAPGPQLLNPGTPVSPQERPPPYLAVPGHGEEYPAAGAHSSPPKARFLRVPSEHPYLTPSPESPEHWASPSPPSLSDWSESTPSPATATGAMATTTGALPAQPLPLSVPSSLAQAQTQLGPQPEVTPKRQVLA

SEQ ID NO: 55933 - protein, 1288 aa, Homo sapiens
AAMGPGARGRRRRRRPMSPPPPPPPVRALPLLLLLAGPGAAAPPCLDGSPCANGGRCTQLPSREAACLCPPGWVGERCQLEDPCHSGPCAGRGVCQSSVVAGTARFSCRCPRGFRGPDCSLPDPCLSSPCAHGARCSVGPDGRFLCSCPPGYQGRSCRSDVDECRVGEPCRHGGTCLNTPGSFRCQCPAGYTGPLCENPAVPCAPSPCRNGGTCRQSGDLTYDCACLPGFEGQNCEVNVDDCPGHRCLNGGTCVDGVNTYNCQCPPEWTGQFCTEDVDECQLQPNACHNGGTCFNTLGGHSCVCVNGWTGESCSQNIDDCATAVCFHGATCHDRVASFYCACPMGKTGLLCHLDDACVSNPCHEDAICDTNPVNGRAICTCPPGFTGGACDQDVDECSIGANPCEHLGRCVNTQGSFLCQCGRGYTGPRCETDVNECLSGPCRNQATCLDRIGQFTCICMAGFTGTYCEVDIDECQSSPCVNGGVCKDRVNGFSCTCPSGFSGSTCQLDVDECASTPCRNGAKCVDQPDGYECRCAEGFEGTLCDRNVDDCSPDPCHHGRCVDGIASFSCACAPGYTGTRCESQVDECRSQPCRHGGKCLDLVDKYLCRCPSGTTGVNCEVNIDDCASNPCTFGVCRDGINRYDCVCQPGFTGPLCNVEINECASSPCGEGGSCVDGENGFRCLCPPGSLPPLCLPPSHPCAHEPCSHGICYDAPGGFRCVCEPGWSGPRCSQSLARDACESQPCRAGGTCSSDGMGFHCTCPPGVQGRQCELLSPCTPNPCEHGGRCESAPGQLPVCSCPQGWQDPCLNGGSCQDGVGSFSCSCLPGFAGPRCARDVDECLSNPCGPGTCTDHVASFTCTCPPGYGGFHCEQDLPDCSPSSCFNGGTCVDGVNSFSCLCRPGYTGAHCQHEADPCLSRPCLHGGVCSAAHPGFRCTCLESFTGPQCQTLVDWCSRQPCQNGGRCVQTGAYCLCPPGWSGRLCDIRSLPCREAAAQIGVRLEQLCQAGGQCVDEDSSHYCVCPEGRTGSHCEQEVDPCLAQPCQHGGTCRGYMGGYMCECLPGYNGDNCEDDVDECASQPCQHGGSCIDLVARYLCSCPPGTLGVLCEINEDDCGPGPPLDSGPRCLHNGTCVDLVGGFRCTCPPGYTGLRCEADINECRSGACHAAHTRDCLQDPGGGFRCLCHAGFSGPRCQTVLSPCESQPCQHGGQCRPSPGPGGGLTFTCHCAQPFWGPRCERVARSCRELQCPVGVPCQQTPRGPRCACPPGLSGPSCRSFPGSPPGASNAS

SEQ ID NO: 55934 - protein, 2003 aa, Homo sapiens
MQPPSLLLLLLLLLLLCVSVVRPRGLLCGSFPEPCANGGTCLSLSLGQGTCQCAPGFLGETCQFPDPCQNAQLCQNGGSCQALLPAPLGLPSSPSPLTPSFLCTCLPGFTGERCQAKLEDPCPPSFCSKRGRCHIQASGRPQCSCMPGWTGEQCQLRDFCSANPCVNGGVCLATYPQIQCHCPPGFEGHACERDVNECFQDPGPCPKGTSCHNTLGSFQCLCPVGQEGPRCELRAGPCPPRGCSNGGTCQLMPEKDSTFHLCLCPPGFIGPDCEVNPDNCVSHQCQNGGTCQDGLDTYTCLCPETWTGWDCSEDVDECETQGPPHCRNGGTCQNSAGSFHCVCVSGWGGTSCEENLDDCIAATCAPGSTCIDRVGSFSCLCPPGRTGLLCHLEDMCLSQPCHGDAQCSTNPLTGSTLCLCQPGYSGPTCHQDLDECLMAQQGPSPCEHGGSCLNTPGSFNCLCPPGYTGSRCEADHNECLSQPCHPGSTCLDLLATFHCLCPPGLEGQLCEVETNECASAPCLNHADCHDLLNGFQCICLPGFSGTRCEEDIDECRSSPCANGGQCQDQPGAFHCKCLPGFEGPRCQTEVDECLSDPCPVGASCLDLPGAFFCLCPSGFTGQLCEVPLCAPNLCQPKQICKDQKDKANCLCPDGSPGCAPPEDNCTCHHGHCQRSSCVCDVGWTGPECEAELGGCISAPCAHGGTCYPQPSGYNCTCPTGYTGPTCSEEMTACHSGPCLNGGSCNPSPGGYYCTCPPSHTGPQCQTSTDYCVSAPCFNGGTCVNRPGTFSCLCAMGFQGPRCEGKLRPSCADSPCRNRATCQDSPQGPRCLCPTGYTGGSCQTLMDLCAQKPCPRNSHCLQTGPSFHCLCLQGWTGPLCNLPLSSCQKAALSQGIDVSSLCHNGGLCVDSGPSYFCHCPPGFQGSLCQDHVNPCESRPCQNGATCMAQPSGYLCQCAPGYDGQNCSKELDACQSQPCHNHGTCTPKPGGFHCACPPGFVGLRCEGDVDECLDQPCHPTGTAACHSLANAFYCQCLPGHTGQWCEVEIDPCHSQPCFHGGTCEATAGSPLGFICHCPKGFEGPTCSHRAPSCGFHHCHHGGLCLPSPKPGFPPRCACLSGYGGPDCLTPPAPKGCGPPSPCLYNGSCSETTGLGGPGFRCSCPHSSPGPRCQKPGAKGCEGRSGDGACDAGCSGPGGNWDGGDCSLGVPDPWKGCPSHSRCWLLFRDGQCHPQCDSEECLFDGYDCETPPACTPAYDQYCHDHFHNGHCEKGCNTAECGWDGGDCRPEDGDPEWGPSLALLVVLSPPALDQQLFALARVLSLTLRVGLWVRKDRDGRDMVYPYPGARAEEKLGGTRDPTYQERAAPQTQPLGKETDSLSAGFVVVMGVDLSRCGPDHPASRCPWDPGLLLRFLAAMAAVGALEPLLPGPLLAVHPHAGTAPPANQLPWPVLCSPVAGVILLALGALLVLQLIRRRRREHGALWLPPGFTRRPRTQSAPHRRRPPLGEDSIGLKALKPKAEVDEDGVVMCSGPEEGEEVGQAEETGPPSTCQLWSLSGGCGALPQAAMLTPPQESEMEAPDLDTRGPDGVTPLMSAVCCGEVQSGTFQGAWLGCPEPWEPLLDGGACPQAHTVGTGETPLHLAARFSRPTAARRLLEAGANPNQPDRAGRTPLHAAVAADAREVCQLLLRSRQTAVDARTEDGTTPLMLAARLAVEDLVEELIAAQADVGARDKWGKTALHWAAAVNNARAARSLLQAGADKDAQDNREQTPLFLAAREGAVEVAQLLLGLGAARELRDQAGLAPADVAHQRNHWDLLTLLEGAGPPEARHKATPGREAGPFPRARTVSVSVPPHGGGALPRCRTLSAGAGPRGGGACLQARTWSVDLAARGGGAYSHCRSLSGVGAGGGPTPRGRRFSAGMRGPRPNPAIMRGRYGVAAGRGGRVSTDDWPCDWVALGACGSASNIPIPPPCLTPSPERGSPQLDCGPPALQEMPINQGGEGKK

SEQ ID NO: 55935 - protein, 1048 aa, Homo sapiens
CAPGYDGQNCSKELDACQSQPCHNHGTCTPKPGGFHCACPPGFVGLRCEGDVDECLDQPCHPTGTAACHSLANAFYCQCLPGHTGQWCEVEIDPCHSQPCFHGGTCEATAGSPLGFICHCPKGFEGPTCSHRAPSCGFHHCHHGGLCLPSPKPGFPPRCACLSGYGGPDCLTPPAPKGCGPPSPCLYNGSCSETTGLGGPGFRCSCPHSSPGPRCQKPGAKGCEGRSGDGACDAGCSGPGGNWDGGDCSLGVPDPWKGCPSHSRCWLLFRDGQCHPQCDSEECLFDGYDCETPPACTPAYDQYCHDHFHNGHCEKGCNTAECGWDGGDCRPEDGDPEWGPSLALLVVLSPPALDQQLFALARVLSLTLRVGLWVRKDRDGRDMVYPYPGARAEEKLGGTRDPTYQERAAPQTQPLGKETDSLSAGFVVVMGVDLSRCGPDHPASRCPWDPGLLLRFLAAMAAVGALEPLLPGPLLAVHPHAGTAPPANQLPWPVLCSPVAGVILLALGALLVLQLIRRRRREHGALWLPPGFTRRPRTQSAPHRRRPPLGEDSIGLKALKPKAEVDEDGVVMCSGPEEGEEVGQAEETGPPSTCQLWSLSGGCGALPQAAMLTPPQESEMEAPDLDTRGPDGVTPLMSAVCCGEVQSGTFQGAWLGCPEPWEPLLDGGACPQAHTVGTGETPLHLAARFSRPTAARRLLEAGANPNQPDRAGRTPLHAAVAADAREVCQLLLRSRQTAVDARTEDGTTPLMLAARLAVEDLVEELIAAQADVGARDKWGKTALHWAAAVNNARAARSLLQAGADKDAQDNREQTPLFLAAREGAVEVAQLLLGLGAARELRDQAGLAPADVAHQRNHWDLLTLLEGAGPPEARHKATPGREAGPFPRARTVSVSVPPHGGGALPRCRTLSAGAGPRGGGACLQARTWSVDLAARGGGAYSHCRSLSGVGAGGGPTPRGRRFSAGMRGPRPNPAIMRGRYGVAAGRGGRVSTDDWPCDWVALGACGSASNIPIPPPCLTPSPERGSPQLDCGPPALQEMPINQGGEGKK

SEQ ID NO: 55936 - protein, 2005 aa, Homo sapiens
MQPPSLLLLLLLLLLLLLCVSVVRPRGLLCGSFPEPCANGGTCLSLSLGQGTCQCAPGFLGETCQFPDPCQNAQLCQNGGSCQALLPAPLGLPSSPSPLTPSFLCTCLPGFTGERCQAQLEDPCPPSFCSKRGRCHIQASGRPQCSCMPGWTGEQCQLRDFCSANPCVNGGVCLATYPQIQCHCPPGFEGHACERDVNECFQDPGPCPKGTSCHNTLGSFQCLCPVGQEGPRCELRAGPCPPRGCSNGGTCQLMPEKDSTFHLCLCPPGFIGPDCEVNPDNCVSHQCQNGGTCQDGLDTYTCLCPETWTGWDCSEDVDECEAQGPPHCRNGGTCQNSAGSFHCVCVSGWGGTSCEENLDDCIAATCAPGSTCIDRVGSFSCLCPPGRTGLLCHLEDMCLSQPCHGDAQCSTNPLTGSTLCLCQPGYSGPTCHQDLDECLMAQQGPSPCEHGGSCLNTPGSFNCLCPPGYTGSRCEADHNECLSQPCHPGSTCLDLLATFHCLCPPGLEGQLCEVETNECASAPCLNHADCHDLLNGFQCICLPGFSGTRCEEDIDECRSSPCANGGQCQDQPGAFHCKCLPGFEGPRCQTEVDECLSDPCPVGASCLDLPGAFFCLCPSGFTGQLCEVPLCAPNLCQPKQICKDQKDKANCLCPDGSPGCAPPEDNCTCHHGHCQRSSCVCDVGWTGPECEAELGGCISAPCAHGGTCYPQPSGYNCTCPTGYTGPTCSEEMTACHSGPCLNGGSCNPSPGGYYCTCPPSHTGPQCQTSTDYCVSAPCFNGGTCVNRPGTFSCLCAMGFQGPRCEGKLRPSCADSPCRNRATCQDSPQGPRCLCPTGYTGGSCQTLMDLCAQKPCPRNSHCLQTGPSFHCLCLQGWTGPLCNLPLSSCQKAALSQGIDVSSLCHNGGLCVDSGPSYFCHCPPGFQGSLCQDHVNPCESRPCQNGATCMAQPSGYLCQCAPGYDGQNCSKELDACQSQPCHNHGTCTPKPGGFHCACPPGFVGLRCEGDVDECLDQPCHPTGTAACHSLANAFYCQCLPGHTGQWCEVEIDPCHSQPCFHGGTCEATAGSPLGFICHCPKGFEGPTCSHRAPSCGFHHCHHGGLCLPSPKPGFPPRCACLSGYGGPDCLTPPAPKGCGPPSPCLYNGSCSETTGLGGPGFRCSCPHSSPGPRCQKPGAKGCEGRSGDGACDAGCSGPGGNWDGGDCSLGVPDPWKGCPSHSRCWLLFRDGQCHPQCDSEECLFDGYDCETPPACTPAYDQYCHDHFHNGHCEKGCNTAECGWDGGDCRPEDGDPEWGPSLALLVVLSPPALDQQLFALARVLSLTLRVGLWVRKDRDGRDMVYPYPGARAEEKLGGTRDPTYQERAAPQTQPLGKETDSLSAGFVVVMGVDLSRCGPDHPASRCPWDPGLLLRFLAAMAAVGALEPLLPGPLLAVHPHAGTAPPANQLPWPVLCSPVAGVILLALGALLVLQLIRRRRREHGALWLPPGFTRRPRTQSAPHRRRPPLGEDSIGLKALKPKAEVDEDGVVMCSGPEEGEEVGQAEETGPPSTCQLWSLSGGCGALPQAAMLTPPQESEMEAPDLDTRGPDGVTPLMSAVCCGEVQSGTFQGAWLGCPEPWEPLLDGGACPQAHTVGTGETPLHLAARFSRPTAARRLLEAGANPNQPDRAGRTPLHAAVAADAREVCQLLLRSRQTAVDARTEDGTTPLMLAARLAVEDLVEELIAAQADVGARDKWGKTALHWAAAVNNARAARSLLQAGADKDAQDNREQTPLFLAAREGAVEVAQLLLGLGAARELRDQAGLAPADVAHQRNHWDLLTLLEGAGPPEARHKATPGREAGPFPRARTVSVSVPPHGGGALPRCRTLSAGAGPRGGGACLQARTWSVDLAARGGGAYSHCRSLSGVGAGGGPTPRGRRFSAGMRGPRPNPAIMRGRYGVAAGRGGRVSTDDWPCDWVALGACGSASNIPIPPPCLTPSPERGSPQLDCGPPALQEMPINQGGEGKK

SEQ ID NO: 55937 - protein, 2003 aa, Homo sapiens
MQPPSLLLLLLLLLLLCVSVVRPRGLLCGSFPEPCANGGTCLSLSLGQGTCQCAPGFLGETCQFPDPCQNAQLCQNGGSCQALLPAPLGLPSSPSPLTPSFLCTCLPGFTGERCQAQLEDPCPPSFCSKRGRCHIQASGRPQCSCMPGWTGEQCQLRDFCSANPCVNGGVCLATYPQIQCHCPPGFEGHACERDVNECFQDPGPCPKGTSCHNTLGSFQCLCPVGQEGPRCELRAGPCPPRGCSNGGTCQLMPEKDSTFHLCLCPPGFIGPDCEVNPDNCVSHQCQNGGTCQDGLDTYTCLCPETWTGWDCSEDVDECETQGPPHCRNGGTCQNSAGSFHCVCVSGWGGTSCEENLDDCIAATCAPGSTCIDRVGSFSCLCPPGRTGLLCHLEDMCLSQPCHGDAQCSTNPLTGSTLCLCQPGYSGPTCHQDLDECLMAQQGPSPCEHGGSCLNTPGSFNCLCPPGYTGSRCEADHNECLSQPCHPGSTCLDLLATFHCLCPPGLEGQLCEVETNECASAPCLNHADCHDLLNGFQCICLPGFSGTRCEEDIDECRSSPCANGGQCQDQPGAFHCKCLPGFEGPRCQTEVDECLSDPCPVGASCLDLPGAFFCLCPSGFTGQLCEVPLCAPNLCQPKQICKDQKDKANCLCPDGSPGCAPPEDNCTCHHGHCQRSSCVCDVGWTGPECEAELGGCISAPCAHGGTCYPQPSGYNCTCPTGYTGPTCSEEMTACHSGPCLNGGSCNPSPGGYYCTCPPSHTGPQCQTSTDYCVSAPCFNGGTCVNRPGTFSCLCAMGFQGPRCEGKLRPSCADSPCRNRATCQDSPQGPRCLCPTGYTGGSCQTLMDLCAQKPCPRNSHCLQTGPSFHCLCLQGWTGPLCNLPLSSCQKAALSQGIDVSSLCHNGGLCVDSGPSYFCHCPPGFQGSLCQDHVNPCESRPCQNGATCMAQPSGYLCQCAPGYDGQNCSKELDACQSQPCHNHGTCTPKPGGFHCACPPGFVGLRCEGDVDECLDQPCHPTGTAACHSLANAFYCQCLPGHTGQWCEVEIDPCHSQPCFHGGTCEATAGSPLGFICHCPKGFEGPTCSHRAPSCGFHHCHHGGLCLPSPKPGFPPRCACLSGYGGPDCLTPPAPKGCGPPSPCLYNGSCSETTGLGGPGFRCSCPHSSPGPRCQKPGAKGCEGRSGDGACDAGCSGPGGNWDGGDCSLGVPDPWKGCPSHSRCWLLFRDGQCHPQCDSEECLFDGYDCETPPACTPAYDQYCHDHFHNGHCEKGCNTAECGWDGGDCRPEDGDPEWGPSLALLVVLSPPALDQQLFALARVLSLTLRVGLWVRKDRDGRDMVYPYPGARAEEKLGGTRDPTYQERAAPQTQPLGKETDSLSAGFVVVMGVDLSRCGPDHPASRCPWDPGLLLRFLAAMAAVGALEPLLPGPLLAVHPHAGTAPPANQLPWPVLCSPVAGVILLALGALLVLQLIRRRRREHGALWLPPGFTRRPRTQSAPHRRRPPLGEDSIGLKALKPKAEVDEDGVVMCSGPEEGEEVGQAEETGPPSTCQLWSLSGGCGALPQAAMLTPPQESEMEAPDLDTRGPDGVTPLMSAVCCGEVQSGTFQGAWLGCPEPWEPLLDGGACPQAHTVGTGETPLHLAARFSRPTAARRLLEAGANPNQPDRAGRTPLHAAVAADAREVCQLLLRSRQTAVDARTEDGTTPLMLAARLAVEDLVEELIAAQADVGARDKWGKTALHWAAAVNNARAARSLLQAGADKDAQDNREQTPLFLAAREGAVEVAQLLLGLGAARELRDQAGLAPADVAHQRNHWDLLTLLEGAGPPEARHKATPGREAGPFPRARTVSVSVPPHGGGALPRCRTLSAGAGPRGGGACLQARTWSVDLAARGGGAYSHCRSLSGVGAGGGPTPRGRRFSAGMRGPRPNPAIMRGRYGVAAGRGGRVSTDDWPCDWVALGACGSASNIPIPPPCLTPSPERGSPQLDCGPPALQEMPINQGGEGKK

SEQ ID NO: 55938 - protein, 186 aa, Homo sapiens
MSAVCCGEVQSGTFQGAWLGCPEPWEPLLDGGACPQAHTVGTGETPLHLAARFSRPTAARRLLEAGANPNQPDRAGRTPLHAAVAADAREVCQLLLRSRQTAVDARTEDGTTPLMLAARLAVEDLVEELIAAQADVGARDKWGADAAIPGGAGRSGGSSPATAGAGGSPRAAGPGWASAGGRRSPT

SEQ ID NO: 55939 - protein, 2002 aa, Homo sapiens
MQPPSLLLLLLLLLLCVSVVRPRGLLCGSFPEPCANGGTCLSLSLGQGTCQCAPGFLGETCQFPDPCQNAQLCQNGGSCQALLPAPLGLPSSPSPLTPSFLCTCLPGFTGERCQAQLEDPCPPSFCSKRGRCHIQASGRPQCSCMPGWTGEQCQLRDFCSANPCVNGGVCLATYPQIQCHCPPGFEGHACERDVNECFQDPGPCPKGTSCHNTLGSFQCLCPVGQEGPRCELRAGPCPPRGCSNGGTCQLMPEKDSTFHLCLCPPGFIGPDCEVNPDNCVSHQCQNGGTCQDGLDTYTCLCPETWTGWDCSEDVDECETQGPPHCRNGGTCQNSAGSFHCVCVSGWGGTSCEENLDDCIAATCAPGSTCIDRVGSFSCLCPPGRTGLLCHLEDMCLSQPCHGDAQCSTNPLTGSTLCLCQPGYSGPTCHQDLDECLMAQQGPSPCEHGGSCLNTPGSFNCLCPPGYTGSRCEADHNECLSQPCHPGSTCLDLLATFHCLCPPGLEGQLCEVETNECASAPCLNHADCHDLLNGFQCICLPGFSGTRCEEDIDECRSSPCANGGQCQDQPGAFHCKCLPGFEGPRCQTEVDECLSDPCPVGASCLDLPGAFFCLCPSGFTGQLCEVPLCAPNLCQPKQICKDQKDKANCLCPDGSPGCAPPEDNCTCHHGHCQRSSCVCDVGWTGPECEAELGGCISAPCAHGGTCYPQPSGYNCTCPTGYTGPTCSEEMTACHSGPCLNGGSCNPSPGGYYCTCPPSHTGPQCQTSTDYCVSAPCFNGGTCVNRPGTFSCLCAMGFQGPRCEGKLRPSCADSPCRNRATCQDSPQGPRCLCPTGYTGGSCQTLMDLCAQKPCPRNSHCLQTGPSFHCLCLQGWTGPLCNLPLSSCQKAALSQGIDVSSLCHNGGLCVDSGPSYFCHCPPGFQGSLCQDHVNPCESRPCQNGATCMAQPSGYLCQCAPGYDGQNCSKELDACQSQPCHNHGTCTPKPGGFHCACPPGFVGLRCEGDVDECLDQPCHPTGTAACHSLANAFYCQCLPGHTGQWCEVEIDPCHSQPCFHGGTCEATAGSPLGFICHCPKGFEGPTCSHRAPSCGFHHCHHGGLCLPSPKPGFPPRCACLSGYGGPDCLTPPAPKGCGPPSPCLYNGSCSETTGLGGPGFRCSCPHSSPGPRCQKPGAKGCEGRSGDGACDAGCSGPGGNWDGGDCSLGVPDPWKGCPSHSRCWLLFRDGQCHPQCDSEECLFDGYDCETPPACTPAYDQYCHDHFHNGHCEKGCNTAECGWDGGDCRPEDGDPEWGPSLALLVVLSPPALDQQLFALARVLSLTLRVGLWVRKDRDGRDMVYPYPGARAEEKLGGTRDPTYQERAAPQTQPLGKETDSLSAGFVVVMGVDLSRCGPDHPASRCPWDPGLLLRFLAAMAAVGALEPLLPGPLLAVHPHAGTAPPANQLPWPVLCSPVAGVILLALGALLVLQLIRRRRREHGALWLPPGFTRRPRTQSAPHRRRPPLGEDSIGLKALKPKAEVDEDGVVMCSGPEEGEEVGQAEETGPPSTCQLWSLSGGCGALPQAAMLTPPQESEMEAPDLDTRGPDGVTPLMSAVCCGEVQSGTFQGAWLGCPEPWEPLLDGGACPQAHTVGTGETPLHLAARFSRPTAARRLLEAGANPNQPDRAGRTPLHAAVAADAREVCQLLLRSRQTAVDARTEDGTTPLMLAARLAVEDLVEELIAAQADVGARDKWGKTALHWAAAVNNARAARSLLQAGADKDAQDNREQTPLFLAAREGAVEVAQLLLGLGAARELRDQAGLAPADVAHQRNHWDLLTLLEGAGPPEARHKATPGREAGPFPRARTVSVSVPPHGGGALPRCRTLSAGAGPRGGGACLQARTWSVDLAARGGGAYSHCRSLSGVGAGGGPTPRGRRFSAGMRGPRPNPAIMRGRYGVAAGRGGRVSTDDWPCDWVALGACGSASNIPIPPPCLTPSPERGSPQLDCGPPALQEMPINQGGEGKK

SEQ ID NO: 55940 - protein, 2003 aa, Homo sapiens; identical to SEQ ID NO: 55934

SEQ ID NO: 55941 - protein, 186 aa, Homo sapiens; identical to SEQ ID NO: 55938

SEQ ID NO: 55942 - protein, 186 aa, Homo sapiens; identical to SEQ ID NO: 55938

SEQ ID NO: 55943 - protein, 186 aa, Homo sapiens; identical to SEQ ID NO: 55938

SEQ ID NO: 55944 - protein, 186 aa, Homo sapiens; identical to SEQ ID NO: 55938

SEQ ID NO: 55945 - protein, 186 aa, Homo sapiens; identical to SEQ ID NO: 55938

SEQ ID NO: 55946 - protein, 496 aa, Homo sapiens
MGRGVRVLLLLSLLHCAGGSEGRKTWRRRGQQPPPPPRTEAAPAAGQPVESFPLDFTAVEGNMDSFMAQVKSLAQSLYPCSAQQLNEDLRLHLLLNTSVTCNDGSPAGYYLKESRGSRRWLLFLEGGWYCFNRENCDSRYDTMRRLMSSRDWPRTRTGTGILSSQPEENPYWWNANMVFIPYCSSDVWSGASSKSEKNEYAFMGALIIQEVVRELLGRGLSGAKVLLLAGSSAGGTGVLLNVDRVAEQLEKLGYPAIQVRGLADSGWFLDNKQYRHTDCVDTITCAPTEAIRRGIRYWNGVVPERCRRQFQEGEEWNCFFGYKVYPTLRCPVFVVQWLFDEAQLTVDNVHLTGQPVQEGLRLYIQNLGRELRHTLKDVPASFAPACLSHEIIIRSHWTDVQVKGTSLPRALHCWDRSLHDSHKASKTPLKGCPVHLVDSCPWPHCNPSCPTVRDQFTGQEMNVAQFLMHMGFDMQTVAQPQGLEPSELLGMLSNGS

SEQ ID NO: 55947 - protein, 295 aa, Homo sapiens
MGRGVRVLLLLSLLHCAGGSEGRKTWRRRGQQPPPPPRTEAAPAAGQPVESFPLDFTAVEGNMDSFMAQVKSLAQSLYPCSAQQLNEDLRLHLLLNTSVTCNDGSPAGYYLKESRGSRRWLLFLEGGWYCFNRENCDSRYDTMRRLMSSRDWPRTRTGTGILSSQPEENPYWWNANMVFIPYCSSDVWSGASSKSEKNEYAFMGALIIQEVVRELLGRGLSGAKVLLLAGSSAGGTGVLLNVDRVAEQLEKLGYPAIQVRGLADSGWFLDNKQYRHTDCVDTITCAPTEAIRRGI

SEQ ID NO: 55948 - protein, 1359 aa, Homo sapiens
MAEAGLRGWLLWALLLRLAQSEPYTTIHQPGYCAFYDECGKNPELSGSLMTLSNVSCLSNTPARKITGDHLILLQKICPRLYTGPNTQACCSAKQLVSLEASLSITKALLTRCPACSDNFVNLHCHNTCSPNQSLFINVTRVAQLGAGQLPAVVAYEAFYQHSFAEQSYDSCSRVRVPAAATLAVGTMCGVYGSALCNAQRWLNFQGDTGNGLAPLDITFHLLEPGQAVGSGIQPLNEGVARCNESQGDDVATCSCQDCAASCPAIARPQALDSTFYLGQMPGSLVLIIILCSVFAVVTILLVGFRVAPARDKSKMVDPKKGTSLSDKLSFSTHTLLGQFFQGWGTWVASWPLTILVLSVIPVVALAAGLVFTELTTDPVELWSAPNSQARSEKAFHDQHFGPFFRTNQVILTAPNRSSYRYDSLLLGPKNFSGILDLDLLLELLELQERLRHLQVWSPEAQRNISLQDICYAPLNPDNTSLYDCCINSLLQYFQNNRTLLLLTANQTLMGQTSQVDWKDHFLYCANAPLTFKDGTALALSCMADYGAPVFPFLAIGGYKGKDYSEAEALIMTFSLNNYPAGDPRLAQAKLWEEAFLEEMRAFQRRMAGMFQVTFMAERSLEDEINRTTAEDLPIFATSYIVIFLYISLALGSYSSWSRVMVDSKATLGLGGVAVVLGAVMAAMGFFSYLGIRSSLVILQVVPFLVLSVGADNIFIFVLEYQRLPRRPGEPREVHIGRALGRVAPSMLLCSLSEAICFFLGALTPMPAVRTFALTSGLAVILDFLLQMSAFVALLSLDSKRQEASRLDVCCCVKPQELPPPGQGEGLLLGFFQKAYAPFLLHWITRGVVLLLFLALFGVSLYSMCHISVGLDQELALPKDSYLLDYFLFLNRYFEVGAPVYFVTTLGYNFSSEAGMNAICSSAGCNNFSFTQKIQYATEFPEQSYLAIPASSWVDDFIDWLTPSSCCRLYISGPNKDKFCPSTVNSLNCLKNCMSITMGSVRPSVEQFHKYLPWFLNDRPNIKCPKGGLAAYSTSVNLTSDGQVLDTVAILSPRLEYSGTISAHCNLYLLDSTSRFMAYHKPLKNSQDYTEALRAARELAANITADLRKVPGTDPAFEVFPYTITNVFYEQYLTILPEGLFMLSLCLVPTFAVSCLLLGLDLRSGLLNLLSIVMILVDTVGFMALWGISYNAVSLINLVSAVGMSVEFVSHITRSFAISTKPTWLERAKEATISMGSAVFAGVAMTNLPGILVLGLAKAQLIQIFFFRLNLLITLLGLLHGLVFLPVILSYVGPDVNPALALEQKRAEEAVAAVMVASCPNHPSRVSTADNIYVNHSFEGSIKGAGAISNFLPNNGRQF

SEQ ID NO: 55949 - protein, 1332 aa, Homo sapiens
MAEAGLRGWLLWALLLRLAQSEPYTTIHQPGYCAFYDECGKNPELSGSLMTLSNVSCLSNTPARKITGDHLILLQKICPRLYTGPNTQACCSAKQLVSLEASLSITKALLTRCPACSDNFVNLHCHNTCSPNQSLFINVTRVAQLGAGQLPAVVAYEAFYQHSFAEQSYDSCSRVRVPAAATLAVGTMCGVYGSALCNAQRWLNFQGDTGNGLAPLDITFHLLEPGQAVGSGIQPLNEGVARCNESQGDDVATCSCQDCAASCPAIARPQALDSTFYLGQMPGSLVLIIILCSVFAVVTILLVGFRVAPARDKSKMVDPKKGTSLSDKLSFSTHTLLGQFFQGWGTWVASWPLTILVLSVIPVVALAAGLVFTELTTDPVELWSAPNSQARSEKAFHDQHFGPFFRTNQVILTAPNRSSYRYDSLLLGPKNFSGILDLDLLLELLELQERLRHLQVWSPEAQRNISLQDICYAPLNPDNTSLYDCCINSLLQYFQNNRTLLLLTANQTLMGQTSQVDWKDHFLYCANAPLTFKDGTALALSCMADYGAPVFPFLAIGGYKGKDYSEAEALIMTFSLNNYPAGDPRLAQAKLWEEAFLEEMRAFQRRMAGMFQVTFMAERSLEDEINRTTAEDLPIFATSYIVIFLYISLALGSYSSWSRVMVDSKATLGLGGVAVVLGAVMAAMGFFSYLGIRSSLVILQVVPFLVLSVGADNIFIFVLEYQRLPRRPGEPREVHIGRALGRVAPSMLLCSLSEAICFFLGALTPMPAVRTFALTSGLAVILDFLLQMSAFVALLSLDSKRQEASRLDVCCCVKPQELPPPGQGEGLLLGFFQKAYAPFLLHWITRGVVLLLFLALFGVSLYSMCHISVGLDQELALPKDSYLLDYFLFLNRYFEVGAPVYFVTTLGYNFSSEAGMNAICSSAGCNNFSFTQKIQYATEFPEQSYLAIPASSWVDDFIDWLTPSSCCRLYISGPNKDKFCPSTVNSLNCLKNCMSITMGSVRPSVEQFHKYLPWFLNDRPNIKCPKGGLAAYSTSVNLTSDGQVLASRFMAYHKPLKNSQDYTEALRAARELAANITADLRKVPGTDPAFEVFPYTITNVFYEQYLTILPEGLFMLSLCLVPTFAVSCLLLGLDLRSGLLNLLSIVMILVDTVGFMALWGISYNAVSLINLVSAVGMSVEFVSHITRSFAISTKPTWLERAKEATISMGSAVFAGVAMTNLPGILVLGLAKAQLIQIFFFRLNLLITLLGLLHGLVFLPVILSYVGPDVNPALALEQKRAEEAVAAVMVASCPNHPSRVSTADNIYVNHSFEGSIKGAGAISNFLPNNGRQF

SEQ ID NO: 55950 - protein, 1286 aa, Homo sapiens
MAEAGLRGWLLWALLLRLAQSEPYTTIHQPGYCAFYDECGKNPELSGSLMTLSNVSCLSNTPARKITGDHLILLQKICPRLYTGPNTQACCSAKQLVSLEASLSITKALLTRCPACSDNFVNLHCHNTCSPNQSLFINVTRVAQLGAGQLPAVVAYEAFYQHSFAEQSYDSCSRVRVPAAATLAVGTMCGVYGSALCNAQRWLNFQGDTGNGLAPLDITFHLLEPGQAVGSGIQPLNEGVARCNESQGDDVATCSCQDCAASCPAIARPQALDSTFYLGQMPGSLVLIIILCSVFAVVTILLVGFRVAPARDKSKMVDPKKGTSLSDKLSFSTHTLLGQFFQGWGTWVASWPLTILVLSVIPVVALAAGLVFTELTTDPVELWSAPNSQARSEKAFHDQHFGPFFRTNQVILTAPNRSSYRYDSLLLGPKNFSGILDLDLLLELLELQERLRHLQVWSPEAQRNISLQDICYAPLNPDNTSLYDCCINSLLQYFQNNRTLLLLTANQTLMGQTSQVDWKDHFLYCANAPLTFKDGTALALSCMADYGAPVFPFLAIGGYKGKDYSEAEALIMTFSLNNYPAGDPRLAQAKLWEEAFLEEMRAFQRRMAGMFQVTFMAERSLEDEINRTTAEDLPIFATSYIVIFLYISLALGSYSSWSRVMVDSKATLGLGGVAVVLGAVMAAMGFFSYLGIRSSLVILQVVPFLVLSVGADNIFIFVLEYQRLPRRPGEPREVHIGRALGRVAPSMLLCSLSEAICFFLGALTPMPAVRTFALTSGLAVILDFLLQMSAFVALLSLDSKRQEASRLDVCCCVKPQELPPPGQGEGLLLGFFQKAYAPFLLHWITRGVVVGAPVYFVTTLGYNFSSEAGMNAICSSAGCNNFSFTQKIQYATEFPEQSYLAIPASSWVDDFIDWLTPSSCCRLYISGPNKDKFCPSTVNSLNCLKNCMSITMGSVRPSVEQFHKYLPWFLNDRPNIKCPKGGLAAYSTSVNLTSDGQVLASRFMAYHKPLKNSQDYTEALRAARELAANITADLRKVPGTDPAFEVFPYTITNVFYEQYLTILPEGLFMLSLCLVPTFAVSCLLLGLDLRSGLLNLLSIVMILVDTVGFMALWGISYNAVSLINLVSAVGMSVEFVSHITRSFAISTKPTWLERAKEATISMGSAVFAGVAMTNLPGILVLGLAKAQLIQIFFFRLNLLITLLGLLHGLVFLPVILSYVGPDVNPALALEQKRAEEAVAAVMVASCPNHPSRVSTADNIYVNHSFEGSIKGAGAISNFLPNNGRQF

SEQ ID NO: 55951 - protein, 260 aa, Homo sapiens
MPQNEYIELHRKRYGYRLDYHEKKRKKESREAHERSKKAKKMIGLKAKLYHKQRHAEKIQMKKTIKMHEKRNTKQKNDEKTPQGAVPAYLLDREGQSRAKVLSNMIKQKRKEKAGKWEVPLPKVRAQGETEVLKVIRTGKRKKKAWKRMVTKVCFVGDGFTRKPPKYERFIRPMGLRFKKAHVTHPELKATFCLPILGVKKNPSSPLYTTLGVITKGTVIEVNVSELGLVTQGGKVIWGKYAQVTNNPENDGCINAVLLV

SEQ ID NO: 55952 - protein, 502 aa, Homo sapiens
MSCPVPACCALLLVLGLCRARPRNALLLLADDGGFESGAYNNSAIATPHLDALARRSLLFRNAFTSVSSCSPSRASLLTGLPQHQNGMYGLHQDVHHFNSFDKVRSLPLLLSQAGVRTGIIGKKHVGPETVYPFDFAYTEENGSVLQVGRNITRIKLLVRKFLQTQDDRPFFLYVAFHDPHRCGHSQPQYGTFCEKFGNGESGMGRIPDWTPQAYDPLDVLVPYFVPNTPAARADLAAQYTTVGRMDQGVGLVLQELRDAGVLNDTLVIFTSDNGIPFPSGRTNLYWPGTAEPLLVSSPEHPKRWGQVSEAYVSLLDLTPTILDWFSIPYPSYAIFGSKTIHLTGRSLLPALEAEPLWATVFGSQSHHEVTMSYPMRSVQHRHFRLVHNLNFKMPFPIDQDFYVSPTFQDLLNRTTAGQPTGWYKDLRHYYYRARWELYDRSRDPHETQNLATDPRFAQLLEMLRDQLAKWQWETHDPWVCAPDGVLEEKLSPQCQPLHNEL

SEQ ID NO: 55953 - protein, 299 aa, Homo sapiens
MGRIPDWTPQAYDPLDVLVPYFVPNTPAARADLAAQYTTVGRMDQGVGLVLQELRDAGVLNDTLVIFTSDNGIPFPSGRTNLYWPGTAEPLLVSSPEHPKRWGQVSEAYVSLLDLTPTILDWFSIPYPSYAIFGSKTIHLTGRSLLPALEAEPLWATVFGSQSHHEVTMSYPMRSVQHRHFRLVHNLNFKMPFPIDQDFYVSPTFQDLLNRTTAGQPTGWYKDLRHYYYRARWELYDRSRDPHETQNLATDPRFAQLLEMLRDQLAKWQWETHDPWVCAPDGVLEEKLSPQCQPLHNEL

SEQ ID NO: 55954 - protein, 205 aa, Homo sapiens
MSCPVPACCALLLVLGLCRARPRNALLLLADRALSVSHLTQRMTEALRVARTTTAPSPPRTWTPWPAAASSFAMPSPRSAAALPAAPASSLACPSIRMGCTGCTRTCTTSTPSTRCGACRCCSAKLVCAQASSGRSTWGRRPCTRLTLRTRRRMAPSSRWGGTSLELSCSSGNSCRLRMTGLSSSTSPSTTPTLWALPAPVRNLL

SEQ ID NO: 55955 - protein, 396 aa, Homo sapiens
MACAGLLTVCLLRPPAPQPQPQTPRHPQLAPDPGPAGHTLFQDVFRRADKNDDGKLSFEEFQNYFADGVLSLGELQELFSGIDGHLTDNLETEKLCDYFSEHLGVYRPVLAALESLNRAVLAAMDATKLEYERASKVDQFVTRFLLRETVSQLQALQSSLEGASDTLEAQAHGWRSDAESVEAQSRLCGSRRAGRRALRSVSRSSTWSPGSSDTGRSSEAEMQWRLQVNRLQELIDQLECKVRAVGPGPHKGGPSWYPPEPGPCWRPGPHSVPSQAPRLEPLREEDLAKGPDLHILMAQRQVQVAEEGLQDFHRALRCYVDFTGAQSHCLHVSAQKMLDGASFTLYEFWQDEASWRRHQQSPGSKAFQRILIDHLRAPDTLTTVFFPASWWIMNNN

SEQ ID NO: 55956 - protein, 362 aa, Homo sapiens
MACAGLLTVCLLRPPAPQPQPQTPRHPQLAPDPGPAGHTLFQDVFRRADKNDDGKLSFEEFQNYFADGVLSLGELQELFSGIDGHLTDNLETEKLCDYFSEHLGVYRPVLAALESLNRAVLAAMDATKLEYERASKVDQFVTRFLLRETVSQLQALQSSLEGASDTLEAQAHGWRSDAESVEAQSRLCGSRRAGRRALRSVSRSSTWSPGSSDTGRSSEAEMQWRLQVNRLQELIDQLECKAPRLEPLREEDLAKGPDLHILMAQRQVQVAEEGLQDFHRALRCYVDFTGAQSHCLHVSAQKMLDGASFTLYEFWQDEASWRRHQQSPGSKAFQRILIDHLRAPDTLTTVFFPASWWIMNNN

SEQ ID NO: 55957 - protein, 289 aa, Homo sapiens
MACAGLLTVCLLRPPAPQPQPQTPRHPQLAPDPGPAGHTLFQDVFRRADKNDDGKLSFEEFQNYFADGVLSLGELQELFSGIDGHLTDNLETEKLCDYFSEHLGVYRPVLAALESLNRAVLAAMDATKLEYERASKVDQFVTRFLLRETVSQLQALQSSLEGASDTLEAQAHGWRSDAESVEAQSRLCGSRRAGRRALRSVSRSSTWSPGSSDTGRSSEAEMQWRLQVNRLQELIDQLECKHILMAQRQVQVAEEGLQDFHRALRCYVDFTGAQSHCLHVSAQKMLDGA

SEQ ID NO: 55958 - protein, 140 aa, Homo sapiens
MASVDFKTYVDQACRAAEEFVNVYYTTMDKRRRLLSRLYMGTATLVWNGNAVSGQESLSEFFEMLPSSEFQISVVDCQPVHDEATPSQTTVLVVICGSVKFEGNKQRDFNQNFILTAQASPSNTVWKIASDCFRFQDWAS

SEQ ID NO: 55959 - protein, 327 aa, Homo sapiens
MAVPAKKRKMNFSEREVEIIVEELELKKHLLVNHFNAGVPLAAKSAAWHGILRRVNAVATCRRELPEVKKKWSDLKTEVRRKVAQVRAAVEGGEAPGPTEEDGAGGPGTGGGSGGGGPAVAPVLLTPMQQRICNLLGEATIISLPSTTEIHPVALGPSATAAAATVTLTQIPTETTYHTLEEGVVEYCTAEAPPPLPPETPVDMMAQHADTSVKPQALKSRIALNSAKLIQEQRVTNLHVKEIAQHLEQQNDLLQMIRRSQEVQACAQERQAQAMEGTQAALSVLIQVLRPMIKDFRRYLQSNTANPAPASDPGQVAQNGQPDSIIQ

SEQ ID NO: 55960 - protein, 494 aa, Homo sapiens
MEVVEAAAAQLETLKFNGTDFGVGEGPAAPSPGSAPVPGTQPPLQSFEGSPDAGQTVEVKPAGEQPLQPVLNAVAAGTPAPQPQPPAESPACGDCVTSPGAAEPARAPDSLETSDSDSDSDSETDSDSSSSSSSSSSSSSSSSSSCISLPPVLSDGDDDLQIEKENKNFPLKTKDELLLNELPSVEELTIILPEDIELKPLGMVSSIIEQLVIIESMTNLPPVNEETVIFKSDRQAAGKIFEIFGPVAHPFYVLRFNSSDHIESKGIKIKETMYFAPSMKDFTQYIFTEKLKQDKGSDASWKNDQEPPPEALDFSDDEKEKEAKQRKKSQIQGRKKLKSEFNEPGEDFTEVHQNWNAHSSASEHAKGYRNREFTRGFSRARYPRSCHGRPPPQHFYNSEHMVSQETSGFPSQRQNNPIMPQYPFPLPVFDMHNFPLRPPPPPPPPPVNMGWATPNMAAHPLLNLPYSLPPPPPPPPLPPPPSSGDSNSHFGPYY

SEQ ID NO: 55961 - protein, 389 aa, Homo sapiens
MEVVEAAAAQLETLKFNGTDFGVGEGPAAPSPGSAPVPGTQPPLQSFEGSPDAGQTVEVKPAGEQPLQPVLNAVAAGTPAPQPQPPAESPACGDCVTSPGAAEPARAPDSLETSDSDSDSDSETDSDSSSSSSSSSSSSSSSSSSCISLPPVLSDGDDDLQIEKENKNFPLKTKDELLLNELPSVEELTIILPEDIELKPLGMVSSIIEQLVIIESMTNLPPVNEETVIFKSDRQAAGKIFEIFGPVAHPFYVLRFNSSDHIESKGIKIKETMYFAPSMKDFTQYIFTEKLKQDKGSDASWKNDQEPPPEALDFSDDEKEKEAKQRKKSQIQGRKKLKSEFNEPGTGISHRYCGLGSRPLQSSESHKLFGFQMHIKVTFTCYFSLLSMQ

SEQ ID NO: 55962 - protein, 114 aa, Homo sapiens
LASRLGPVSTANMSRPVRNRKVVDYSQFQESDDADFESEDSEDKDVKTKKDDSHSAEDSEDEKEDHKNVRQQRQAASKAASKQREMLMEDVGSEEEQEEEDEAPFQERKDSFSQ

SEQ ID NO: 55963 - protein, 243 aa, Homo sapiens
MSRPVRNRKVVDYSQFQESDDADEDYGRDSGPPTKKIRSSPREAKNKRRSGKNSQEDSEDSEDKDVKTKKDDSHSAEDSEDEKEDHKNVRQQRQAASKAASKQREMLMEDVGSEEEQEEEDEAPFQEKDSGSDEDFLMEDDDDSDYGSSKKKNKKMVKKSKPERKEKKMPKPRLKATVTPSPVKGKGKVGRPTASKASKEKTPSPKEEDEEPESPPEKKTSTSPPPEKSGDEGSEDEAPSGED

SEQ ID NO: 55964 - protein, 373 aa, Homo sapiens
MSPCPPQQSRNRVIQLSTSELGEMELTWQEIMSITELQGLNAPSEPSFEPQAPAPYLGPPPPTTYCPCSIHPDSGFPLPPPPYELPASTSHVPDPPYSYGNMAIPVSKPLSLSGLLSEPLQDPLALLDIGLPAGPPKPQEDPESDSGLSLNYSDAESLELEGTEAGRRRSEYVEMYPVEYPYSLMPNSLAHSNYTLPAAETPLALEPSSGPVRAKPTARGEAGSRDERRALAMKIPFPTDKIVNLPVDDFNELLARYPLTESQLALVRDIRRRGKNKVAAQNCRKRKLETIVQLERELERLTNERERLLRARGEADRTLEVMRQQLTELYRDIFQHLRDESGNSYSPEEYALQQAADGTIFLVPRGTKMEATD

SEQ ID NO: 55965 - protein, 373 aa, Homo sapiens; identical to SEQ ID NO: 55964

SEQ ID NO: 55966 - protein, 373 aa, Homo sapiens; identical to SEQ ID NO: 55964

SEQ ID NO: 55967 - protein, 373 aa, Homo sapiens; identical to SEQ ID NO: 55964

SEQ ID NO: 55968 - protein, 343 aa, Homo sapiens
MSPCPPQQSRNRVIQLSTSELGEMELTWQEIMSITELQGLNAPSEPSFEPQAPAPYLGPPPPTTYCPCSIHPDSGFPLPPPPYELPASTSHVPDPPYSYGNMAIPVSKPLSLSGLLSEPLQDPLALLDIGLPAGPPKPQEDPESDSGLSLNYSDAESLELEGTEAGRRRSEYVEMYPVEYPYSLMPNSLAHSNYTLPAAETPLALEPSSGPVRAKPTARGEAGSRDERRALAMKIPFPTDKIVNLPVDDFNELLARYPLTESQLALVRDIRRRGKNKVAAQNCRKRKLETIVQLERELERLTNERERLLRARGEADRTLEVMRQQLTELYRDIFQHLRDESGN

SEQ ID NO: 55969 - protein, 742 aa, Homo sapiens
MLSLKKYLTEGLLQFTILLSLIGVRVDVDTYLTSQLPPLREIILGPSSAYTQTQFHNLRNTLDGYGIHPKSIDLDNYFTARRLLSQVRALDRFQVPTTEVNAWLVHRDPEGSVSGSQPNSGLALESSSGLQDVTGPDNGVRESETEQGFGEDLEDLGAVAPPVSGDLTKEDIDLIDILWRQDIDLGAGREVFDYSHRQKEQDVEKELRDGGEQDTWAGEGAEALARNLLVDGETGESFPAQFPADISSITEAVPSESEPPALQNNLLSPLLTGTESPFDLEQQWQDLMSIMEMQAMEVNTSASEILYSAPPGDPLSTNYSLAPNTPINQNVSLHQASLGGCSQDFLLFSPEVESLPVASSSTLLPLAPSNSTSLNSTFGSTNLTGLFFPPQLNGTANDTAGPELPDPLGGLLDEAMLDEISLMDLAIEEGFNPVQASQLEEEFDSDSGLSLDSSHSPSSLSSSEGSSSSSSSSSSSSSSASSSASSSFSEEGAVGYSSDSETLDLEEAEGAVGYQPEYSKFCRMSYQDPAQLSCLPYLEHVGHNHTYNMAPSALDSADLPPPSALKKGSKEKQADFLDKQMSRDEHRARAMKIPFTNDKIINLPVEEFNELLSKYQLSEAQLSLIRDIRRRGKNKMAAQNCRKRKLDTILNLERDVEDLQRDKARLLREKVEFLRSLRQMKQKVQSLYQEVFGRLRDENGRPYSPSQYALQYAGDGSVLLIPRTMADQQARRQERKPKDRRK

SEQ ID NO: 55970 - protein, 772 aa, Homo sapiens
MLSLKKYLTEGLLQFTILLSLIGVRVDVDTYLTSQLPPLREIILGPSSAYTQTQFHNLRNTLDGYGIHPKSIDLDNYFTARRLLSQVRALDRFQVPTTEVNAWLVHRDPEGSVSGSQPNSGLALESSSGLQDVTGPDNGVRESETEQGFGEDLEDLGAVAPPVSGDLTKEDIDLIDILWRQDIDLGAGREVFDYSHRQKEQDVEKELRDGGEQDTWAGEGAEALARNLLVDGETGESFPAQVPSGEDQTALSLEECLRLLEATCPFGENAEFPADISSITEAVPSESEPPALQNNLLSPLLTGTESPFDLEQQWQDLMSIMEMQAMEVNTSASEILYSAPPGDPLSTNYSLAPNTPINQNVSLHQASLGGCSQDFLLFSPEVESLPVASSSTLLPLAPSNSTSLNSTFGSTNLTGLFFPPQLNGTANDTAGPELPDPLGGLLDEAMLDEISLMDLAIEEGFNPVQASQLEEEFDSDSGLSLDSSHSPSSLSSSEGSSSSSSSSSSSSSSASSSASSSFSEEGAVGYSSDSETLDLEEAEGAVGYQPEYSKFCRMSYQDPAQLSCLPYLEHVGHNHTYNMAPSALDSADLPPPSALKKGSKEKQADFLDKQMSRDEHRARAMKIPFTNDKIINLPVEEFNELLSKYQLSEAQLSLIRDIRRRGKNKMAAQNCRKRKLDTILNLERDVEDLQRDKARLLREKVEFLRSLRQMKQKVQSLYQEVFGRLRDENGRPYSPSQYALQYAGDGSVLLIPRTMADQQARRQERKPKDRRK

SEQ ID NO: 55971 - protein, 791 aa, Homo sapiens
FVFWKILKTKKHKHSGPSAMLSLKKYLTEGLLQFTILLSLIGVRVDVDTYLTSQLPPLREIILGPSSAYTQTQFHNLRNTLDGYGIHPKSIDLDNYFTARRLLSQVRALDRFQVPTTEVNAWLVHRDPEGSVSGSQPNSGLALESSSGLQDVTGPDNGVRESETEQGFGEDLEDLGAVAPPVSGDLTKEDIDLIDILWRQDIDLGAGREVFDYSHRQKEQDVEKELRDGGEQDTWAGEGAEALARNLLVDGETGESFPAQVPSGEDQTALSLEECLRLLEATCPFGENAEFPADISSITEAVPSESEPPALQNNLLSPLLTGTESPFDLEQQWQDLMSIMEMQAMEVNTSASEILYSAPPGDPLSTNYSLAPNTPINQNVSLHQASLGGCSQDFLLFSPEVESLPVASSSTLLPLAPSNSTSLNSTFGSTNLTGLFFPPQLNGTANDTAGPELPDPLGGLLDEAMLDEISLMDLAIEEGFNPVQASQLEEEFDSDSGLSLDSSHSPSSLSSSEGSSSSSSSSSSSSSSASSSASSSFSEEGAVGYSSDSETLDLEEAEGAVGYQPEYSKFCRMSYQDPAQLSCLPYLEHVGHNHTYNMAPSALDSADLPPPSALKKGSKEKQADFLDKQMSRDEHRARAMKIPFTNDKIINLPVEEFNELLSKYQLSEAQLSLIRDIRRRGKNKMAAQNCRKRKLDTILNLERDVEDLQRDKARLLREKVEFLRSLRQMKQKVQSLYQEVFGRLRDENGRPYSPSQYALQYAGDGSVLLIPRTMADQQARRQERKPKDRRK

SEQ ID NO: 55972 - protein, 616 aa, Homo sapiens
MTRLDRSSHSGGGHAKGSRPLNSLLAGHRVAQPASAPGSRASVQDIDLIDILWRQDIDLGAGREVFDYSHRQKEQDVEKELRDGGEQDTWAGEGAEALARNLLVDGETGESFPAQFPADISSITEAVPSESEPPALQNNLLSPLLTGTESPFDLEQQWQDLMSIMEMQAMEVNTSASEILYSAPPGDPLSTNYSLAPNTPINQNVSLHQASLGGCSQDFLLFSPEVESLPVASSSTLLPLAPSNSTSLNSTFGSTNLTGLFFPPQLNGTANDTAGPELPDPLGGLLDEAMLDEISLMDLAIEEGFNPVQASQLEEEFDSDSGLSLDSSHSPSSLSSSEGSSSSSSSSSSSSSSASSSASSSFSEEGAVGYSSDSETLDLEEAEGAVGYQPEYSKFCRMSYQDPAQLSCLPYLEHVGHNHTYNMAPSALDSADLPPPSALKKGSKEKQADFLDKQMSRDEHRARAMKIPFTNDKIINLPVEEFNELLSKYQLSEAQLSLIRDIRRRGKNKMAAQNCRKRKLDTILNLERDVEDLQRDKARLLREKVEFLRSLRQMKQKVQSLYQEVFGRLRDENGRPYSPSQYALQYAGDGSVLLIPRTMADQQARRQERKPKDRRK

SEQ ID NO: 55973 - protein, 605 aa, Homo sapiens
MMDLELPPPGLPSQQDMDLIDILWRQDIDLGVSREVFDFSQRRKEYELEKQKKLEKERQEQLQKEQEKAFFAQLQLDEETGEFLPIQPAQHIQSETSGSANYSQVAHIPKSDALYFDDCMQLLAQTFPFVDDNEVSSATFQSLVPDIPGHIESPVFIATNQAQSPETSVAQVAPVDLDGMQQDIEQVWEELLSIPELQCLNIENDKLVETTMVPSPEAKLTEVDNYHFYSSIPSMEKEVGNCSPHFLNAFEDSFSSILSTEDPNQLTVNSLNSDATVNTDFGDEFYSAFIAEPSISNSMPSPATLSHSLSELLNGPIDVSDLSLCKAFNQNHPESTAEFNDSDSGISLNTSPSVASPEHSVESSSYGDTLLGLSDSEVEELDSAPGSVKQNGPKTPVHSSGDMVQPLSPSQGQSTHVHDAQCENTPEKELPVSPGHRKTPFTKDKHSSRLEAHLTRDELRAKALHIPFPVEKIINLPVVDFNEMMSKEQFNEAQLALIRDIRRRGKNKVAAQNCRKRKLENIVELEQDLDHLKDEKEKLLKEKGENDKSLHLLKKQLSTLYLEVFSMLRDEDGKPYSPSEYSLQQTRDGNVFLVPKSKKPDVKKN

SEQ ID NO: 55974 - protein, 589 aa, Homo sapiens
MDLIDILWRQDIDLGVSREVFDFSQRRKEYELEKQKKLEKERQEQLQKEQEKAFFAQLQLDEETGEFLPIQPAQHIQSETSGSANYSQVAHIPKSDALYFDDCMQLLAQTFPFVDDNEVSSATFQSLVPDIPGHIESPVFIATNQAQSPETSVAQVAPVDLDGMQQDIEQVWEELLSIPELQCLNIENDKLVETTMVPSPEAKLTEVDNYHFYSSIPSMEKEVGNCSPHFLNAFEDSFSSILSTEDPNQLTVNSLNSDATVNTDFGDEFYSAFIAEPSISNSMPSPATLSHSLSELLNGPIDVSDLSLCKAFNQNHPESTAEFNDSDSGISLNTSPSVASPEHSVESSSYGDTLLGLSDSEVEELDSAPGSVKQNGPKTPVHSSGDMVQPLSPSQGQSTHVHDAQCENTPEKELPVSPGHRKTPFTKDKHSSRLEAHLTRDELRAKALHIPFPVEKIINLPVVDFNEMMSKEQFNEAQLALIRDIRRRGKNKVAAQNCRKRKLENIVELEQDLDHLKDEKEKLLKEKGENDKSLHLLKKQLSTLYLEVFSMLRDEDGKPYSPSEYSLQQTRDGNVFLVPKSKKPDVKKN

SEQ ID NO: 55975 - protein, 234 aa, Homo sapiens
MDLIDILWRQDIDLGVSREVFDFSQRRKEYELEKQKKLEKERQEQLQKEQEKAFFAQLQLDEETGEFLPIQPAQHIQSETSGSANYSQVAHIPKSDALYFDDCMQLLAQTFPFVDDNEVSSATFQSLVPDIPGHIESPVFIATNQAQSPETSVAQVAPVDLDGMQQDIEQVWEELLSIPELQCLNIENDKLVETTMVPSPEAKLTEVDNYHFYSSIPSMEKEVGNCSPHFLNAF

SEQ ID NO: 55976 - protein, 280 aa, Homo sapiens
MDLIDILWRQDIDLGVSREVFDFSQRRKEYELEKQKKLEKERQEQLQKEQEKAFFAQLQLDEETGEFLPIQPAQHIQSETSGSANYSQVAHIPKSDALYFDDCMQLLAQTFPFVDDNEVSSATFQSLVPDIPGHIESPVFIATNQAQSPETSVAQVAPVDLDGMQQDIEQVWEELLSIPELQCLNIENDKLVETTMVPSPEAKLTEVDNYHFYSSIPSMEKEVGNCSPHFLNAFEDSFSSILSTEDPNQLTVNSLNSDATVNTDFGDEFYSAFIAEPSIS

SEQ ID NO: 55977 - protein, 582 aa, Homo sapiens
MDLIDILWRQDIDLGVSREVFDFSQRRKEYELEKQKKLEKERQEQLQKEQEKAFFAQLQLDEETGEFLPIQPAQHIQSETSGSANYSQVAHIPKSDALYFDDCMQLLAQTFPFVDDNESLVPDIPGHIESPVFIATNQAQSPETSVAQVAPVDLDGMQQDIEQVWEELLSIPELQCLNIENDKLVETTMVPSPEAKLTEVDNYHFYSSIPSMEKEVGNCSPHFLNAFEDSFSSILSTEDPNQLTVNSLNSDATVNTDFGDEFYSAFIAEPSISNSMPSPATLSHSLSELLNGPIDVSDLSLCKAFNQNHPESTAEFNDSDSGISLNTSPSVASPEHSVESSSYGDTLLGLSDSEVEELDSAPGSVKQNGPKTPVHSSGDMVQPLSPSQGQSTHVHDAQCENTPEKELPVSPGHRKTPFTKDKHSSRLEAHLTRDELRAKALHIPFPVEKIINLPVVDFNEMMSKEQFNEAQLALIRDIRRRGKNKVAAQNCRKRKLENIVELEQDLDHLKDEKEKLLKEKGENDKSLHLLKKQLSTLYLEVFSMLRDEDGKPYSPSEYSLQQTRDGNVFLVPKSKKPDVKKN

SEQ ID NO: 55978 - protein, 694 aa, Homo sapiens
MKHLKRWWSAGGGLLHLTLLLSLAGLRVDLDLYLLLPPPTLLQDELLFLGGPASSAYALSPFSASGGWGRAGHLHPKGRELDPAAPPEGQLLREVRALGVPFVPRTSVDAWLVHSVAAGSADEAHGLLGAAAASSTGGAGASVDGGSQAVQGGGGDPRAARSGPLDAGEEEKAPAEPTAQVPDAGGCASEENGVLREKHEAVDHSSQHEENEERVSAQKENSLQQNDDDENKIAEKPDWEAEKTTESRNERHLNGTDTSFSLEDLFQLLSSQPENSLEGISLGDIPLPGSISDGMNSSAHYHVNFSQAISQDVNLHEAILLCPNNTFRRDPTARTSQSQEPFLQLNSHTTNPEQTLPGTNLTGFLSPVDNHMRNLTSQDLLYDLDINIFDEINLMSLATEDNFDPIDVSQLFDEPDSDSGLSLDSSHNNTSVIKSNSSHSVCDEGAIGYCTDHESSSHHDLEGAVGGYYPEPSKLCHLDQSDSDFHGDLTFQHVFHNHTYHLQPTAPESTSEPFPWPGKSQKIRSRYLEDTDRNLSRDEQRAKALHIPFSVDEIVGMPVDSFNSMLSRYYLTDLQVSLIRDIRRRGKNKVAAQNCRKRKLDIILNLEDDVCNLQAKKETLKREQAQCNKAINIMKQKLHDLYHDIFSRLRDDQGRPVNPNHYALQCTHDGSILIVPKELVASGHKKETQKGKRK

SEQ ID NO: 55979 - protein, 399 aa, Homo sapiens
MNSSAHYHVNFSQAISQDVNLHEAILLCPNNTFRRDPTARTSQSQEPFLQLNSHTTNPEQTLPGTNLTGFLSPVDNHMRNLTSQDLLYDLDINIFDEINLMSLATEDNFDPIDVSQLFDEPDSDSGLSLDSSHNNTSVIKSNSSHSVCDEGAIGYCTDHESSSHHDLEGAVGGYYPEPSKLCHLDQSDSDFHGDLTFQHVFHNHTYHLQPTAPESTSNLFRPGKSQKIRSRYLEDTDRNLSRDEQRAKALHIPFSVDEIVGMPVDSFNSMLSRYYLTDLQVSLIRDIRRRGKNKVAAQNCRKRKLDIILNLEDDVCNLQAKKETLKREQAQCNKAINIMKQKLHDLYHDIFSRLRDDQGRPVNPNHYALQCTHDGSILIVPKELVASGHKKETQKGKRK

SEQ ID NO: 55980 - protein, 380 aa, Homo sapiens
MYSPLCLTQDEFHPFIEALLPHVRAFAYTWFNLQARKRKYFKKHEKRMSKEEERAVKDELLSEKPEVKQKWASRLLAKLRKDIRPEYREDFVLTVTGKKPPCCVLSNPDQKGKMRRIDCLRQADKVWRLDLVMVILFKGIPLESTDGERLVKSPQCSNPGLCVQPHHIGVSVKELDLYLAYFVHAAGMPSPTTLKKSEKSGFSSPSPSQTSSLGTAFTQHHRPVITGPRASPHATPSTLHFPTSPIIQQPGPYFSHPAIRYHPQETLKEFVQLVCPDAGQQAGQVGFLNPNGSSQGKVHNPFLPTPMLPPPPPPPMARPVPLPVPDTKPPTTSTEGGAASPTSPTYSTPSTSPANRFVSVGPRDPSFVNIPQQTQSWYLG

SEQ ID NO: 55981 - protein, 487 aa, Homo sapiens
MYSPLCLTQDEFHPFIEALLPHVRAFAYTWFNLQARKRKYFKKHEKRMSKEEERAVKDELLSEKPEVKQKWASRLLAKLRKDIRPEYREDFVLTVTGKKPPCCVLSNPDQKGKMRRIDCLRQADKVWRLDLVMVILFKGIPLESTDGERLVKSPQCSNPGLCVQPHHIGVSVKELDLYLAYFVHAAGHLGFQDSFVTSGVFSVTELVRVSQTPIAAGTGPNFSLSDLESSSYYSMSPGAMRRSLPSTSSTSSTKRLKSVEDEMDSPGEEPFYTGQGRSPGSGSQSSGWHEVEPGMPSPTTLKKSEKSGFSSPSPSQTSSLGTAFTQHHRPVITGPRASPHATPSTLHFPTSPIIQQPGPYFSHPAIRYHPQETLKEFVQLVCPDAGQQAGQVGFLNPNGSSQGKVHNPFLPTPMLPPPPPPPMARPVPLPVPDTKPPTTSTEGGAASPTSPTYSTPSTSPANRFVSVGPRDPSFVNIPQQTQSWYLG

SEQ ID NO: 55982 - protein, 466 aa, Homo sapiens
MYSPLCLTQDEFHPFIEALLPHVRAFAYTWFNLQARKRKYFKKHEKRMSKEEERAVKDELLSEKPEVKQKWASRLLAKLRKDIRPEYREDFVLTVTGKKPPCCVLSNPDQKGKMRRIDCLRQADKVWRLDLVMVILFKGIPLESTDGERLVKSPQCSNPGLCVQPHHIGVSVKELDLYLAYFVHAADSSQSESPSQPSDADIKDQPENGHLGFQDSFVTSGVFSVTELVRVSQTPIAAGTGPNFSLSDLESSSYYSMSPGAMRRSLPSTSSTSSTKRLKSVEDEMDSPGEEPFYTGQGRSPGSGSQSSGWHEVEPASPHATPSTLHFPTSPIIQQPGPYFSHPAIRYHPQETLKEFVQLVCPDAGQQAGQVGFLNPNGSSQGKVHNPFLPTPMLPPPPPPPMARPVPLPVPDTKPPTTSTEGGAASPTSPTYSTPSTSPANRFVSVGPRDPSFVNIPQQTQSWYLG

SEQ ID NO: 55983 - protein, 554 aa, Homo sapiens
MQMCRPASSSVLYVPTRWPGGCGATWQSCPSPPPRRTRIPQRPAVMYSPLCLTQDEFHPFIEALLPHVRAFAYTWFNLQARKRKYFKKHEKRMSKEEERAVKDELLSEKPEVKQKWASRLLAKLRKDIRPEYREDFVLTVTGKKPPCCVLSNPDQKGKMRRIDCLRQADKVWRLDLVMVILFKGIPLESTDGERLVKSPQCSNPGLCVQPHHIGVSVKELDLYLAYFVHAADSSQSESPSQPSDADIKDQPENGHLGFQDSFVTSGVFSVTELVRVSQTPIAAGTGPNFSLSDLESSSYYSMSPGAMRRSLPSTSSTSSTKRLKSVEDEMDSPGEEPFYTGQGRSPGSGSQSSGWHEVEPGMPSPTTLKKSEKSGFSSPSPSQTSSLGTAFTQHHRPVITGPRASPHATPSTLHFPTSPIIQQPGPYFSHPAIRYHPQETLKEFVQLVCPDAGQQAGQVGFLNPNGSSQGKVHNPFLPTPMLPPPPPPPMARPVPLPVPDTKPPTTSTEGGAASPTSPTYSTPSTSPANRFVSVGPRDPSFVNIPQQTQSWYLG

SEQ ID NO: 55984 - protein, 532 aa, Homo sapiens
MKLADSVMAGKASDGSIKWQLCYDISARTWWMDEFHPFIEALLPHVRAFAYTWFNLQARKRKYFKKHEKRMSKEEERAVKDELLSEKPEVKQKWASRLLAKLRKDIRPEYREDFVLTVTGKKPPCCVLSNPDQKGKMRRIDCLRQADKVWRLDLVMVILFKGIPLESTDGERLVKSPQCSNPGLCVQPHHIGVSVKELDLYLAYFVHAADSSQSESPSQPSDADIKDQPENGHLGFQDSFVTSGVFSVTELVRVSQTPIAAGTGPNFSLSDLESSSYYSMSPGAMRRSLPSTSSTSSTKRLKSVEDEMDSPGEEPFYTGQGRSPGSGSQSSGWHEVEPGMPSPTTLKKSEKSGFSSPSPSQTSSLGTAFTQHHRPVITGPRASPHATPSTLHFPTSPIIQQPGPYFSHPAIRYHPQETLKEFVQLVCPDAGQQAGQVGFLNPNGSSQGKVHNPFLPTPMLPPPPPPPMARPVPLPVPDTKPPTTSTEGGAASPTSPTYSTPSTSPANRFVSVGPRDPSFVNIPQQTQSWYLG

SEQ ID NO: 55985 - protein, 509 aa, Homo sapiens
MYSPLCLTQDEFHPFIEALLPHVRAFAYTWFNLQARKRKYFKKHEKRMSKEEERAVKDELLSEKPEVKQKWASRLLAKLRKDIRPEYREDFVLTVTGKKPPCCVLSNPDQKGKMRRIDCLRQADKVWRLDLVMVILFKGIPLESTDGERLVKSPQCSNPGLCVQPHHIGVSVKELDLYLAYFVHAADSSQSESPSQPSDADIKDQPENGHLGFQDSFVTSGVFSVTELVRVSQTPIAAGTGPNFSLSDLESSSYYSMSPGAMRRSLPSTSSTSSTKRLKSVEDEMDSPGEEPFYTGQGRSPGSGSQSSGWHEVEPGMPSPTTLKKSEKSGFSSPSPSQTSSLGTAFTQHHRPVITGPRASPHATPSTLHFPTSPIIQQPGPYFSHPAIRYHPQETLKEFVQLVCPDAGQQAGQVGFLNPNGSSQGKVHNPFLPTPMLPPPPPPPMARPVPLPVPDTKPPTTSTEGGAASPTSPTYSTPSTSPANRFVSVGPRDPSFVNIPQQTQSWYLG

SEQ ID NO: 55986 - protein, 501 aa, Homo sapiens
MDEFHPFIEALLPHVRAFAYTWFNLQARKRKYFKKHEKRMSKEEERAVKDELLSEKPEVKQKWASRLLAKLRKDIRPEYREDFVLTVTGKKPPCCVLSNPDQKGKMRRIDCLRQADKVWRLDLVMVILFKGIPLESTDGERLVKSPQCSNPGLCVQPHHIGVSVKELDLYLAYFVHAADSSQSESPSQPSDADIKDQPENGHLGFQDSFVTSGVFSVTELVRVSQTPIAAGTGPNFSLSDLESSSYYSMSPGAMRRSLPSTSSTSSTKRLKSVEDEMDSPGEEPFYTGQGRSPGSGSQSSGWHEVEPGMPSPTTLKKSEKSGFSSPSPSQTSSLGTAFTQHHRPVITGPRASPHATPSTLHFPTSPIIQQPGPYFSHPAIRYHPQETLKEFVQLVCPDAGQQAGQVGFLNPNGSSQGKVHNPFLPTPMLPPPPPPPMARPVPLPVPDTKPPTTSTEGGAASPTSPTYSTPSTSPANRFVSVGPRDPSFVNIPQQTQSWYLG

SEQ ID NO: 55987 - protein, 498 aa, Homo sapiens
MYSPLCLTQDEFHPFIEALLPHVRAFAYTWFNLQARKRKYFKKHEKRMSKEEERAVKDELLSEKPEVKQKWASRLLAKLRKDIRPEYREDFVLTVTGKKPPCCVLSNPDQKGKMRRIDCLRQADKVWRLDLVMVILFKGIPLESTDGERLVKSPQCSNPGLCVQPHHIGVSVKELDLYLAYFVHAADSSQSESPSQPSDADIKDQPENGHLGFQDSFVTSGVFSVTELVRVSQTPIAAGTGPNFSLSDLESSSYYSMSPGAMRRSLPSTSSTSSTKRLKSVEDEMDSPGEEPFYTGQGRSPGSGSQSSGWHEVEPGMPSPTTLKKSEKSGFSSPSPSQTSSLGTAFTQHHRPVITGPRASPHATPSTLHFPTSPIIQQPGPYFSHPAIRYHPQETLKEFVQLVCPDAGQQAGQVGFLNPNGSSQGKVHNPFLPTPMLPPPPPPPMARPVPLPVPDTKPPTTSTEGGAASPTSPILVPGIKVAASHHPPDRPPDPFSTL

SEQ ID NO: 55988 - protein, 200 aa, Homo sapiens
MMYSPICLTQDEFHPFIEALLPHVRAIAYTWFNLQARKRKYFKKHEKRMSKDEERAVKDELLSEKPEIKQKWASRLLAKLRKDIRQEYREDFVLTVTGKKHPCCVLSNPDQKGKIRRIDCLRQADKVWRLDLVMVILFKGIPLESTDGERLMKSPHCTNPALCVQPHHITVSVKELDLFLAYYVQEQGKNFFSSNKCIKI

SEQ ID NO: 55989 - protein, 168 aa, Homo sapiens
MNSGVNLQRSLSSPPSSKRPKTISIDENMEPSPTGDFYPSPSSPAAGSRTWHERDQDMSSPTTMKKPEKPLFSSASPQDSSPRLSTFPQHHHPGIPGVAHSVISTRTPPPPSPLPFPTQAILPPAPSSYFSHPTIRYPPHLNPQDTLKNYVPSYDPSSPQTSQSWYLG

SEQ ID NO: 55990 - protein, 446 aa, Homo sapiens
MERIPVSVDFWVVCCAVLKCNPGIPKRMSTLCFGFSDEFHPFIEALLPHVRAIAYTWFNLQARKRKYFKKHEKRMSKDEERAVKDELLSEKPEIKQKWASRLLAKLRKDIRQEYREDFVLTVTGKKHPCCVLSNPDQKGKIRRIDCLRQADKVWRLDLVMVILFKGIPLESTDGERLMKSPHCTNPALCVQPHHITVSVKELDLFLAYYVQEQDSGQSGSPSHNDPAKNPPGYLEDSFVKSGVFNVSELVRVSRTPITQGTGVNFPIGEIPSQPYYHDMNSGVNLQRSLSSPPSSKRPKTISIDENMEPSPTGDFYPSPSSPAAGSRTWHERDQDMSSPTTMKKPEKPLFSSASPQDSSPRLSTFPQHHHPGIPGVAHSVISTRTPPPPSPLPFPTQAILPPAPSSYFSHPTIRYPPHLNPQDTLKNYVPSYDPSSPQTSQSWYLG

SEQ ID NO: 55991 - protein, 494 aa, Homo sapiens
MMYSPICLTQDEFHPFIEALLPHVRAIAYTWFNLQARKRKYFKKHEKRMSKDEERAVKDELLSEKPEIKQKWASRLLAKLRKDIRQEYREDFVLTVTGKKHPCCVLSNPDQKGKIRRIDCLRQADKVWRLDLVMVILFKGIPLESTDGERLMKSPHCTNPALCVQPHHITVSVKELDLFLAYYVQEQDSGQSGSPSHNDPAKNPPGYLEDSFVKSGVFNVSELVRVSRTPITQGTGVNFPIGEIPSQPYYHDMNSGVNLQRSLSSPPSSKRPKTISIDENMEPSPTGDFYPSPSSPAAGSRTWHERDQDMSSPTTMKKPEKPLFSSASPQDSSPRLSTFPQHHHPGIPGVAHSVISTRTPPPPSPLPFPTQAILPPAPSSYFSHPTIRYPPHLNPQDTLKNYVPSYDPSSPQTSQPNGSGQVVGKVPGHFTPVLAPSPHPSAVRPVTLSMTDTKPITTSTEAYTASGTSQANRYVGLSPRDPSFLHQQQSWYLG

SEQ ID NO: 55992 - protein, 420 aa, Homo sapiens
MMYSPICLTQDEFHPFIEALLPHVRAIAYTWFNLQARKRKYFKKHEKRMSKDEERAVKDELLSEKPEIKQKWASRLLAKLRKDIRQEYREDFVLTVTGKKHPCCVLSNPDQKGKIRRIDCLRQADKVWRLDLVMVILFKGIPLESTDGERLMKSPHCTNPALCVQPHHITVSVKELDLFLAYYVQEQDSGQSGSPSHNDPAKNPPGYLEDSFVKSGVFNVSELVRVSRTPITQGTGVNFPIGEIPSQPYYHDMNSGVNLQRSLSSPPSSKRPKTISIDENMEPSPTGDFYPSPSSPAAGSRTWHERDQDMSSPTTMKKPEKPLFSSASPQDSSPRLSTFPQHHHPGIPGVAHSVISTRTPPPPSPLPFPTQAILPPAPSSYFSHPTIRYPPHLNPQDTLKNYVPSYDPSSPQTSQSWYLG

SEQ ID NO: 55993 - protein, 561 aa, Homo sapiens
MMYSPICLTQDEFHPFIEALLPHVRAIAYTWFNLQARKRKYFKKHEKRMSKDEERAVKDELLSEKPEIKQKWASRLLAKLRKDIRQEYREDFVLTVTGKKHPCCVLSNPDQKGKIRRIDCLRQADKVWRLDLVMVILFKGIPLESTDGERLMKSPHCTNPALCVQPHHITVSVKELDLFLAYYVQEQDSGQSGSPSHNDPAKNPPGYLEDSFVKSGVFNVSELVRVSRTPITQGTGVNFPIGEIPSQPYYHDMNSGVNLQRSLSSPPSSKRPKTISIDENMEPSPTGDFYPSPSSPAAGSRTWHERDQDMSSPTTMKKPEKPLFSSASPQDSSPRLSTFPQHHHPGIPGVAHSVISTRTPPPPSPLPFPTQAILPPAPSSYFSHPTIRYPPHLNPQDTLKNYVPSYDPSSPQTSQPNGSGQVVGKVPGHFTPVLAPSPHPSAVRPVTLSMTDTKPITTSTEAYTASGTSQANRYVGLSPRDPSFLHQQQLRICDWTMNQNGRHLYPSTSEDTLGITWQSPGTWASLVPFQVSNRTPILPANVQNYGLNIIGEPFLQAETSN

SEQ ID NO: 55994 - protein, 487 aa, Homo sapiens
MMYSPICLTQDEFHPFIEALLPHVRAIAYTWFNLQARKRKYFKKHEKRMSKDEERAVKDELLSEKPEIKQKWASRLLAKLRKDIRQEYREDFVLTVTGKKHPCCVLSNPDQKGKIRRIDCLRQADKVWRLDLVMVILFKGIPLESTDGERLMKSPHCTNPALCVQPHHITVSVKELDLFLAYYVQEQDSGQSGSPSHNDPAKNPPGYLEDSFVKSGVFNVSELVRVSRTPITQGTGVNFPIGEIPSQPYYHDMNSGVNLQRSLSSPPSSKRPKTISIDENMEPSPTGDFYPSPSSPAAGSRTWHERDQDMSSPTTMKKPEKPLFSSASPQDSSPRLSTFPQHHHPGIPGVAHSVISTRTPPPPSPLPFPTQAILPPAPSSYFSHPTIRYPPHLNPQDTLKNYVPSYDPSSPQTSQLRICDWTMNQNGRHLYPSTSEDTLGITWQSPGTWASLVPFQVSNRTPILPANVQNYGLNIIGEPFLQAETSN

SEQ ID NO: 55995 - protein, 570 aa, Homo sapiens
MMYSPICLTQDEFHPFIEALLPHVRAIAYTWFNLQARKRKYFKKHEKRMSKDEERAVKDELLSEKPEIKQKWASRLLAKLRKDIRQEYREDFVLTVTGKKHPCCVLSNPDQKGKIRRIDCLRQADKVWRLDLVMVILFKGIPLESTDGERLMKSPHCTNPALCVQPHHITVSVKELDLFLAYYVQEQDSGQSGSPSHNDPAKNPPGYLEDSFVKSGVFNVSELVRVSRTPITQGTGVNFPIGEIPSQPYYHDMNSGVNLQRSLSSPPSSKRPKTISIDENMEPSPTGDFYPSPSSPAAGSRTWHERDQDMSSPTTMKKPEKPLFSSASPQDSSPRLSTFPQHHHPGIPGVAHSVISTRTPPPPSPLPFPTQAILPPAPSSYFSHPTIRYPPHLNPQDTLKNYVPSYDPSSPQTSQPNGSGQVVGKVPGHFTPVLAPSPHPSAVRPVTLSMTDTKPITTSTEGEAASPTATTYTASGTSQANRYVGLSPRDPSFLHQQQLRICDWTMNQNGRHLYPSTSEDTLGITWQSPGTWASLVPFQVSNRTPILPANVQNYGLNIIGEPFLQAETSN

SEQ ID NO: 55996 - protein, 309 aa, Homo sapiens
MNSGVNLQRSLSSPPSSKRPKTISIDENMEPSPTGDFYPSPSSPAAGSRTWHERDQDMSSPTTMKKPEKPLFSSASPQDSSPRLSTFPQHHHPGIPGVAHSVISTRTPPPPSPLPFPTQAILPPAPSSYFSHPTIRYPPHLNPQDTLKNYVPSYDPSSPQTSQPNGSGQVVGKVPGHFTPVLAPSPHPSAVRPVTLSMTDTKPITTSTEAYTASGTSQANRYVGLSPRDPSFLHQQQLRICDWTMNQNGRHLYPSTSEDTLGITWQSPGTWASLVPFQVSNRTPILPANVQNYGLNIIGEPFLQAETSN

SEQ ID NO: 55997 - protein, 423 aa, Homo sapiens
MYSSPLCLTQDEFHPFIEALLPHVRAFAYTWFNLQARKRKYFKKHEKRMSKDEERAVKDELLGEKPEVKQKWASRLLAKLRKDIRPECREDFVLSITGKKAPGCVLSNPDQKGKMRRIDCLRQADKVWRLDLVMVILFKGIPLESTDGERLVKAAQCGHPVLCVQPHHIGVAVKELDLYLAYFVRERDAEQSGSPRTGMGSDQEDSKPITLDTTDFQESFVTSGVFSVTELIQVSRTPVVTGTGPNFSLGELQGHLAYDLNPASTGLRRTLPSTSSSGSKRHKSGSMEEDVDTSPGGDYYTSPSSPTSSSRNWTEDMEGGISSPVKKTEMDKSPFNSPSPQDSPRLSSFTQHHRPVIAVHSGIARSPHPSSALHFPTTSILPQTASTYFPHTAIRYPPHLNPQDPLKDLVSLACDPASQQPGP

SEQ ID NO: 55998 - protein, 428 aa, Homo sapiens
MYSSPLCLTQDEFHPFIEALLPHVRAFAYTWFNLQARKRKYFKKHEKRMSKDEERAVKDELLGEKPEVKQKWASRLLAKLRKDIRPECREDFVLSITGKKAPGCVLSNPDQKGKMRRIDCLRQADKVWRLDLVMVILFKGIPLESTDGERLVKAAQCGHPVLCVQPHHIGVAVKELDLYLAYFVRERDAEQSGSPRTGMGSDQEDSKPITLDTTDFQESFVTSGVFSVTELIQVSRTPVVTGTGPNFSLGELQGHLAYDLNPASTGLRRTLPSTSSSGSKRHKSGSMEEDVDTSPGGDYYTSPSSPTSSSRNWTEDMEGGISSPVKKTEMDKSPFNSPSPQDSPRLSSFTQHHRPVIAVHSGIARSPHPSSALHFPTTSILPQTASTYFPHTAIRYPPHLNPQDPLKDLVSLACDPASQQPGPSWYLG

SEQ ID NO: 55999 - protein, 508 aa, Homo sapiens
MYSSPLCLTQDEFHPFIEALLPHVRAFAYTWFNLQARKRKYFKKHEKRMSKDEERAVKDELLGEKPEVKQKWASRLLAKLRKDIRPECREDFVLSITGKKAPGCVLSNPDQKGKMRRIDCLRQADKVWRLDLVMVILFKGIPLESTDGERLVKAAQCGHPVLCVQPHHIGVAVKELDLYLAYFVRERDAEQSGSPRTGMGSDQEDSKPITLDTTDFQESFVTSGVFSVTELIQVSRTPVVTGTGPNFSLGELQGHLAYDLNPASTGLRRTLPSTSSSGSKRHKSGSMEEDVDTSPGGDYYTSPSSPTSSSRNWTEDMEGGISSPVKKTEMDKSPFNSPSPQDSPRLSSFTQHHRPVIAVHSGIARSPHPSSALHFPTTSILPQTASTYFPHTAIRYPPHLNPQDPLKDLVSLACDPASQQPGPLNGSGQLKMPSHCLSAQMLAPPPPGLPRLALPPATKPATTSEGGATSPTSPSYSPPDTSPANRSFVGLGPRDPAGIYQAQSWGDG

SEQ ID NO: 56000 - protein, 406 aa, Homo sapiens
MDEFHPFIEALLPHVRAFAYTWFNLQARKRKYFKKHEKRMSKDEERAVKDELLGEKPEVKQKWASRLLAKLRKDIRPECREDFVLSITGKKAPGCVLSNPDQKGKMRRIDCLRQADKVWRLDLVMVILFKGIPLESTDGERLVKAAQCGHPVLCVQPHHIGVAVKELDLYLAYFVRERDTTDFQESFVTSGVFSVTELIQVSRTPVVTGTGPNFSLGELQGHLAYDLNPASTGLRRTLPSTSSSGSKRHKSGSMEEDVDTSPGGDYYTSPSSPTSSSRNWTEDMEGGISSPVKKTEMDKSPFNSPSPQDSPRLSSFTQHHRPVIAVHSGIARSPHPSSALHFPTTSILPQTASTYFPHTAIRYPPHLNPQDPLKDLVSLACDPASQQPGPPTLRPTRPLQTVPLWD

SEQ ID NO: 56001 - protein, 430 aa, Homo sapiens
MDEFHPFIEALLPHVRAFAYTWFNLQARKRKYFKKHEKRMSKDEERAVKDELLGEKPEVKQKWASRLLAKLRKDIRPECREDFVLSITGKKAPGCVLSNPDQKGKMRRIDCLRQADKVWRLDLVMVILFKGIPLESTDGERLVKAAQCGHPVLCVQPHHIGVAVKELDLYLAYFVRERDAEQSGSPRTGMGSDQEDSKPITLDTTDFQESFVTSGVFSVTELIQVSRTPVVTGTGPNFSLGELQGHLAYDLNPASTGLRRTLPSTSSSGSKRHKSGSMEEDVDTSPGGDYYTSPSSPTSSSRNWTEDMEGGISSPVKKTEMDKSPFNSPSPQDSPRLSSFTQHHRPVIAVHSGIARSPHPSSALHFPTTSILPQTASTYFPHTAIRYPPHLNPQDPLKDLVSLACDPASQQPGPPTLRPTRPLQTVPLWD

SEQ ID NO: 56002 - protein, 499 aa, Homo sapiens
MDEFHPFIEALLPHVRAFAYTWFNLQARKRKYFKKHEKRMSKDEERAVKDELLGEKPEVKQKWASRLLAKLRKDIRPECREDFVLSITGKKAPGCVLSNPDQKGKMRRIDCLRQADKVWRLDLVMVILFKGIPLESTDGERLVKAAQCGHPVLCVQPHHIGVAVKELDLYLAYFVRERDAEQSGSPRTGMGSDQEDSKPITLDTTDFQESFVTSGVFSVTELIQVSRTPVVTGTGPNFSLGELQGHLAYDLNPASTGLRRTLPSTSSSGSKRHKSGSMEEDVDTSPGGDYYTSPSSPTSSSRNWTEDMEGGISSPVKKTEMDKSPFNSPSPQDSPRLSSFTQHHRPVIAVHSGIARSPHPSSALHFPTTSILPQTASTYFPHTAIRYPPHLNPQDPLKDLVSLACDPASQQPGPLNGSGQLKMPSHCLSAQMLAPPPPGLPRLALPPATKPATTSEGGATSPTSPSYSPPDTSPANRSFVGLGPRDPAGIYQAQSWYLG

SEQ ID NO: 56003 - protein, 499 aa, Homo sapiens; identical to SEQ ID NO: 56002

SEQ ID NO: 56004 - protein, 403 aa, Homo sapiens
MGATEPGGDTSSDEFHPFIEALLPHVRAFSYTWFNLQARKRKYFKKHEKRMSKDEERAVKDELLGEKPEIKQKWASRLLAKLRKDIRPEFREDFVLTITGKKPPCCVLSNPDQKGKIRRIDCLRQADKVWRLDLVMVILFKGIPLESTDGERLYKSPQCSNPGLCVQPHHIGVTIKELDLYLAYFVHTPESGQSDSSNQQGDADIKPLPNGHLSFQDCFVTSGVWNVTELVRVSQTPVATASGPNFSLADLESPSYYNINQVTLGRRSITSPPSTSTTKRPKSIDDSEMESPVDDVFYPGTGRSPAAGSSQSSGWPNDVDAGSPRATASALHFPSTSIIQQSSPYFTHPTIRYHHHHGQDSLKEFVQFVCSDGSGQATGQHSQRQAPPLPTGLSASDPGTATF

SEQ ID NO: 56005 - protein, 460 aa, Homo sapiens
MLPACRLQDEFHPFIEALLPHVRAFSYTWFNLQARKRKYFKKHEKRMSKDEERAVKDELLGEKPEIKQKWASRLLAKLRKDIRPEFREDFVLTITGKKPPCCVLSNPDQKGKIRRIDCLRQADKVWRLDLVMVILFKGIPLESTDGERLYKSPQCSNPGLCVQPHHIGVTIKELDLYLAYFVHTPESGQSDSSNQQGDADIKPLPNGHLSFQDCFVTSGVWNVTELVRVSQTPVATASGPNFSLADLESPSYYNINQVTLGRRSITSPPSTSTTKRPKSIDDSEMESPVDDVFYPGTGRSPAAGSSQSSGWPNDVDAGSPRATASALHFPSTSIIQQSSPYFTHPTIRYHHHHGQDSLKEFVQFVCSDGSGQATGQPNGSGQGKVPGSFLLPPPPPVARPVPLPMPDSKSTSTAPDGAALTPPSPSFATTGASSANRFVSIGPRDGNFLNIPQQSQSWFL

SEQ ID NO: 56006 - protein, 441 aa, Homo sapiens
MYSPYCLTQDEFHPFIEALLPHVRAFSYTWFNLQARKRKYFKKHEKRMSKDEERAVKDELLGEKPEIKQKWASRLLAKLRKDIRPEFREDFVLTITGKKPPCCVLSNPDQKGKIRRIDCLRQADKVWRLDLVMVILFKGIPLESTDGERLYKSPQCSNPGLCVQPHHIGVTIKELDLYLAYFVHTPESGQSDSSNQQGDADIKPLPNGHLSFQDCFVTSGVWNVTELVRVSQTPVATASGPNFSLADLESPSYYNINQVTLGRRSITSPPSTSTTKRPKSIDDSEMESPVDDVFYPGTGRSPAAGSSQSSGWPNDVDAGPASLKKSGKLDFCSALSSQGSSPRMAFTHHPLPVLAGVRPGSPRATASALHFPSTSIIQQSSPYFTHPTIRYHHHHGQDSLKEFVQFVCSDGSGQATGQHSQRQAPPLPTGLSASDPGTATF

SEQ ID NO: 56007 - protein, 502 aa, Homo sapiens
MYSPYCLTQDEFHPFIEALLPHVRAFSYTWFNLQARKRKYFKKHEKRMSKDEERAVKDELLGEKPEIKQKWASRLLAKLRKDIRPEFREDFVLTITGKKPPCCVLSNPDQKGKIRRIDCLRQADKVWRLDLVMVILFKGIPLESTDGERLYKSPQCSNPGLCVQPHHIGVTIKELDLYLAYFVHTPESGQSDSSNQQGDADIKPLPNGHLSFQDCFVTSGVWNVTELVRVSQTPVATASGPNFSLADLESPSYYNINQVTLGRRSITSPPSTSTTKRPKSIDDSEMESPVDDVFYPGTGRSPAAGSSQSSGWPNDVDAGPASLKKSGKLDFCSALSSQGSSPRMAFTHHPLPVLAGVRPGSPRATASALHFPSTSIIQQSSPYFTHPTIRYHHHHGQDSLKEFVQFVCSDGSGQATGQPNGSGQGKVPGSFLLPPPPPVARPVPLPMPDSKSTSTAPDGAALTPPSPSFATTGASSANRFVSIGPRDGNFLNIPQQSQSWFL

SEQ ID NO: 56008 - protein, 210 aa, Homo sapiens
MSKDEERAVKDELLGEKPEIKQKWASRLLAKLRKDIRPEFREDFVLTITGKKPPCCVLSNPDQKGKIRRIDCLRQADKVWRLDLVMVILFKGIPLESTDGERLYKSPQCSNPGLCVQPHHIGVTIKELDLYLAYFVHTPESGQSDSSNQQGDADIKPLPNGHLSFQDCFVTSGVWNVTELVYHRLLLQQHQGPTSPWRTWRVPATTTSTR

SEQ ID NO: 56009 - protein, 356 aa, Homo sapiens
MAGVACLGKAADADEWCDSGLGSLGPDAAAPGGPGLGAELGPGLSWAPLVFGYVTEDGDTALHLAVIHQHEPFLDFLLGFSAGTEYMDLQNDLGQTALHLAAILGETSTVEKLYAAGAGLCVAERRGHTALHLACRVGAHACARALLQPRPRRPREAPDTYLAQGPDRTPDTNHTPVALYPDSDLEKEEEESEEDWKLQLEAENYEGHTPLHVAVIHKDVEMVRLLRDAGADLDKPEPTCGRSPLHLAVEAQAADVLELLLRAGANPAARMYGGRTPLGSAMLRPNPILARLLRAHGAPEPEGEDEKSGPCSSSSDSDSGDEGDEYDDIVVHSSRSQTRLPPTPASKPLPDDPRPV

SEQ ID NO: 56010 - protein, 306 aa, Homo sapiens
MNGATAAWAPWVRTQRPPEDLGWARSWARGCRGLPSSSATSLRMGTRFSAGTEYMDLQNDLGQTALHLAAILGETSTVEKLYAAGAGLCVAERRGHTALHLACRVGAHACARALLQPRPRRPREAPDTYLAQGPDRTPDTNHTPVALYPDSDLEKEEEESEEDWKLQLEAENYEGHTPLHVAVIHKDVEMVRLLRDAGADLDKPEPTCGRSPLHLAVEAQAADVLELLLRAGANPAARMYGGRTPLGSAMLRPNPILARLLRAHGAPEPEGEDEKSGPCSSSSDSDSGDEGVSQEERQGSPAGGSG

SEQ ID NO: 56011 - protein, 361 aa, Homo sapiens
LQNSRQSPATGGRLRGAPEAAGAMAGVACLGKAADADEWCDSGLGSLGPDAAAPGGPGLGAELGPGLSWAPLVFGYVTEDGDTALHLAVIHQHEPFLDFLLGFSAGTEYMDLQNDLGQTALHLAAILGETSTVEKLYAAGAGLCVAERRGHTALHLACRVGAHACARALLQPRPRRPREAPDTYLAQGPDRTPDTNHTPVALYPDSDLEKEEEESEEDWKLQLEAENYEGHTPLHVAVIHKDVEMVRLLRDAGADLDKPEPTCGRSPLHLAVEAQAADVLELLLRAGANPAARMYGGRTPLGSAMLRPNPILARLLRAHGAPEPEGEDEKSGPCSSSSDSDSGDEGVSQEERQGSPAGGSG

SEQ ID NO: 56012 - protein, 596 aa, Homo sapiens
MIVDKLLDDSRGGEGLRDAAGGCGLMTSPLNLSYFYGASPPAAAPGACDASCSVLGPSAPGSPGSDSSDFSSASSVSSCGAVESRSRGGARAERQPVEPHMGVGRQQRGPFQGVRVKNSVKELLLHIRSHKQKASGQAVDDFKTQGVNIEQFRELKNTVSYSGKRKGPDSLSDGPACKRPALLHSQFLTPPQTPTPGESMEDVHLNEPKQESSADLLQNIINIKNECSPVSLNTVQTSSSVQQQNDAHLHSFSMMPSSACEAMVGHEMASDSSNTSLPFSNMGNPMNTTQLGKSLFQWQVEQEESKLANISQDQFLSKDADGDTFLHIAVAQGRRALSYVLARKMNALHMLDIKEHNGQSAFQVAVAANQHLIVQDLVNIGAQVNTTDCWGRTPLHVCAEKGHSQVLQAIQKGAVGSNQFVDLEATNYDGLTPLHCAVIAHNAVVHELQRNQQPHSPEVQELLLKNKSLVDTIKCLIQMGAAVEAKDRKSGRTALHLAAEEANLELIRLFLELPSCLSFVNAKAYNGNTALHVAASLQYRLTQLDAVRLLMRKGADPSTRNLENEQPVHLVPDGPVGEQIRRILKGKSIQQRAPPY

SEQ ID NO: 56013 - protein, 718 aa, Homo sapiens
MIVDKLLDDSRGGEGLRDAAGGCGLMTSPLNLSYFYGASPPAAAPGACDASCSVLGPSAPGSPGSDSSDFSSASSVSSCGAVESRSRGGARAERQPVEPHMGVGRQQRGPFQGVRVKNSVKELLLHIRSHKQKASGQAVDDFKTQGVNIEQFRELKNTVSYSGKRKGPDSLSDGPACKRPALLHSQFLTPPQTPTPGESMEDVHLNEPKQESSADLLQNIINIKNECSPVSLNTVQVSWLNPVVVPQSSPAEQCQDFHGGQVFSPPQKCQPFQVRGSQQMIDQASLYQYSPQNQHVEQQPHYTHKPTLEYSPFPIPPQSPAYEPNLFDGPESQFCPNQSLVSLLGDQRESENIANPMQTSSSVQQQNDAHLHSFSMMPSSACEAMVGHEMASDSSNTSLPFSNMGNPMNTTQLGKSLFQWQVEQEESKLANISQDQFLSKDADGDTFLHIAVAQGRRALSYVLARKMNALHMLDIKEHNGQSAFQVAVAANQHLIVQDLVNIGAQVNTTDCWGRTPLHVCAEKGHSQVLQAIQKGAVGSNQFVDLEATNYDGLTPLHCAVIAHNAVVHELQRNQQPHSPEVQELLLKNKSLVDTIKCLIQMGAAVEAKDRKSGRTALHLAAEEANLELIRLFLELPSCLSFVNAKAYNGNTALHVAASLQYRLTQLDAVRLLMRKGADPSTRNLENEQPVHLVPDGPVGEQIRRILKGKSIQQRAPPY

SEQ ID NO: 56014 - protein, 618 aa, Homo sapiens
MGVGRQQRGPFQGVRVKNSVKELLLHIRSHKQKASGQAVDDFKTQGVNIEQFRELKNTVSYSGKRKGPDSLSDGPACKRPALLHSQFLTPPQTPTPGESMEDVHLNEPKQESSADLLQNIINIKNECSPVSLNTVQVSWLNPVVVPQSSPAEQCQDFHGGQVFSPPQKCQPFQVRGSQQMIDQASLYQYSPQNQHVEQQPHYTHKPTLEYSPFPIPPQSPAYEPNLFDGPESQFCPNQSLVSLLGDQRESENIANPMQTSSSVQQQNDAHLHSFSMMPSSACEAMVGHEMASDSSNTSLPFSNMGNPMNTTQLGKSLFQWQVEQEESKLANISQDQFLSKDADGDTFLHIAVAQGRRALSYVLARKMNALHMLDIKEHNGQSAFQVAVAANQHLIVQDLVNIGAQVNTTDCWGRTPLHVCAEKGHSQVLQAIQKGAVGSNQFVDLEATNYDGLTPLHCAVIAHNAVVHELQRNQQPHSPEVQELLLKNKSLVDTIKCLIQMGAAVEAKDRKSGRTALHLAAEEANLELIRLFLELPSCLSFVNAKAYNGNTALHVAASLQYRLTQLDAVRLLMRKGADPSTRNLENEQPVHLVPDGPVGEQIRRILKGKSIQQRAPPY

SEQ ID NO: 56015 - protein, 110 aa, Homo sapiens
MIVDKLLDDSRGGEGLRDAAGGCGLMTSPLNLSYFYGASPPAAAPGACDASCSVLGPSAPGSPGSDSSDFSSASSVSSCGAVESRSRGGARAERQPVEPHMGVGRQQRGP

SEQ ID NO: 56016 - protein, 601 aa, Homo sapiens
MGVGRQQRGPFQGVRVKNSVKELLLHIRSHKQKASGQAVDDFKTQGVNIEQFRELKNTVSYSGKRKGPDSLSDGPACKRPALLHSQFLTPPQTPTPGESMEDVHLNEPKQESSADLLQNIINIKNECSPVSLNTVQVSWLNPVVVPQSSPAEQCQDFHGGQVFSPPQKCQPFQVRGSQQMIDQASLYQYSPQNQHVEQQPHYTHKPTLEYSPFPIPPQSPAYEPNLFDGPESQFCPNQSLVSLLGDQRESENIANPMQTSSSVQQQNDAHLHSFSMMPSSACEAMVGHEMASDSSNTSLPFSNMGNPMNTTQLGKSLFQWQVEQEESKLANISQDQFLSKDADGDTFLHIAVAQGRRALSYVLARKMNALHMLDIKEHNGQSAFQVAVAANQHLIVQDLVNIGAQVNTTDCWGRTPLHVCAEKGHSQVLQAIQKGAVGSNQFVDLEATNYDGLTPLHCAVIAHNAVVHELQRNQQPHSPEVQELLLKNKSLVDTIKCLIQMGAAVEAKDRKSGRTALHLAAEEANLELIRLFLELPSCLSFVNAKAYNGNTALHVAASLQYRLTQLDAVRLLMRKGADPSTRNLENEQPVHLVPDGPVGEQ

SEQ ID NO: 56017 - protein, 130 aa, Homo sapiens
MGVGRQQRGPFQGVRVKNSVKELLLHIRSHKQKASGQAVDDFKTQGVNIEQFRELKNTVSYSGKRKGPDSLSDGPACKRPALLHSQFLTPPQTPTPGESMEDVHLNEPKQESSADLLQNIINIKNECSPV

SEQ ID NO: 56018 - protein, 366 aa, Homo sapiens
MSNPSPQVPEEEASTSVCRPKSSMASTSRRQRRERRFRRYLSAGRLVRAQALLQRHPGLDVDAGQPPPLHRACARHDAPALCLLLRLGADPAHQDRHGDTALHAAARQGPDAYTDFFLPLLSRCPSAMGIKNKDGETPGQILGWGPPWDSAEEEEEDDASKEREWRQKLQGDASHETQEPESFSAWSDRLAREHAQKCQQQQREAEGSRRPPRAEGSSQSWRQQEEEQRLFRERARAKEEELRESRARRAQEALGDREPKPTRAGPREEHPRGAGRGSLWRFGDVPWPCPGGGDPEAMAAALVARGPPLEEQGALRRYLRVQQVRWHPDRFLQRFRSQIETWELGRVMGAVTALSQALNRHAEALK

SEQ ID NO: 56019 - protein, 358 aa, Homo sapiens
MASTSRRQRRERRFRRYLSAGRLVRAQALLQRHPGLDVDAGQPPPLHRACARHDAPALCLLLRLGADPAHQDRHGDTALHAAARQGPDAYTDFFLPLLSRCPSAMGIKNKDGETPGQILGWGPPWDSAEEEEEDDASKEREWRQKLQGELEDEWQEVMGRFEGDASHETQEPESFSAWSDRLAREHAQKCQQQQREAEGSRRPPRAEGSSQSWRQQEEEQRLFRERARAKEEELRESRARRAQEALGDREPKPTRAGPREEHPRGAGRGSLWRFGDVPWPCPGGGDPEAMAAALVARGPPLEEQGALRRYLRVQQVRWHPDRFLQRFRSQIETWELGRVMGAVTALSQALNRHAEALK

SEQ ID NO: 56020 - protein, 381 aa, Homo sapiens
MSNPSPQVPEEEASTSVCRPKSSMASTSRRQRRERRFRRYLSAGRLVRAQALLQRHPGLDVDAGQPPPLHRACARHDAPALCLLLRLGADPAHQDRHGDTALHAAARQGPDAYTDFFLPLLSRCPSAMGIKNKDGETPGQILGWGPPWDSAEEEEEDDASKEREWRQKLQGELEDEWQEVMGRFEGDASHETQEPESFSAWSDRLAREHAQKCQQQQREAEGSRRPPRAEGSSQSWRQQEEEQRLFRERARAKEEELRESRARRAQEALGDREPKPTRAGPREEHPRGAGRGSLWRFGDVPWPCPGGGDPEAMAAALVARGPPLEEQGALRRYLRVQQVRWHPDRFLQRFRSQIETWELGRVMGAVTALSQALNRHAEALK

SEQ ID NO: 56021 - protein, 366 aa, Homo sapiens [sequence omitted]

SEQ ID NO: 56022 - protein, 358 aa, Homo sapiens
MASTSRRQRRERRFRRYLSAGRLVRAQALLQRHPGLDVDAGQPPPLHRACARHDAPALCLLLRLGADPAHQDRHGDTALHAAARQGPDAYTDFFLPLLSRCPSAMGIKNKDGETPGQILGWGPPWDSAEEEEEDDASKEREWRQKLQGELEDEWQEVMGRFEGDASHETQEPESFSAWSDRLAREHAQKCQQQQREAEGSCRPPRAEGSSQSWRQQEEEQRLFRERARAKEEELRESRARRAQEALGDREPKPTRAGPREEHPRGAGRGSLWRFGDVPWPCPGGGDPEAMAAALVARGPPLEEQGALRRYLRVQQVRWHPDRFLQRFRSQIETWELGRVMGAVTALSQALNRHAEALK

SEQ ID NO: 56023 - protein, 381 aa, Homo sapiens
MSNPSPQVPEEEASTSVCRPKSSMASTSRRQRRERRFRRYLSAGRLVRAQALLQRHPGLDVDAGQPPPLHRACARHDAPALCLLLRLGADPAHQDRHGDTALHAAARQGPDAYTDFFLPLLSRCPSAMGIKNKDGETPGQILGWGPPWDSAEEEEEDDASKEREWRQKLQGELEDEWQEVMGRFEGDASHETQEPESFSAWSDRLAREHAQKCQQQQREAEGSCRPPRAEGSSQSWRQQEEEQRLFRERARAKEEELRESRARRAQEALGDREPKPTRAGPREEHPRGAGRGSLWRFGDVPWPCPGGGDPEAMAAALVARGPPLEEQGALRRYLRVQQVRWHPDRFLQRFRSQIETWELGRVMGAVTALSQALNRHAEALK

SEQ ID NO: 56024 - protein, 366 aa, Homo sapiens [sequence omitted]

SEQ ID NO: 56025 - protein, 381 aa, Homo sapiens; identical to SEQ ID NO: 56023

SEQ ID NO: 56026 - protein, 366 aa, Homo sapiens [sequence omitted]

SEQ ID NO: 56027 - protein, 366 aa, Homo sapiens [sequence omitted]

SEQ ID NO: 56028 - protein, 381 aa, Homo sapiens; identical to SEQ ID NO: 56023

SEQ ID NO: 56029 - protein, 358 aa, Homo sapiens; identical to SEQ ID NO: 56022

SEQ ID NO: 56030 - protein, 366 aa, Homo sapiens [sequence omitted]

SEQ ID NO: 56031 - protein, 358 aa, Homo sapiens; identical to SEQ ID NO: 56022

SEQ ID NO: 56032 - protein, 381 aa, Homo sapiens; identical to SEQ ID NO: 56023

SEQ ID NO: 56033 - protein, 358 aa, Homo sapiens; identical to SEQ ID NO: 56022

SEQ ID NO: 56034 - protein, 381 aa, Homo sapiens; identical to SEQ ID NO: 56023

SEQ ID NO: 56035 - protein, 366 aa, Homo sapiens [sequence omitted]

SEQ ID NO: 56036 - protein, 358 aa, Homo sapiens; identical to SEQ ID NO: 56022

SEQ ID NO: 56037 - protein, 381 aa, Homo sapiens; identical to SEQ ID NO: 56023

SEQ ID NO: 56038 - protein, 358 aa, Homo sapiens; identical to SEQ ID NO: 56022

SEQ ID NO: 56039 - protein, 232 aa, Homo sapiens
MASTSRRQRRERRFRRYLSAGRLVRAQALLQRHPGLDVDAGQPPPLHRACARHDAPALCLLLRLGADPAHQDRHGDTALHAAARQGPDAYTDFFLPLLSRCPSAMGIKNKDGETPGQILGWGPPWDSAEEEEEDDASKEREWRQKLQGELEDEWQEVMGRFEGDASHETQEPESFSAWSDRLAREHAQKCQQQQREAEGSRRPPRAEGSSQSWRQQEEEQRLFRERARAKEE

SEQ ID NO: 56040 - protein, 232 aa, Homo sapiens
MASTSRRQRRERRFRRYLSAGRLVRAQALLQRHPGLDVDAGQPPPLHRACARHDAPALCLLLRLGADPAHQDRHGDTALHAAARQGPDAYTDFFLPLLSRCPSAMGIKNKDGETPGQILGWGPPWDSAEEEEEDDASKEREWRQKLQGELEDEWQEVMGRFEGDASHETQEPESFSAWSDRLAREHAQKCQQQQREAEGSCRPPRAEGSSQSWRQQEEEQRLFRERARAKEE

SEQ ID NO: 56041 - protein, 232 aa, Homo sapiens; identical to SEQ ID NO: 56040

SEQ ID NO: 56042 - protein, 232 aa, Homo sapiens; identical to SEQ ID NO: 56040

SEQ ID NO: 56043 - protein, 232 aa, Homo sapiens; identical to SEQ ID NO: 56040

SEQ ID NO: 56044 - protein, 232 aa, Homo sapiens; identical to SEQ ID NO: 56040

SEQ ID NO: 56045 - protein, 232 aa, Homo sapiens; identical to SEQ ID NO: 56040

SEQ ID NO: 56046 - protein, 1299 aa, Homo sapiens [sequence omitted]

SEQ ID NO: 56047 - protein, 1299 aa, Homo sapiens [sequence omitted]

SEQ ID NO: 56048 - protein, 1299 aa, Homo sapiens [sequence omitted]

SEQ ID NO: 56049 - protein, 1324 aa, Homo sapiens
MHVFVQSTCGEETMDSLDHMLTDPLELGPCGDGHGTRIMEDCLLGGTRVSLPEDLLEDPEIFFDVVSLSTWQEVLSDSQREHLQQFLPQFPEDSAEQQNELILALFSGENFRFGNPLHIAQKLFRDGHFNPEVVKYRQLCFKSQYKRYLNSQQQYFHRLLKQILASRSDLLEMARRSGPALPFRQKRPSPSRTPEEREWRTQQRYLKVLREVKEECGDTALSSDEEATLDLQEQFSFEDLSSWLPSSPARSPSPAVPLRVVPTLSTTDMKTADKVELGDSDLKIMLKKHHEKRKHQPDHPDLLTGDLTLNDIMTRVNAGRKGSLAALYDLAVLKKKVKEKEEKKKKKIKTIKSEAEDLAEPLSSTEGVAPLSQAPSPLAIPAIKEEPLEDLKPCLGINEISSSFFSLLLEILLLESQASLPMLEERVLDWQSSPASSLNSWFSAAPNWAELVLPALQYLAGESRAVPSSFSPFVEFKEKTQQWKLLGQSQDNEKELAALFQLWLETKDQAFCKQENEDSSDATTPVPRVRTDYVVRPSTGEEKRVFQEQERYRYSQPHKAFTFRMHGFESVVGPVKGVFDKETSLNKAREHSLLRSDRPAYVTILSLVRDAAARLPNGEGTRAEICELLKDSQFLAPDVTSTQVNTVVSGALDRLHYEKDPCVKYDIGRKLWIYLHRDRSEEEFERIHQAQAAAAKARKALQQKPKPPSKVKSSSKESSIKVLSSGPSEQSQMSLSDSSMPPTPVTPVTPTTPALPAIPISPPPVSAVNKSGPSTVSEPAKSSSGVLLVSSPTMPHLGTMLSPASSQTAPSSQAAARVVSHSGSAGLSQVRVVAQPSLPAVPQQSGGPAQTLPQMPAGPQIRVPATATQTKVVPQTVMATVPVKAQTTAATVQRPGPGQTGLTVTSLPATASPVSKPATSSPGTSAPSASTAAVIQNVTGQNIIKQVAITGQLGVKPQTGNSIPLTATNFRIQGKDVLRLPPSSITTDAKGQTVLRITPDMMATLAKSQVTTVKLTQDLFGTGGNTTGKGISATLHVTSNPVHAADSPAKASSASAPSSTPTGTTVVKVTPDLKPTEASSSAFRLMPALGVSVADQKGKSTVASSEAKPAATIRIVQGLGVMPPKAGQTITVATHAKQGASVASGSGTVHTSAVSLPSMNAAVSKTVAVASGAASTPISISTGAPTVRQVPVSTTVVSTSQAGKLPTRITVPLSVISQPMKGKSVVTAPIIKGNLGANLSGLGRNIILTTMPAGTKLIAGNKPVSFLTAQQLQQLQQQGQATQVRIQTVPASHLQQGTASGSSKAVSTVVVTTAPSPKQAPEQQ

SEQ ID NO: 56050 - protein, 462 aa, Homo sapiens
MQLRKMQTVKKEQASLDASSNVDKMMVLNSALTEVSEDSTTGEELLLSEGSVGKNKSSACRRKREFIPDEKKDAMYWEKRRKNNEAAKRSREKRRLNDLVLENKLIALGEENATLKAELLSLKLKFGLISSTAYAQEIQKLSNSTAVYFQDYQTSKSNVSSFVDEHEPSMVSSSCISVIKHSPQSSLSDVSEVSSVEHTQESSVQGSCRSPENKFQIIKQEPMELESYTREPRDDRGSYTASIYQNYMGNSFSGYSHSPPLLQVNRSSSNSPRTSETDDGVVGKSSDGEDEQQVPKGPIHSPVELKHVHATVVKVPEVNSSALPHKLRIKAKAMQIKVEAFDNEFEATQKLSSPIDMTSKRHFELEKHSAPSMVHSSLTPFSVQVTNIQDWSLKSEHWHQKELSGKTQNSFKTGVVEMKDSGYKVSDPENLYLKQGIANLSAEVVSLKRLIATQPISASDSG

SEQ ID NO: 56051 - protein, 462 aa, Homo sapiens; identical to SEQ ID NO: 56050

SEQ ID NO: 56052 - protein, 495 aa, Homo sapiens
MAEPTSDFETPIGWHASPELTPTLGPLSDTAPPRDSWMFWAMLPPPPPPLTSSLPAAGSKPSSESQPPMEAQSLPGAPPPFDAQILPGAQPPFDAQSPLDSQPQPSGQPWNFHASTSWYWRQSSDRFPRHQKSFNPAVKNSYYPRKYDAKFTDFSLPPSRKQKKKKRKEPVFHFFCDTCDRGFKNQEKYDKHMSEHTKCPELDCSFTAHEKIVQFHWRNMHAPGMKKIKLDTPEEIARWREERRKNYPTLANIERKKKLKLEKEKRGAVLTTTQYGKMKGMSRHSQMAKIRSPGKNHKWKNDNSRQRAVTGSGSHLCDLKLEGPPEANADPLGVLINSDSESDKEEKPQHSVIPKEVTPALCSLMSSYGSLSGSESEPEETPIKTEADVLAENQVLDSSAPKSPSQDVKATVRNFSEAKSENRKKSFEKTNPKRKKDYHNYQTLFEPRTHHPYLLEMLLAPDIRHERNVILQCVRYIIKKDFFGLDTNSAKSKDV

SEQ ID NO: 56053 - protein, 695 aa, Homo sapiens
MEEKPGQPQPQHHHSHHHPHHHPQQQQQQPHHHHHYYFYNHSHNHHHHHHHQQPHQYLQHGAEGSPKAQPKPLKHEQKHTLQQHQETPKKKTGYGELNGNAGEREISLKNLSSDEATNPISRVLNGNQQVVDTSLKQTVKANTFGKAGIKTKNFIQKNSMDKKNGKSYENKSGENQSVDKSDTIPIPNGVVTNNSGYITNGYMGKGADNDGSGSESGYTTPKKRKARRNSAKGCENLNIVQDKIMQQETSVPTLKQGLETFKPDYSEQKGNRVDGSKPIWKYETGPGGTSRGKPAVGDMLRKSSDSKPGVSSKKFDDRPKGKHASAVASKEDSWTLFKPPPVFPVDNSSAKIVPKISYASKVKENLNKTIQNSSVSPTSSSSSSSSTGETQTQSSSRLSQVPMSALKSVTSANFSNGPVLAGTDGNVYPPGGQPLLTTAANTLTPISSGTDSVLQDMSLTSAAVEQIKTSLFIYPSNMQTMLLSTAQVDLPSQTDQQNLGDIFQNQWGLSFINEPSAGPETVTGKSSEHKVMEVTFQGEYPATLVSQGAEIIPSGTEHPVFPKAYELEKRTSPQVLGSILKSGTTSESGALSLEPSHIGDLQKADTSSQGALVFLSKDYEIESQNPLASPTNTLLGSAKEQRYQRGLERNDSWGSFDLRAAIVYHTKEMESIWNLQKQDPKRIITYNEAMDSPDQ

SEQ ID NO: 56054 - protein, 979 aa, Homo sapiens
MTLHATRGAALLSWVNSLHVADPVEAVLQLQDCSIFIKIIDRIHGTEEGQQILKQPVSERLDFVCSFLQKNRKHPSSPECLVSAQKVLEGSELELAKMTMLLLYHSTMSSKSPRDWEQFEYKIQAELAVILKFVLDHEDGLNLNEDLENFLQKAPVPSTCSSTFPEELSPPSHQAKREIRFLELQKVASSSSGNNFLSGSPASPMGDILQTPQFQMRRLKKQLADERSNRDELELELAENRKLLTEKDAQIAMMQQRIDRLALLNEKQAASPLEPKELEELRDKNESLTMRLHETLKQCQDLKTEKSQMDRKINQLSEENGDLSFKLREFASHLQQLQDALNELTEEHSKATQEWLEKQAQLEKELSAALQDKKCLEEKNEILQGKLSQLEEHLSQLQDNPPQEKGEVLGDVLQVEELSKKLADSDQASKVQQQKLKAVQAQGGESQQEAQRLQAQLNELQAQLSQKEQAAEHYKLQMEKAKTHYDAKKQQNQELQEQLRSLEQLQKENKELRAEAERLGHELQQAGLKTKEAEQTCRHLTAQVRSLEAQVAHADQQLRDLGKFQVATDALKSREPQAKPQLDLSIDSLDLSCEEGTPLSITSKLPRTQPDGTSVPGEPASPISQRLPPKVESLESLYFTPIPARSQAPLESSLDSLGDVFLDSGRKTRSARRRTTQIINITMTKKLDVEEPDSANSSFYSTRSAPASQASLRATSSTQSLARLGSPDYGNSALLSLPGYRPTTRSSARRSQAGVSSGAPPGRNSFYMGTCQDEPEQLDDWNRIAELQQRNRVCPPHLKTCYPLESRPSLSLGTITDEEMKTGDPQETLRRASMQPIQIAEGTGITTRQQRKRVSLEPHQGPGTPESKKATSCFPRPMTPRDRHEGRKQSTTEAQKKAAPASTKQADRRQSMAFSILNTPKKLGNSLLRRGASKKALSKASPNTRSGTRRSPRIATTTASAATAAAIGATPRAKGKAKH

SEQ ID NO: 56055 - protein, 2101 aa, Homo sapiens
MTLHATRGAALLSWVNSLHVADPVEAVLQLQDCSIFIKIIDRIHGTEEGQQILKQPVSERLDFVCSFLQKNRKHPSSPECLVSAQKVLEGSELELAKMTMLLLYHSTMSSKSPRDWEQFEYKIQAELAVILKFVLDHEDGLNLNEDLENFLQKAPVPSTCSSTFPEELSPPSHQAKREIRFLELQKVASSSSGNNFLSGSPASPMGDILQTPQFQMRRLKKQLADERSNRDELELELAENRKLLTEKDAQIAMMQQRIDRLALLNEKQAASPLEPKELEELRDKNESLTMRLHETLKQCQDLKTEKSQMDRKINQLSEENGDLSFKLREFASHLQQLQDALNELTEEHSKATQEWLEKQAQLEKELSAALQDKKCLEEKNEILQGKLSQLEEHLSQLQDNPPQEKGEVLGDVLQLETLKQEAATLAANNTQLQARVEMLETERGQQEAKLLAERGHFEEEKQQLSSLITDLQSSISNLSQAKEELEQASQAHGARLTAQVASLTSELTTLNATIQQQDQELAGLKQQAKEKQAQLAQTLQQQEQASQGLRHQVEQLSSSLKQKEQQLKEVAEKQEATRQDHAQQLATAAEEREASLRERDAALKQLEALEKEKAAKLEILQQQLQVANEARDSAQTSVTQAQREKAELSRKVEELQACVETARQEQHEAQAQVAELELQLRSEQQKATEKERVAQEKDQLQEQLQALKESLKVTKGSLEEEKRRAADALEEQQRCISELKAETRSLVEQHKRERKELEEERAGRKGLEARLQQLGEAHQAETEVLRRELAEAMAAQHTAESECEQLVKEVAAWRERYEDSQQEEAQYGAMFQEQLMTLKEECEKARQELQEAKEKVAGIESHSELQISRQQNELAELHANLARALQQVQEKEVRAQKLADDLSTLQEKMAATSKEVARLETLVRKAGEQQETASRELVKEPARAGDRQPEWLEEQQGRQFCSTQAALQAMEREAEQMGNELERLRAALMESQGQQQEERGQQEREVARLTQERGRAQADLALEKAARAELEMRLQNALNEQRVEFATLQEALAHALTEKEGKDQELAKLRGLEAAQIKELEELRQTVKQLKEQLAKKEKEHASGSGAQSEAAGRTEPTGPKLEALRAEVSKLEQQCQKQQEQADSLERSLEAERASRAERDSALETLQGQLEEKAQELGHSQSALASAQRELAAFRTKVQDHSKAEDEWKAQVARGRQEAERKNSLISSLEEEVSILNRQVLEKEGESKELKRLVMAESEKSQKLEERLRLLQAETASNSARAAERSSALREEVQSLREEAEKQRVASENLRQELTSQAERAEELGQELKAWQEKFFQKEQALSTLQLEHTSTQALVSELLPAKHLCQQLQAEQAAAEKRHREELEQSKQAAGGLRAELLRAQRELGELIPLRQKVAEQERTAQQLRAEKASYAEQLSMLKKAHGLLAEENRGLGERANLGRQFLEVELDQAREKYVQELAAVRADAETRLAEVQREAQSTARELEVMTAKYEGAKVKVLEERQRFQEERQKLTAQVEELSKKLADSDQASKVQQQKLKAVQAQGGESQQEAQRLQAQLNELQAQLSQKEQAAEHYKLQMEKAKTHYDAKKQQNQELQEQLRSLEQLQKENKELRAEAERLGHELQQAGLKTKEAEQTCRHLTAQVRSLEAQVAHADQQLRDLGKFQVATDALKSREPQAKPQLDLSIDSLDLSCEEGTPLSITSKLPRTQPDGTSVPGEPASPISQRLPPKVESLESLYFTPIPARSQAPLESSLDSLGDVFLDSGRKTRSARRRTTQIINITMTKKLDVEEPDSANSSFYSTRSAPASQASLRATSSTQSLARLGSPDYGNSALLSLPGYRPTTRSSARRSQAGVSSGAPPGRNSFYMGTCQDEPEQLDDWNRIAELQQRNRVCPPHLKTCYPLESRPSLSLGTITDEEMKTGDPQETLRRASMQPIQIAEGTGITTRQQRKRVSLEPHQGPGTPESKKATSCFPRPMTPRDRHEGRKQSTTEAQKKAAPASTKQADRRQSMAFSILNTPKKLGNSLLRRGASKKALSKASPNTRSGTRRSPRIATTTASAATAAAIGATPRAKGKAKH

SEQ ID NO: 56056 - protein, 1664 aa, Homo sapiens
MLETERGQQEAKLLAERGHFEEEKQQLSSLITDLQSSISNLSQAKEELEQASQAHGARLTAQVASLTSELTTLNATIQQQDQELAGLKQQAKEKQAQLAQTLQQQEQASQGLRHQVEQLSSSLKQKEQQLKEVAEKQEATRQDHAQQLATAAEEREASLRERDAALKQLEALEKEKAAKLEILQQQLQVANEARDSAQTSVTQAQREKAELSRKVEELQACVETARQEQHEAQAQVAELELQLRSEQQKATEKERVAQEKDQLQEQLQALKESLKVTKGSLEEEKRRAADALEEQQRCISELKAETRSLVEQHKRERKELEEERAGRKGLEARLQQLGEAHQAETEVLRRELAEAMAAQHTAESECEQLVKEVAAWRERYEDSQQEEAQYGAMFQEQLMTLKEECEKARQELQEAKEKVAGIESHSELQISRQQNELAELHANLARALQQVQEKEVRAQKLADDLSTLQEKMAATSKEVARLETLVRKAGEQQETASRELVKEPARAGDRQPEWLEEQQGRQFCSTQAALQAMEREAEQMGNELERLRAALMESQGQQQEERGQQEREVARLTQERGRAQADLALEKAARAELEMRLQNALNEQRVEFATLQEALAHALTEKEGKDQELAKLRGLEAAQIKELEELRQTVKQLKEQLAKKEKEHASGSGAQSEAAGRTEPTGPKLEALRAEVSKLEQQCQKQQEQADSLERSLEAERASRAERDSALETLQGQLEEKAQELGHSQSALASAQRELAAFRTKVQDHSKAEDEWKAQVARGRQEAERKNSLISSLEEEVSILNRQVLEKEGESKELKRLVMAESEKSQKLEERLRLLQAETASNSARAAERSSALREEVQSLREEAEKQRVASENLRQELTSQAERAEELGQELKAWQEKFFQKEQALSTLQLEHTSTQALVSELLPAKHLCQQLQAEQAAAEKRHREELEQSKQAAGGLRAELLRAQRELGELIPLRQKVAEQERTAQQLRAEKASYAEQLSMLKKAHGLLAEENRGLGERANLGRQFLEVELDQAREKYVQELAAVRADAETRLAEVQREAQSTARELEVMTAKYEGAKVKVLEERQRFQEERQKLTAQVEELSKKLADSDQASKVQQQKLKAVQAQGGESQQEAQRLQAQLNELQAQLSQKEQAAEHYKLQMEKAKTHYDAKKQQNQELQEQLRSLEQLQKENKELRAEAERLGHELQQAGLKTKEAEQTCRHLTAQVRSLEAQVAHADQQLRDLGKFQVATDALKSREPQAKPQLDLSIDSLDLSCEEGTPLSITSKLPRTQPDGTSVPGEPASPISQRLPPKVESLESLYFTPIPARSQAPLESSLDSLGDVFLDSGRKTRSARRRTTQIINITMTKKLDVEEPDSANSSFYSTRSAPASQASLRATSSTQSLARLGSPDYGNSALLSLPGYRPTTRSSARRSQAGVSSGAPPGRNSFYMGTCQDEPEQLDDWNRIAELQQRNRVCPPHLKTCYPLESRPSLSLGTITDEEMKTGDPQETLRRASMQPIQIAEGTGITTRQQRKRVSLEPHQGPGTPESKKATSCFPRPMTPRDRHEGRKQSTTEAQKKAAPASTKQADRRQSMAFSILNTPKKLGNSLLRRGASKKALSKASPNTRSGTRRSPRIATTTASAATAAAIGATPRAKGKAKH

SEQ ID NO: 56057 - protein, 75 aa, Homo sapiens
MTLHATRGAALLSWVNSLHVADPVEAVLQLQDCSIFIKIIDRIHGTEEGQQILKQPVSERLDFVCSFLQKNRKHP

SEQ ID NO: 56058 - protein, 91 aa, Homo sapiens
MTLHATRGAALLSWVNSLHVADPVEAVLQLQDCSIFIKIIDRIHGTEEGQQILKQPVSERLDFVCSFLQKNRKHPSSPECLVSAQKVLEGS

SEQ ID NO: 56059 - protein, 2115 aa, Homo sapiens
MTLHATRGAALLSWVNSLHVADPVEAVLQLQDCSIFIKIIDRIHGTEEGQQILKQPVSERLDFVCSFLQKNRKHPSSPECLVSAQKVLEGSELELAKMTMLLLYHSTMSSKSPRDWEQFEYKIQAELAVILKFVLDHEDGLNLNEDLENFLQKAPVPSTCSSTFPEELSPPSHQAKREIRFLELQKVASSSSGNNFLSGSPASPMGDILQTPQFQMRRLKKQLADERSNRDELELELAENRKLLTEKDAQIAMMQQRIDRLALLNEKQAASPLEPKELEELRDKNESLTMRLHETLKQCQDLKTEKSQMDRKINQLSEENGDLSFKLREFASHLQQLQDALNELTEEHSKATQEWLEKQAQLEKELSAALQDKKCLEEKNEILQGKLSQLEEHLSQLQDNPPQEKGEVLGDVLQLETLKQEAATLAANNTQLQARVEMLETERGQQEAKLLAERGHFEEEKQQLSSLITDLQSSISNLSQAKEELEQASQAHGARLTAQVASLTSELTTLNATIQQQDQELAGLKQQAKEKQAQLAQTLQQQEQASQGLRHQVEQLSSSLKQKEQQLKEVAEKQEATRQDHAQQLATAAEEREASLRERDAALKQLEALEKEKAAKLEILQQQLQVANEARDSAQTSVTQAQREKAELSRKVEELQACVETARQEQHEAQAQVAELELQLRSEQQKATEKERVAQEKDQLQEQLQALKESLKVTKGSLEEEKRRAADALEEQQRCISELKAETRSLVEQHKRERKELEEERAGRKGLEARLQQLGEAHQAETEVLRRELAEAMAAQHTAESECEQLVKEVAAWRERYEDSQQEEAQYGAMFQEQLMTLKEECEKARQELQEAKEKVAGIESHSELQISRQQNELAELHANLARALQQVQEKEVRAQKLADDLSTLQEKMAATSKEVARLETLVRKAGEQQETASRELVKEPARAGDRQPEWLEEQQGRQFCSTQAALQAMEREAEQMGNELERLRAALMESQGQQQEERGQQEREVARLTQERGRAQADLALEKAARAELEMRLQNALNEQRVEFATLQEALAHALTEKEGKDQELAKLRGLEAAQIKELEELRQTVKQLKEQLAKKEKEHASGSGAQSEAAGRTEPTGPKLEALRAEVSKLEQQCQKQQEQADSLERSLEAERASRAERDSALETLQGQLEEKAQELGHSQSALASAQRELAAFRTKVQDHSKAEDEWKAQVARGRQEAERKNSLISSLEEEVSILNRQVLEKEGESKELKRLVMAESEKSQKLEERLRLLQAETASNSARAAERSSALREEVQSLREEAEKQRVASENLRQELTSQAERAEELGQELKAWQEKFFQKEQALSTLQLEHTSTQALVSELLPAKHLCQQLQAEQAAAEKRHREELEQSKQAAGGLRAELLRAQRELGELIPLRQKVAEQERTAQQLRAEKASYAEQLSMLKKAHGLLAEENRGLGERANLGRQFLEVELDQAREKYVQELAAVRADAETRLAEVQREAQSTARELEVMTAKYEGAKVKVLEERQRFQEERQKLTAQVEQLEVFQREQTKQVEELSKKLADSDQASKVQQQKLKAVQAQGGESQQEAQRLQAQLNELQAQLSQKEQAAEHYKLQMEKAKTHYDAKKQQNQELQEQLRSLEQLQKENKELRAEAERLGHELQQAGLKTKEAEQTCRHLTAQVRSLEAQVAHADQQLRDLGKFQVATDALKSREPQAKPQLDLSIDSLDLSCEEGTPLSITSKLPRTQPDGTSVPGEPASPISQRLPPKVESLESLYFTPIPARSQAPLESSLDSLGDVFLDSGRKTRSARRRTTQIINITMTKKLDVEEPDSANSSFYSTRSAPASQASLRATSSTQSLARLGSPDYGNSALLSLPGYRPTTRSSARRSQAGVSSGAPPGRNSFYMGTCQDEPEQLDDWNRIAELQQRNRVCPPHLKTCYPLESRPSLSLGTITDEEMKTGDPQETLRRASMQPIQIAEGTGITTRQQRKRVSLEPHQGPGTPESKKATSCFPRPMTPRDRHEGRKQSTTEAQKKAAPASTKQADRRQSMAFSILNTPKKLGNSLLRRGASKKALSKASPNTRSGTRRSPRIATTTASAATAAAIGATPRAKGKAKH

SEQ ID NO: 56060 - protein, 109 aa, Homo sapiens
MTLHATRGAALLSWVNSLHVADPVEAVLQLQDCSIFIKIIDRIHGTEEGQQILKQPVSERLDFVCSFLQKNRKHPSSPECLVSAQKVLEGSELELAKMTMLLLYHSTMS

SEQ ID NO: 56061 - protein, 61 aa, Homo sapiens
MTLHATRGAALLSWVNSLHVADPVEAVLQLQDCSIFIKIIDRIHGTEEGQQILKQPVSERL

SEQ ID NO: 56062 - protein, 59 aa, Homo sapiens
MTLHATRGAALLSWVNSLHVADPVEAVLQLQDCSIFIKIIDRIHGTEEGQQILKQPVSE

SEQ ID NO: 56063 - protein, 146 aa, Homo sapiens
MTLHATRGAALLSWVNSLHVADPVEAVLQLQDCSIFIKIIDRIHGTEEGQQILKQPVSERLDFVCSFLQKNRKHPSSPECLVSAQKVLEGSELELAKMTMLLLYHSTMSSKSPRDWEQFEYKIQAELAVILKFVLDHEDGLNLNED

SEQ ID NO: 56064 - protein, 1088 aa, Homo sapiens
MRLQNALNEQRVEFATLQEALAHALTEKEGKDQELAKLRGLEAAQIKELEELRQTVKQLKEQLAKKEKEHASGSGAQSEAAGRTEPTGPKLEALRAEVSKLEQQCQKQQEQADSLERSLEAERASRAERDSALETLQGQLEEKAQELGHSQSALASAQRELAAFRTKVQDHSKAEDEWKAQVARGRQEAERKNSLISSLEEEVSILNRQVLEKEGESKELKRLVMAESEKSQKLEERLRLLQAETASNSARAAERSSALREEVQSLREEAEKQRVASENLRQELTSQAERAEELGQELKAWQEKFFQKEQALSTLQLEHTSTQALVSELLPAKHLCQQLQAEQAAAEKRHREELEQSKQAAGGLRAELLRAQRELGELIPLRQKVAEQERTAQQLRAEKASYAEQLSMLKKAHGLLAEENRGLGERANLGRQFLEVELDQAREKYVQELAAVRADAETRLAEVQREAQSTARELEVMTAKYEGAKVKVLEERQRFQEERQKLTAQVEELSKKLADSDQASKVQQQKLKAVQAQGGESQQEAQRLQAQLNELQAQLSQKEQAAEHYKLQMEKAKTHYDAKKQQNQELQEQLRSLEQLQKENKELRAEAERLGHELQQAGLKTKEAEQTCRHLTAQVRSLEAQVAHADQQLRDLGKFQVATDALKSREPQAKPQLDLSIDSLDLSCEEGTPLSITRHKALMTIIPDLSPNNPLSKLPRTQPDGTSVPGEPASPISQRLPPKVESLESLYFTPIPARSQAPLESSLDSLGDVFLDSGRKTRSARRRTTQIINITMTKKLDVEEPDSANSSFYSTRSAPASQASLRATSSTQSLARLGSPDYGNSALLSLPGYRPTTRSSARRSQAGVSSGAPPGRNSFYMGTCQDEPEQLDDWNRIAELQQRNRVCPPHLKTCYPLESRPSLSLGTITDEEMKTGDPQETLRRASMQPIQIAEGTGITTRQQRKRVSLEPHQGPGTPESKKATSCFPRPMTPRDRHEGRKQSTTEAQKKAAPASTKQADRRQSMAFSILNTPKKLGNSLLRRGASKKALSKASPNTRSGTRRSPRIATTTASAATAAAIGATPRAKGKAKH

SEQ ID NO: 56065 - protein, 691 aa, Homo sapiens
MTLHATRGAALLSWVNSLHVADPVEAVLQLQDCSIFIKIIDRIHGTEEGQQILKQPVSERLDFVCSFLQKNRKHPSSPECLVSAQKVLEGSELELAKMTMLLLYHSTMSSKSPRDWEQFEYKIQAELAVILKFVLDHEDGLNLNEDLENFLQKAPVPSTCSSTFPEELSPPSHQAKREIRFLELQKVASSSSGNNFLSGSPASPMGDILQTPQFQMRRLKKQLADERSNRDELELELAENRKLLTEKDAQIAMMQQRIDRLALLNEKQAASPLEPKELEELRDKNESLTMRLHETLKQCQDLKTEKSQMDRKINQLSEENGDLSFKLREFASHLQQLQDALNELTEEHSKATQEWLEKQAQLEKELSAALQDKKCLEEKNEILQGKLSQLEEHLSQLQDNPPQEKGEVLGDVLQLETLKQEAATLAANNTQLQARVEMLETERGQQEAKLLAERGHFEEEKQQLSSLITDLQSSISNLSQAKEELEQASQAHGARLTAQVASLTSELTTLNATIQQQDQELAGLKQQAKEKQAQLAQTLQQQEQASQGLRHQVEQLSSSLKQKEQQLKEVAEKQEATRQDHAQQLATAAEEREASLRERDAALKQLEALEKEKAAKLEILQQQLQVANEARDSAQTSVTQAQREKAELSRKVEELQACVETARQEQHEAQAQVAELELQLRSEQQKATEKE

SEQ ID NO: 56066 - protein, 159 aa, Homo sapiens
MTLHATRGAALLSWVNSLHVADPVEAVLQLQDCSIFIKIIDRIHGTEEGQQILKQPVSERLDFVCSFLQKNRKHPSSPECLVSAQKVLEGSELELAKMTMLLLYHSTMSSKSPRDWEQFEYKIQAELAVILKFVLDHEDGLNLNEDLENFLQKAPVPST

SEQ ID NO: 56067 - protein, 72 aa, Homo sapiens
MTLHATRGAALLSWVNSLHVADPVEAVLQLQDCSIFIKIIDRIHGTEEGQQILKQPVSERLDFVCSFLQKNR

SEQ ID NO: 56068 - protein, 83 aa, Homo sapiens
MTLHATRGAALLSWVNSLHVADPVEAVLQLQDCSIFIKIIDRIHGTEEGQQILKQPVSERLDFVCSFLQKNRKHPSSPECLVS

SEQ ID NO: 56069 - protein, 852 aa, Homo sapiens
MTLHATRGAALLSWVNSLHVADPVEAVLQLQDCSIFIKIIDRIHGTEEGQQILKQPVSERLDFVCSFLQKNRKHPSSPECLVSAQKVLEGSELELAKMTMLLLYHSTMSSKSPRDWEQFEYKIQAELAVILKFVLDHEDGLNLNEDLENFLQKAPVPSTCSSTFPEELSPPSHQAKREIRFLELQKVASSSSGNNFLSGSPASPMGDILQTPQFQMRRLKKQLADERSNRDELELELAENRKLLTEKDAQIAMMQQRIDRLALLNEKQAASPLEPKELEELRDKNESLTMRLHETLKQCQDLKTEKSQMDRKINQLSEENGDLSFKLREFASHLQQLQDALNELTEEHSKATQEWLEKQAQLEKELSAALQDKKCLEEKNEILQGKLSQLEEHLSQLQDNPPQEKGEVLGDVLQLETLKQEAATLAANNTQLQARVEMLETERGQQEAKLLAERGHFEEEKQQLSSLITDLQSSISNLSQAKEELEQASQAHGARLTAQVASLTSELTTLNATIQQQDQELAGLKQQAKEKQAQLAQTLQQQEQASQGLRHQVEQLSSSLKQKEQQLKEVAEKQEATRQDHAQQLATAAEEREASLRERDAALKQLEALEKEKAAKLEILQQQLQVANEARDSAQTSVTQAQREKAELSRKVEELQACVETARQEQHEAQAQVAELELQLRSEQQKATEKERVAQEKDQLQEQLQALKESLKVTKGSLEEEKRRAADALEEQQRCISELKAETRSLVEQHKRERKELEEERAGRKGLEARLQQLGEAHQAETEVLRRELAEAMAAQHTAESECEQLVKEVAAWRERYEDSQQEEAQYGAMFQEQLMTLKEECEKARQELQEA

SEQ ID NO: 56070 - protein, 174 aa, Homo sapiens
MTLHATRGAALLSWVNSLHVADPVEAVLQLQDCSIFIKIIDRIHGTEEGQQILKQPVSERLDFVCSFLQKNRKHPSSPECLVSAQKVLEGSELELAKMTMLLLYHSTMSSKSPRDWEQFEYKIQAELAVILKFVLDHEDGLNLNEDLENFLQKAPVPSTCSSTFPEELSPPSHQ

SEQ ID NO: 56071 - protein, 201 aa, Homo sapiens
MTLHATRGAALLSWVNSLHVADPVEAVLQLQDCSIFIKIIDRIHGTEEGQQILKQPVSERLDFVCSFLQKNRKHPSSPECLVSAQKVLEGSELELAKMTMLLLYHSTMSSKSPRDWEQFEYKIQAELAVILKFVLDHEDGLNLNEDLENFLQKAPVPSTCSSTFPEELSPPSHQAKREIRFLELQKVASSSSGNNFLSGSP

SEQ ID NO: 56072 - protein, 159 aa, Homo sapiens; identical to SEQ ID NO: 56066

SEQ ID NO: 56073 - protein, 220 aa, Homo sapiens
MTLHATRGAALLSWVNSLHVADPVEAVLQLQDCSIFIKIIDRIHGTEEGQQILKQPVSERLDFVCSFLQKNRKHPSSPECLVSAQKVLEGSELELAKMTMLLLYHSTMSSKSPRDWEQFEYKIQAELAVILKFVLDHEDGLNLNEDLENFLQKAPVPSTCSSTFPEELSPPSHQAKREIRFLELQKVASSSSGNNFLSGSPASPMGDILQTPQFQMRRLK

SEQ ID NO: 56074 - protein, 56 aa, Homo sapiens
MTLHATRGAALLSWVNSLHVADPVEAVLQLQDCSIFIKIIDRIHGTEEGQQILKQP

SEQ ID NO: 56075 - protein, 350 aa, Homo sapiens
MFCCLGYEWLSGGCKTWHSAWVINTLADHRHRGTDFGGSPWLLIITVFLRSYKFAISLCTSYLCVSFLKTIFPSQNGHDGSTDVQQRARRSNRRRQEGIKIVLEDIFTLWRQVETKVRAKIRKMKVTTKVNRHDKINGKRKTAKEHLRKLSMKEREHGEKERQVSEAEENGKLDMKEIHTYMEMFQRAQALRRRAEDYYRCKITPSARKPLCNRVRMAAVEHRHSSGLPYWPYLTAETLKNRMGHQPPPPTQQHSIIDNSLSLKTPSECLLTPLPPSALPSADDNLKTPAECLLYPLPPSADDNLKTPPECLLTPLPPSAPPSVDDNLKTPPECVCSLPFHPQRMIISRN

SEQ ID NO: 56076 - protein, 350 aa, Homo sapiens; identical to SEQ ID NO: 56075

SEQ ID NO: 56077 - protein, 476 aa, Homo sapiens
MASPFSGALQLTDLDDFIGPSQECIKPVKVEKRAGSGVAKIRIEDDGSYFQINQDGGTRRLEKAKVSLNDCLACSGCITSAETVLITQQSHEELKKVLDANKMAAPSQQRLVVVSVSPQSRASLAARFQLNPTDTARKLTSFFKKIGVHFVFDTAFSRHFSLLESQREFVRRFRGQADCRQALPLLASACPGWICYAEKTHGSFILPHISTARSPQQVMGSLVKDFFAQQQHLTPDKIYHVTVMPCYDKKLEASRPDFFNQEHQTRDVDCVLTTGEVFRLLEEEGVSLPDLEPAPLDSLCSGASAEEPTSHRGGGSGGYLEHVFRHAARELFGIHVAEVTYKPLRNKDFQEVTLEKEGQVLLHFAMAYGFRNIQNLVQRLKRGRCPYHYVEVMACPSGCLNGGGQLQAPDRPSRELLQHVERLYGMVRAEAPEDAPGVQELYTHWLQGTDSECAGRLLHTQYHAVEKASTGLGIRW

SEQ ID NO: 56078 - protein, 188 aa, Homo sapiens
MASPFSGALQLTDLDDFIGPSQECIKPVKVEKRAGSGVAKIRIEDDGSYFQINQDGGTRRLEKAKVSLNDCLACSGCITSAETVLITQQSHEELKKVLDANKGCTSSSTPPSQGTSASWRASESLCGDSEDRPTADRRCPCWPLPAQAGSAMPRRLTAASSSPTSAPPGPRSRSWAPWSRTSSPSSST

SEQ ID NO: 56079 - protein, 374 aa, Homo sapiens
MAAPSQQRLVVVSVSPQSRASLAARFQLNPTDTARKLTSFFKKIGVHFVFDTAFSRHFSLLESQREFVRRFRGQADCRQALPLLASACPGWICYAEKTHGSFILPHISTARSPQQVMGSLVKDFFAQQQHLTPDKIYHVTVMPCYDKKLEASRPDFFNQEHQTRDVDCVLTTGEVFRLLEEEGVSLPDLEPAPLDSLCSGASAEEPTSHRGGGSGGYLEHVFRHAARELFGIHVAEVTYKPLRNKDFQEVTLEKEGQVLLHFAMAYGFRNIQNLVQRLKRGRCPYHYVEVMACPSGCLNGGGQLQAPDRPSRELLQHVERLYGMVRAEAPEDAPGVQELYTHWLQGTDSECAGRLLHTQYHAVEKASTGLGIRW

SEQ ID NO: 56080 - protein, 1427 aa, Homo sapiens
MLLPSDVARLVLGYLQQENLISTCQTFILESSDLKEYAEHCTDEGFIPACLLSLFGKNLTTILNEYVAMKTKETSNNVPAIMSSLWKKLDHTLSQIRSMQSSPRFAGSQRARTRTGIAEIKRQRKLASQTAPASAELLTLPYLSGQFTTPPSTGTQVTRPSGQISDPSRSYFVVVNHSQSQDTVTTGEALNVIPGAQEKKAHASLMSPGRRKSESQRKSTTLSGPHSTIRNFQDPNAFAVEKQMVIENAREKILSNKSLQEKLAENINKFLTSDNNIAQVPKQTDNNPTEPETSIDEFLGLPSEIHMSEEAIQDILEQTESDPAFQALFDLFDYGKTKNNKNISQSISSQPMESNPSIVLADETNLAVKGSFETEESDGQSGQPAFCTSYQNDDPLNALKNSNNHDVLRQEDQENFSQISTSIQKKAFKTAVPTEQKCDIDITFESVPNLNDFNQRGNSNAECNPHCAELYTNQMSTETEMAIGIEKNSLSSNVPSESQLQPDQPDIPITSFVSLGCEANNENLILSGKSSQLLSQDTSLTGKPSKKSQFCENSNDTVKLKINFHGSKSSDSSEVHKSKIEINVLEPVMSQLSNCQDNSCLQSEILPVSVESSHLNVSGQVEIHLGDSLSSTKQPSNDSASVELNHTENEAQASKSENSQEPSSSVKEENTIFLSLGGNANCEKVALTPPEGTPVENSHSLPPESVCSSVGDSHPESQNTDDKPSSNNSAEIDASNIVSLKVIISDDPFVSSDTELTSAVSSINGENLPTIILSSPTKSPTKNAELVKCLSSEETVGAVVYAEVGDSASMEQSLLTFKSEDSAVNNTQNEDGIAFSANVTPCVSKDGGYIQLMPATSTAFGNSNNILIATCVTDPTALGTSVSQSNVVVLPGNSAPMTAQPLPPQLQTPPRSNSVFAVNQAVSPNFSQGSAIIIASPVQPVLQGMVGMIPVSVVGQNGNNFSTPPRQVLHMPLTAPVCNRSIPQFPVPPKSQKAQGLRNKPCIGKQVNNLVDSSGHSVGCHAQKTEVSDKSIATDLGKKSEETTVPFPEESIVPAAKPCHRRVLCFDSTTAPVANTQGPNHKMVSQNKERNAVSFPNLDSPNVSSTLKPPSNNAIKREKEKPPLPKILSKSESAISRHTTIRETQSEKKVSPTEIVLESFHKATANKENELCSDVERQKNPENSKLSIGQQNGGLRSEKSIASLQEMTKKQGTSSNNKNVLSVGTAVKDLKQEQTKSASSLITTEMLQDIQRHSSVSRLADSSDLPVPRTPGSGAGEKHKEEPIDIIKAPSSRRFSEDSSTSKVMVPPVTPDLPACSPASETGSENSVNMAAHTLMILSRAAISRTTSATPLKDNTQQFRASSRSTTKKRKIEELDERERNSRPSSKNLTNSSIPMKKKKIKKKKLPSSFPAGMDVDKFLLSLHYDE

SEQ ID NO: 56081 - protein, 2427 aa, Homo sapiens
MPLKTRTALSDDPDSSTSTLGNMLELPGTSSSSTSQELPFCQPKKKSTPLKYEVGDLIWAKFKRRPWWPCRICSDPLINTHSKMKVSNRRPYRQYYVEAFGDPSERAWVAGKAIVMFEGRHQFEELPVLRRRGKQKEKGYRHKVPQKILSKWEASVGLAEQYDVPKGSKNRKCIPGSIKLDSEEDMPFEDCTNDPESEHDLLLNGCLKSLAFDSEHSADEKEKPCAKSRARKSSDNPKRTSVKKGHIQFEAHKDERRGKIPENLGLNFISGDISDTQASNELSRIANSLTGSNTAPGSFLFSSCGKNTAKKEFETSNGDSLLGLPEGALISKCSREKNKPQRSLVCGSKVKLCYIGAGDEEKRSDSISICTTSDDGSSDLDPIEHSSESDNSVLEIPDAFDRTENMLSMQKNEKIKYSRFAATNTRVKAKQKPLISNSHTDHLMGCTKSAEPGTETSQVNLSDLKASTLVHKPQSDFTNDALSPKFNLSSSISSENSLIKGGAANQALLHSKSKQPKFRSIKCKHKENPVMAEPPVINEECSLKCCSSDTKGSPLASISKSGKVDGLKLLNNMHEKTRDSSDIETAVVKHVLSELKELSYRSLGEDVSDSGTSKPSKPLLFSSASSQNHIPIEPDYKFSTLLMMLKDMHDSKTKEQRLMTAQNLVSYRSPGRGDCSTNSPVGVSKVLVSGGSTHNSEKKGDGTQNSANPSPSGGDSALSGELSASLPGLLSDKRDLPASGKSRSDCVTRRNCGRSKPSSKLRDAFSAQMVKNTVNRKALKTERKRKLNQLPSVTLDAVLQGDRERGGSLRGGAEDPSKEDPLQIMGHLTSEDGDHFSDVHFDSKVKQSDPGKISEKGLSFENGKGPELDSVMNSENDELNGVNQVVPKKRWQRLNQRRTKPRKRMNRFKEKENSECAFRVLLPSDPVQEGRDEFPEHRTPSASILEEPLTEQNHADCLDSAGPRLNVCDKSSASIGDMEKEPGIPSLTPQAELPEPAVRSEKKRLRKPSKWLLEYTEEYDQIFAPKKKQKKVQEQVHKVSSRCEEESLLARGRSSAQNKQVDENSLISTKEEPPVLEREAPFLEGPLAQSELGGGHAELPQLTLSVPVAPEVSPRPALESEELLVKTPGNYESKRQRKPTKKLLESNDLDPGFMPKKGDLGLSKKCYEAGHLENGITESCATSYSKDFGGGTTKIFDKPRKRKRQRHAAAKMQCKKVKNDDSSKEIPGSEGELMPHRTATSPKETVEEGVEHDPGMPASKKMQGERGGGAALKENVCQNCEKLGELLLCEAQCCGAFHLECLGLTEMPRGKFICNECRTGIHTCFVCKQSGEDVKRCLLPLCGKFYHEECVQKYPPTVMQNKGFRCSLHICITCHAANPANVSASKGRLMRCVRCPVAYHANDFCLAAGSKILASNSIICPNHFTPRRGCRNHEHVNVSWCFVCSEGGSLLCCDSCPAAFHRECLNIDIPEGNWYCNDCKAGKKPHYREIVWVKVGRYRWWPAEICHPRAVPSNIDKMRHDVGEFPVLFFGSNDYLWTHQARVFPYMEGDVSSKDKMGKGVDGTYKKALQEAAARFEELKAQKELRQLQEDRKNDKKPPPYKHIKVNRPIGRVQIFTADLSEIPRCNCKATDENPCGIDSECINRMLLYECHPTVCPAGGRCQNQCFSKRQYPEVEIFRTLQRGWGLRTKTDIKKGEFVNEYVGELIDEEECRARIRYAQEHDITNFYMLTLDKDRIIDAGPKGNYARFMNHCCQPNCETQKWSVNGDTRVGLFALSDIKAGTELTFNYNLECLGNGKTVCKCGAPNCSGFLGVRPKNQPIATEEKSKKFKKKQQGKRRTQGEITKEREDECFSCGDAGQLVSCKKPGCPKVYHADCLNLTKRPAGKWECPWHQCDICGKEAASFCEMCPSSFCKQHREGMLFISKLDGRLSCTEHDPCGPNPLEPGEIREYVPPPVPLPPGPSTHLAEQSTGMAAQAPKMSDKPPADTNQMLSLSKKALAGTCQRPLLPERPLERTDSRPQPLDKVRDLAGSGTKSQSLVSSQRPLDRPPAVAGPRPQLSDKPSPVTSPSSSPSVRSQPLERPLGTADPRLDKSIGAASPRPQSLEKTSVPTGLRLPPPDRLLITSSPKPQTSDRPTDKPHASLSQRLPPPEKVLSAVVQTLVAKEKALRPVDQNTQSKNRAALVMDLIDLTPRQKERAASPHQVTPQADEKMPVLESSSWPASKGLGHMPRAVEKGCVSDPLQTSGKAAAPSEDPWQAVKSLTQARLLSQPPAKAFLYEPTTQASGRASAGAEQTPGPLSQSPGLVKQAKQMVGGQQLPALAAKSGQSFRSLGKAPASLPTEEKKLVTTEQSPWALGKASSRAGLWPIVAGQTLAQSCWSAGSTQTLAQTCWSLGRGQDPKPEQNTLPALNQAPSSHKCAESEQK

SEQ ID NO: 56082 - protein, 2427 aa, Homo sapiens; identical to SEQ ID NO: 56081

SEQ ID NO: 56083 - protein, 563 aa, Homo sapiens
MPLKTRTALSDDPDSSTSTLGNMLELPGTSSSSTSQELPFCQPKKKSTPLKYEVGDLIWAKFKRRPWWPCRICSDPLINTHSKMKVSNRRPYRQYYVEAFGDPSERAWVAGKAIVMFEGRHQFEELPVLRRRGKQKEKGYRHKVPQKILSKWEASVGLAEQYDVPKGSKNRKCIPGSIKLDSEEDMPFEDCTNDPESEHDLLLNGCLKSLAFDSEHSADEKEKPCAKSRARKSSDNPKRTSVKKGHIQFEAHKDERRGKIPENLGLNFISGDISDTQASNELSRIANSLTGSNTAPGSFLFSSCGKNTAKKEFETSNGDSLLGLPEGALISKCSREKNKPQRSLVCGSKVKLCYIGAGDEEKRSDSISICTTSDDGSSDLDPIEHSSESDNSVLEIPDAFDRTENMLSMQKNEKIKYSRFAATNTRVKAKQKPLISNSHTDHLMGCTKSAEPGTETSQVNLSDLKASTLVHKPQSDFTNDALSPKFNLSSSISSENSLIKGGAANQALLHSKSKQPKFRSIKCKHKENPVMAEPPVINEECSLKCCSSDTKGSPLASISKTPP

SEQ ID NO: 56084 - protein, 2593 aa, Homo sapiens
MDQTCELPRRNCLLPFSNPVNLDAPEDKDSPFGNGQSNFSEPLNGCTMQLSTVSGTSQNAYGQDSPSCYIPLRRLQDLASMINVEYLNGSADGSESFQDPEKSDSRAQTPIVCTSLSPGGPTALAMKQEPSCNNSPELQVKVTKTIKNGFLHFENFTCVDDADVDSEMDPEQPVTEDESIEEIFEETQTNATCNYETKSENGVKVAMGSEQDSTPESRHGAVKSPFLPLAPQTETQKNKQRNEVDGSNEKAALLPAPFSLGDTNITIEEQLNSINLSFQDDPDSSTSTLGNMLELPGTSSSSTSQELPFVPQKILSKWEASVGLAEQYDVPKGSKNRKCIPGSIKLDSEEDMPFEDCTNDPESEHDLLLNGCLKSLAFDSEHSADEKEKPCAKSRARKSSDNPKRTSVKKGHIQFEAHKDERRGKIPENLGLNFISGDISDTQASNELSRIANSLTGSNTAPGSFLFSSCGKNTAKKEFETSNGDSLLGLPEGALISKCSREKNKPQRSLVCGSKVKLCYIGAGDEEKRSDSISICTTSDDGSSDLDPIEHSSESDNSVLEIPDAFDRTENMLSMQKNEKIKYSRFAATNTRVKAKQKPLISNSHTDHLMGCTKSAEPGTETSQVNLSDLKASTLVHKPQSDFTNDALSPKFNLSSSISSENSLIKGGAANQALLHSKSKQPKFRSIKCKHKENPVMAEPPVINEECSLKCCSSDTKGSPLASISKSGKVDGLKLLNNMHEKTRDSSDIETAVVKHVLSELKELSYRSLGEDVSDSGTSKPSKPLLFSSASSQNHIPIEPDYKFSTLLMMLKDMHDSKTKEQRLMTAQNLVSYRSPGRGDCSTNSPVGVSKVLVSGGSTHNSEKKGDGTQNSANPSPSGGDSALSGELSASLPGLLSDKRDLPASGKSRSDCVTRRNCGRSKPSSKLRDAFSAQMVKNTVNRKALKTERKRKLNQLPSVTLDAVLQGDRERGGSLRGGAEDPSKEDPLQIMGHLTSEDGDHFSDVHFDSKVKQSDPGKISEKGLSFENGKGPELDSVMNSENDELNGVNQVVPKKRWQRLNQRRTKPRKRMNRFKEKENSECAFRVLLPSDPVQEGRDEFPEHRTPSASILEEPLTEQNHADCLDSAGPRLNVCDKSSASIGDMEKEPGIPSLTPQAELPEPAVRSEKKRLRKPSKWLLEYTEEYDQIFAPKKKQKKVQEQVHKVSSRCEEESLLARGRSSAQNKQVDENSLISTKEEPPVLEREAPFLEGPLAQSELGGGHAELPQLTLSVPVAPEVSPRPALESEELLVKTPGNYESKRQRKPTKKLLESNDLDPGFMPKKGDLGLSKKCYEAGHLENGITESCATSYSKDFGGGTTKIFDKPRKRKRQRHAAAKMQCKKVKNDDSSKEIPGSEGELMPHRTATSPKETVEEGVEHDPGMPASKKMQGERGGGAALKENVCQNCEKLGELLLCEAQCCGAFHLECLGLTEMPRGKFICNECRTGIHTCFVCKQSGEDVKRCLLPLCGKFYHEECVQKYPPTVMQNKGFRCSLHICITCHAANPANVSASKGRLMRCVRCPVAYHANDFCLAAGSKILASNSIICPNHFTPRRGCRNHEHVNVSWCFVCSEGGSLLCCDSCPAAFHRECLNIDIPEGNWYCNDCKAGKKPHYREIVWVKVGRYRWWPAEICHPRAVPSNIDKMRHDVGEFPVLFFGSNDYLWTHQARVFPYMEGDVSSKDKMGKGVDGTYKKALQEAAARFEELKAQKELRQLQEDRKNDKKPPPYKHIKVNRPIGRVQIFTADLSEIPRCNCKATDENPCGIDSECINRMLLYECHPTVCPAGGRCQNQCFSKRQYPEVEIFRTLQRGWGLRTKTDIKKGEFVNEYVGELIDEEECRARIRYAQEHDITNFYMLTLDKDRIIDAGPKGNYARFMNHCCQPNCETQKWSVNGDTRVGLFALSDIKAGTELTFNYNLECLGNGKTVCKCGAPNCSGFLGVRPKNQPIATEEKSKKFKKKQQGKRRTQGEITKEREDECFSCGDAGQLVSCKKPGCPKVYHADCLNLTKRPAGKWECPWHQCDICGKEAASFCEMCPSSFCKQHREGMLFISKLDGRLSCTEHDPCGPNPLEPGEIREYVPPPVPLPPGPSTHLAEQSTGMAAQAPKMSDKPPADTNQMLSLSKKALAGTCQRPLLPERPLERTDSRPQPLDKVRDLAGSGTKSQSLVSSQRPLDRPPAVAGPRPQLSDKPSPVTSPSSSPSVRSQPLERPLGTADPRLDKSIGAASPRPQSLEKTSVPTGLRLPPPDRLLITSSPKPQTSDRPTDKPHASLSQRLPPPEKVLSAVVQTLVAKEKALRPVDQNTQSKNRAALVMDLIDLTPRQKERAASPHQVTPQADEKMPVLESSSWPASKGLGHMPRAVEKGCVSDPLQTSGKAAAPSEDPWQAVKSLTQARLLSQPPAKAFLYEPTTQASGRASAGAEQTPGPLSQSPGLVKQAKQMVGGQQLPALAAKSGQSFRSLGKAPASLPTEEKKLVTTEQSPWALGKASSRAGLWPIVAGQTLAQSCWSAGSTQTLAQTCWSLGRGQDPKPEQNTLPALNQAPSSHKCAESEQK

SEQ ID NO: 56085 - protein, 2696 aa, Homo sapiens
MDQTCELPRRNCLLPFSNPVNLDAPEDKDSPFGNGQSNFSEPLNGCTMQLSTVSGTSQNAYGQDSPSCYIPLRRLQDLASMINVEYLNGSADGSESFQDPEKSDSRAQTPIVCTSLSPGGPTALAMKQEPSCNNSPELQVKVTKTIKNGFLHFENFTCVDDADVDSEMDPEQPVTEDESIEEIFEETQTNATCNYETKSENGVKVAMGSEQDSTPESRHGAVKSPFLPLAPQTETQKNKQRNEVDGSNEKAALLPAPFSLGDTNITIEEQLNSINLSFQDDPDSSTSTLGNMLELPGTSSSSTSQELPFCQPKKKSTPLKYEVGDLIWAKFKRRPWWPCRICSDPLINTHSKMKVSNRRPYRQYYVEAFGDPSERAWVAGKAIVMFEGRHQFEELPVLRRRGKQKEKGYRHKVPQKILSKWEASVGLAEQYDVPKGSKNRKCIPGSIKLDSEEDMPFEDCTNDPESEHDLLLNGCLKSLAFDSEHSADEKEKPCAKSRARKSSDNPKRTSVKKGHIQFEAHKDERRGKIPENLGLNFISGDISDTQASNELSRIANSLTGSNTAPGSFLFSSCGKNTAKKEFETSNGDSLLGLPEGALISKCSREKNKPQRSLVCGSKVKLCYIGAGDEEKRSDSISICTTSDDGSSDLDPIEHSSESDNSVLEIPDAFDRTENMLSMQKNEKIKYSRFAATNTRVKAKQKPLISNSHTDHLMGCTKSAEPGTETSQVNLSDLKASTLVHKPQSDFTNDALSPKFNLSSSISSENSLIKGGAANQALLHSKSKQPKFRSIKCKHKENPVMAEPPVINEECSLKCCSSDTKGSPLASISKSGKVDGLKLLNNMHEKTRDSSDIETAVVKHVLSELKELSYRSLGEDVSDSGTSKPSKPLLFSSASSQNHIPIEPDYKFSTLLMMLKDMHDSKTKEQRLMTAQNLVSYRSPGRGDCSTNSPVGVSKVLVSGGSTHNSEKKGDGTQNSANPSPSGGDSALSGELSASLPGLLSDKRDLPASGKSRSDCVTRRNCGRSKPSSKLRDAFSAQMVKNTVNRKALKTERKRKLNQLPSVTLDAVLQGDRERGGSLRGGAEDPSKEDPLQIMGHLTSEDGDHFSDVHFDSKVKQSDPGKISEKGLSFENGKGPELDSVMNSENDELNGVNQVVPKKRWQRLNQRRTKPRKRMNRFKEKENSECAFRVLLPSDPVQEGRDEFPEHRTPSASILEEPLTEQNHADCLDSAGPRLNVCDKSSASIGDMEKEPGIPSLTPQAELPEPAVRSEKKRLRKPSKWLLEYTEEYDQIFAPKKKQKKVQEQVHKVSSRCEEESLLARGRSSAQNKQVDENSLISTKEEPPVLEREAPFLEGPLAQSELGGGHAELPQLTLSVPVAPEVSPRPALESEELLVKTPGNYESKRQRKPTKKLLESNDLDPGFMPKKGDLGLSKKCYEAGHLENGITESCATSYSKDFGGGTTKIFDKPRKRKRQRHAAAKMQCKKVKNDDSSKEIPGSEGELMPHRTATSPKETVEEGVEHDPGMPASKKMQGERGGGAALKENVCQNCEKLGELLLCEAQCCGAFHLECLGLTEMPRGKFICNECRTGIHTCFVCKQSGEDVKRCLLPLCGKFYHEECVQKYPPTVMQNKGFRCSLHICITCHAANPANVSASKGRLMRCVRCPVAYHANDFCLAAGSKILASNSIICPNHFTPRRGCRNHEHVNVSWCFVCSEGGSLLCCDSCPAAFHRECLNIDIPEGNWYCNDCKAGKKPHYREIVWVKVGRYRWWPAEICHPRAVPSNIDKMRHDVGEFPVLFFGSNDYLWTHQARVFPYMEGDVSSKDKMGKGVDGTYKKALQEAAARFEELKAQKELRQLQEDRKNDKKPPPYKHIKVNRPIGRVQIFTADLSEIPRCNCKATDENPCGIDSECINRMLLYECHPTVCPAGGRCQNQCFSKRQYPEVEIFRTLQRGWGLRTKTDIKKGEFVNEYVGELIDEEECRARIRYAQEHDITNFYMLTLDKDRIIDAGPKGNYARFMNHCCQPNCETQKWSVNGDTRVGLFALSDIKAGTELTFNYNLECLGNGKTVCKCGAPNCSGFLGVRPKNQPIATEEKSKKFKKKQQGKRRTQGEITKEREDECFSCGDAGQLVSCKKPGCPKVYHADCLNLTKRPAGKWECPWHQCDICGKEAASFCEMCPSSFCKQHREGMLFISKLDGRLSCTEHDPCGPNPLEPGEIREYVPPPVPLPPGPSTHLAEQSTGMAAQAPKMSDKPPADTNQMLSLSKKALAGTCQRPLLPERPLERTDSRPQPLDKVRDLAGSGTKSQSLVSSQRPLDRPPAVAGPRPQLSDKPSPVTSPSSSPSVRSQPLERPLGTADPRLDKSIGAASPRPQSLEKTSVPTGLRLPPPDRLLITSSPKPQTSDRPTDKPHASLSQRLPPPEKVLSAVVQTLVAKEKALRPVDQNTQSKNRAALVMDLIDLTPRQKERAASPHQVTPQADEKMPVLESSSWPASKGLGHMPRAVEKGCVSDPLQTSGKAAAPSEDPWQAVKSLTQARLLSQPPAKAFLYEPTTQASGRASAGAEQTPGPLSQSPGLVKQAKQMVGGQQLPALAAKSGQSFRSLGKAPASLPTEEKKLVTTEQSPWALGKASSRAGLWPIVAGQTLAQSCWSAGSTQTLAQTCWSLGRGQDPKPEQNTLPALNQAPSSHKCAESEQK

SEQ ID NO: 56086 - protein, 155 aa, Homo sapiens
MPLKTRTALSDDPDSSTSTLGNMLELPGTSSSSTSQELPFCQPKKKSTPLKYEVGDLIWAKFKRRPWWPCRICSDPLINTHSKMKVSNRRPYRQYYVEAFGDPSERAWVAGKAIVMFEGRHQFEELPVLRRRGKQKEKGYRHKVPQKILSKWEAS

SEQ ID NO: 56087 - protein, 124 aa, Homo sapiens
MPLKTRTALSDDPDSSTSTLGNMLELPGTSSSSTSQELPFCQPKKKSTPLKYEVGDLIWAKFKRRPWWPCRICSDPLINTHSKMKVSNRRPYRQYYVEAFGDPSERAWVAGKAIVMFEGRHQFE

SEQ ID NO: 56088 - protein, 1399 aa, Homo sapiens
MSGLGDSSSDPANPDSHKRKGSPCDTLASSTEKRRREQENKYLEELAELLSANISDIDSLSVKPDKCKILKKTVDQIQLMKRMEQEKSTTDDDVQKSDISSSSQGVIEKESLGPLLLEALDGFFFVVNCEGRIVFVSENVTSYLGYNQEELMNTSVYSILHVGDHAEFVKNLLPKSLVNGVPWPQEATRRNSHTFNCRMLIHPPDEPGTENQEACQRYEVMQCFTVSQPKSIQEDGEDFQSCLICIARRLPRPPAITGVESFMTKQDTTGKIISIDTSSLRAAGRTGWEDLVRKCIYAFFQPQGREPSYARQLFQEVMTRGTASSPSYRFILNDGTMLSAHTKCKLCYPQSPDMQPFIMGIHIIDREHSGLSPQDDTNSGMSIPRVNPSVNPSISPAHGVARSSTLPPSNSNMVSTRINRQQSSDLHSSSHSNSSNSQGSFGCSPGSQIVANVALNQGQASSQSSNPSLNLNNSPMEGTGISLAQFMSPRRQVTSGLATRPRMPNNSFPPNISTLSSPVGMTSSACNNNNRSYSNIPVTSLQGMNEGPNNSVGFSASSPVLRQMSSQNSPSRLNIQPAKAESKDNKEIASILNEMIQSDNSSSDGKPLDSGLLHNNDRLSDGDSKYSQTSHKLVQLLTTTAEQQLRHADIDTSCKDVLSCTGTSNSASANSSGGSCPSSHSSLTERHKILHRLLQEGSPSDITTLSVEPDKKDSASTSVSVTGQVQGNSSIKLELDASKKKESKDHQLLRYLLDKDEKDLRSTPNLSLDDVKVKVEKKEQMDPCNTNPTPMTKPTPEEIKLEAQSQFTADLDQFDQLLPTLEKAAQLPGLCETDRMDGAVTSVTIKSEILPASLQSATARPTSRLNRLPELELEAIDNQFGQPGTGDQIPWTNNTVTAINQSKSEDQCISSQLDELLCPPTTVEGRNDEKALLEQLVSFLSGKDETELAELDRALGIDKLVQGGGLDVLSERFPPQQATPPLIMEERPNLYSQPYSSPSPTANLPSPFQGMVRQKPSLGTMPVQVTPPRGAFSPGMGMQPRQTLNRPPAAPNQLRLQLQQRLQGQQQLIHQNRQAILNQFAATAPVGINMRSGMQQQITPQPPLNAQMLAQRQRELYSQQHRQRQLIQQQRAMLMRQQSFGNNLPPSSGLPVQMGNPRLPQGAPQQFPYPPNYGTNPGTPPASTSPFSQLAANPEASLANRNSMVSRGMTGNIGGQFGTGINPQMQQNVFQYPGAGMVPQGEANFAPSLSPGSSMVPMPIPPPQSSLLQQTPPASGYQSPDMKAWQQGAIGNNNVFSQAVQNQPTPAQPGVYNNMSITVSMAGGNTNVQNMNPMMAQMQMSSLQMPGMNTVCPEQINDPALRHTGLYCNQLSSTDLLKTEADGTQDKKTEEFFSVVTTD

SEQ ID NO: 56089 - protein, 1441 aa, Homo sapiens
MSGLGDSSSDPANPDSHKRKGSPCDTLASSTEKRRREQENKYLEELAELLSANISDIDSLSVKPDKCKILKKTVDQIQLMKRMEQEKSTTDDDVQKSDISSSSQGVIEKESLGPLLLEALDGFFFVVNCEGRIVFVSENVTSYLGYNQEELMNTSVYSILHVGDHAEFVKNLLPKSLVNGVPWPQEATRRNSHTFNCRMLIHPPDEPGTENQEACQRYEVMQCFTVSQPKSIQEDGEDFQSCLICIARRLPRPPAITGVESFMTKQDTTGKIISIDTSSLRAAGRTGWEDLVRKCIYAFFQPQGREPSYARQLFQEVMTRGTASSPSYRFILNDGTMLSAHTKCKLCYPQSPDMQPFIMGIHIIDREHSGLSPQDDTNSGMSIPRVNPSVNPSISPAHGVARSSTLPPSNSNMVSTRINRQQSSDLHSSSHSNSSNSQGSFGCSPGSQIVANVALNQGQASSQSSNPSLNLNNSPMEGTGISLAQFMSPRRQVTSGLATRPRMPNNSFPPNISTLSSPVGMTSSACNNNNRSYSNIPVTSLQGMNEGPNNSVGFSASSPVLRQMSSQNSPSRLNIQPAKAESKDNKEIASILNEMIQSDNSSSDGKPLDSGLLHNNDRLSDGDSKYSQTSHKLVQLLTTTAEQQLRHADIDTSCKDVLSCTGTSNSASANSSGGSCPSSHSSLTERHKILHRLLQEGSPSDITTLSVEPDKKDSASTSVSVTGQVQGNSSIKLELDASKKKESKDHQLLRYLLDKDEKDLRSTPNLSLDDVKVKVEKKEQMDPCNTNPTPMTKPTPEEIKLEAQSQFTADLDQFDQLLPTLEKAAQLPGLCETDRMDGAVTSVTIKSEILPASLQSATARPTSRLNRLPELELEAIDNQFGQPGTGDQIPWTNNTVTAINQSKSEDQCISSQLDELLCPPTTVEGRNDEKALLEQLVSFLSGKDETELAELDRALGIDKLVQGGGLDVLSERFPPQQATPPLIMEERPNLYSQPYSSPSPTANLPSPFQGMVRQKPSLGTMPVQVTPPRGAFSPGMGMQPRQTLNRPPAAPNQLRLQLQQRLQGQQQLIHQNRQAILNQFAATAPVGINMRSGMQQQITPQPPLNAQMLAQRQRELYSQQHRQRQLIQQQRAMLMRQQSFGNNLPPSSGLPVQMGNPRLPQGAPQQFPYPPNYGTNPGTPPASTSPFSQLAANPEASLANRNSMVSRGMTGNIGGQFGTGINPQMQQNVFQYPGAGMVPQGEANFAPSLSPGSSMVPMPIPPPQSSLLQQTPPASGYQSPDMKAWQQGAIGNNNVFSQAVQNQPTPAQPGVYNNMSITVSMAGGNTNVQNMNPMMAQMQMSSLQMPGMNTVCPEQINDPALRHTGLYCNQLSSTDLLKTEADGTQQVQQVQVFADVQCTVNLVGGDPYLNQPGPLGTQKPTSGPQTPQAQQKSLLQQLLTE

SEQ ID NO: 56090 - protein, 1440 aa, Homo sapiens
MSGLGDSSSDPANPDSHKRKGSPCDTLASSTEKRRREQENKYLEELAELLSANISDIDSLSVKPDKCKILKKTVDQIQLMKRMEQEKSTTDDDVQKSDISSSSQGVIEKESLGPLLLEALDGFFFVVNCEGRIVFVSENVTSYLGYNQEELMNTSVYSILHVGDHAEFVKNLLPKSLVNGVPWPQEATRRNSHTFNCRMLIHPPDEPGTENQEACQRYEVMQCFTVSQPKSIQEDGEDFQSCLICIARRLPRPPAITGVESFMTKQDTTGKIISIDTSSLRAAGRTGWEDLVRKCIYAFFQPQGREPSYARQLFQEVMTRGTASSPSYRFILNDGTMLSAHTKCKLCYPQSPDMQPFIMGIHIIDREHSGLSPQDDTNSGMSIPRVNPSVNPSISPAHGVARSSTLPPSNSNMVSTRINRQQSSDLHSSSHSNSSNSQGSFGCSPGSQIVANVALNQGQASSQSSNPSLNLNNSPMEGTGISLAQFMSPRRQVTSGLATRPRMPNNSFPPNISTLSSPVGMTSSACNNNNRSYSNIPVTSLQGMNEGPNNSVGFSASSPVLRQMSSQNSPSRLNIQPAKAESKDNKEIASILNEMIQSDNSSSDGKPLDSGLLHNNDRLSDGDSKYSQTSHKLVQLLTTTAEQQLRHADIDTSCKDVLSCTGTSNSASANSSGGSCPSSHSSLTERHKILHRLLQEGSPSDITTLSVEPDKKDSASTSVSVTGQVQGNSSIKLELDASKKKESKDHQLLRYLLDKDEKDLRSTPNLSLDDVKVKVEKKEQMDPCNTNPTPMTKPTPEEIKLEAQSQFTADLDQFDQLLPTLEKAAQLPGLCETDRMDGAVTSVTIKSEILPASLQSATARPTSRLNRLPELELEAIDNQFGQPGTGDQIPWTNNTVTAINQSKSEDQCISSQLDELLCPPTTVEGRNDEKALLEQLVSFLSGKDETELAELDRALGIDKLVQGGGLDVLSERFPPQQATPPLIMEERPNLYSQPYSSPSPTANLPSPFQGMVRQKPSLGTMPVQVTPPRGAFSPGMGMQPRQTLNRPPAAPNQLRLQLQQRLQGQQQLIHQNRQAILNQFAATAPVGINMRSGMQQQITPQPPLNAQMLAQRQRELYSQQHRQRQLIQQQRAMLMRQQSFGNNLPPSSGLPVQMGNPRLPQGAPQQFPYPPNYGTNPGTPPASTSPFSQLAANPEASLANRNSMVSRGMTGNIGGQFGTGINPQMQQNVFQYPGAGMVPQGEANFAPSLSPGSSMVPMPIPPPQSSLLQQTPPASGYQSPDMKAWQQGAIGNNNVFSQAVQNQPTPAQPGVYNNMSITVSMAGGNTNVQNMNPMMAQMQMSSLQMPGMNTVCPEQINDPALRHTGLYCNQLSSTDLLKTEADGTQVQQVQVFADVQCTVNLVGGDPYLNQPGPLGTQKPTSGPQTPQAQQKSLLQQLLTE

SEQ ID NO: 56091 - protein, 1399 aa, Homo sapiens; identical to SEQ ID NO: 56088

SEQ ID NO: 56092 - protein, 1441 aa, Homo sapiens; identical to SEQ ID NO: 56089

SEQ ID NO: 56093 - protein, 1399 aa, Homo sapiens; identical to SEQ ID NO: 56088

SEQ ID NO: 56094 - protein, 552 aa, Homo sapiens
MQLTAENSPVTPVGAQKTALRISQSRMIGNSASRPTMPSGEWAPQSSAVRVTCAATTSAMNRPVQGGMIRNPAASIPMRPSSQPGQRQTLQSQVMNIGPSELEMNMGGPQYSQQQAPPNQTAPWPESILPIDQASFASQNRQPFGSSPDDLLCPHPAAESPSDEGALLDQLYLALRNFDGLEEIDRALGIPELVSQSQAVDPEQFSSQDSNIMLEQKAPVFPQQYASQAQMAQGSYSPMQDPNFHTMGQRPSYATLRMQPRPGLRPTGLVQNQPNQLRLQLQHRLQAQQNRQPLMNQISNVSNVNLTLRPGVPTQAPINAQMLAQRQREILNQHLRQRQMHQQQQVQQRTLMMRGQGLNMTPSMVAPSGMPATMSNPRIPQANAQQFPFPPNYGISQQPDPGFTGATTPQSPLMSPRMAHTQSPMMQQSQANPAYQAPSDINGWAQGNMGGNSMFSQQSPPHFGQQANTSMYSNNMNINVSMATNTGGMSSMNQMTGQISMTSVTSVPTSGLSSMGPEQVNDPALRGGNLFPNQLPGMDMIKQEGDTTRKYC

SEQ ID NO: 56095 - protein, 1464 aa, Homo sapiens
MSGMGENTSDPSRAETRKRKECPDQLGPSPKRNTEKRNREQENKYIEELAELIFANFNDIDNFNFKPDKCAILKETVKQIRQIKEQEKAAAANIDEVQKSDVSSTGQGVIDKDALGPMMLEALDGFFFVVNLEGNVVFVSENVTQYLRYNQEELMNKSVYSILHVGDHTEFVKNLLPKSIVNGGSWSGEPPRRNSHTFNCRMLVKPLPDSEEEGHDNQEAHQKYETMQCFAVSQPKSIKEEGEDLQSCLICVARRVPMKERPVLPSSESFTTRQDLQGKITSLDTSTMRAAMKPGWEDLVRRCIQKFHAQHEGESVSYAKRHHHEVLRQGLAFSQIYRFSLSDGTLVAAQTKSKLIRSQTTNEPQLVISLHMLHREQNVCVMNPDLTGQTMGKPLNPISSNSPAHQALCSGNPGQDMTLSSNINFPINGPKEQMGMPMGRFGGSGGMNHVSGMQATTPQGSNYALKMNSPSQSSPGMNPGQPTSMLSPRHRMSPGVAGSPRIPPSQFSPAGSLHSPVGVCSSTGNSHSYTNSSLNALQALSEGHGVSLGSSLASPDLKMGNLQNSPVNMNPPPLSKMGSLDSKDCFGLYGEPSEGTTGQAESSCHPGEQKETNDPNLPPAVSSERADGQSRLHDSKGQTKLLQLLTTKSDQMEPSPLASSLSDTNKDSTGSLPGSGSTHGTSLKEKHKILHRLLQDSSSPVDLAKLTAEATGKDLSQESSSTAPGSEVTIKQEPVSPKKKENALLRYLLDKDDTKDIGLPEITPKLERLDSKTDPASNTKLIAMKTEKEEMSFEPGDQPGSELDNLEEILDDLQNSQLPQLFPDTRPGAPAGSVDKQAIINDLMQLTAENSPVTPVGAQKTALRISQSTFNNPRPGQLGRLLPNQNLPLDITLQSPTGAGPFPPIRNSSPYSVIPQPGMMGNQGMIGNQGNLGNSSTGMIGNSASRPTMPSGEWAPQSSAVRVTCAATTSAMNRPVQGGMIRNPAASIPMRPSSQPGQRQTLQSQVMNIGPSELEMNMGGPQYSQQQAPPNQTAPWPESILPIDQASFASQNRQPFGSSPDDLLCPHPAAESPSDEGALLDQLYLALRNFDGLEEIDRALGIPELVSQSQAVDPEQFSSQDSNIMLEQKAPVFPQQYASQAQMAQGSYSPMQDPNFHTMGQRPSYATLRMQPRPGLRPTGLVQNQPNQLRLQLQHRLQAQQNRQPLMNQISNVSNVNLTLRPGVPTQAPINAQMLAQRQREILNQHLRQRQMHQQQQVQQRTLMMRGQGLNMTPSMVAPSGMPATMSNPRIPQANAQQFPFPPNYGISQQPDPGFTGATTPQSPLMSPRMAHTQSPMMQQSQANPAYQAPSDINGWAQGNMGGNSMFSQQSPPHFGQQANTSMYSNNMNINVSMATNTGGMSSMNQMTGQISMTSVTSVPTSGLSSMGPEQVNDPALRGGNLFPNQLPGMDMIKQEGDTTRKYC

SEQ ID NO: 56096 - protein, 16 aa, Homo sapiens
MSGMGENTSDPSRAET

SEQ ID NO: 56097 - protein, 8 aa, Homo sapiens
MSGMGENT

SEQ ID NO: 56098 - protein, 1420 aa, Homo sapiens
MSGLGENLDPLASDSRKRKLPCDTPGQGLTCSGEKRRREQESKYIEELAELISANLSDIDNFNVKPDKCAILKETVRQIRQIKEQGKTISNDDDVQKADVSSTGQGVIDKDSLGPLLLQALDGFLFVVNRDGNIVFVSENVTQYLQYKQEDLVNTSVYNILHEEDRKDFLKNLPKSTVNGVSWTNETQRQKSHTFNCRMLMKTPHDILEDINASPEMRQRYETMQCFALSQPRAMMEEGEDLQSCMICVARRITTGERTFPSNPESFITRHDLSGKVVNIDTNSLRSSMRPGFEDIIRRCIQRFFSLNDGQSWSQKRHYQEAYLNGHAETPVYRFSLADGTIVTAQTKSKLFRNPVTNDRHGFVSTHFLQREQNGYRPNPNPVGQGIRPPMAGCNSSVGGMSMSPNQGLQMPSSRAYGLADPSTTGQMSGARYGGSSNIASLTPGPGMQSPSSYQNNNYGLNMSSPPHGSPGLAPNQQNIMISPRNRGSPKIASHQFSPVAGVHSPMASSGNTGNHSFSSSSLSALQAISEGVGTSLLSTLSSPGPKLDNSPNMNITQPSKVSNQDSKSPLGFYCDQNPVESSMCQSNSRDHLSDKESKESSVEGAENQRGPLESKGHKKLLQLLTCSSDDRGHSSLTNSPLDSSCKESSVSVTSPSGVSSSTSGGVSSTSNMHGSLLQEKHRILHKLLQNGNSPAEVAKITAEATGKDTSSITSCGDGNVVKQEQLSPKKKENNALLRYLLDRDDPSDALSKELQPQVEGVDNKMSQCTSSTIPSSSQEKDPKIKTETSEEGSGDLDNLDAILGDLTSSDFYNNSISSNGSHLGTKQQVFQGTNSLGLKSSQSVQSIRPPYNRAVSLDSPVSVGSSPPVKNISAFPMLPKQPMLGGNPRMMDSQENYGSSMGGPNRNVTVTQTPSSGDWGLPNSKAGRMEPMNSNSMGRPGGDYNTSLPRPALGGSIPTLPLRSNSIPGARPVLQQQQQMLQMRPGEIPMGMGANPYGQAAASNQLGSWPDGMLSMEQVSHGTQNRPLLRNSLDDLVGPPSNLEGQSDERALLDQLHTLLSNTDATGLEEIDRALGIPELVNQGQALEPKQDAFQGQEAAVMMDQKAGLYGQTYPAQGPPMQGGFHLQGQSPSFNSMMNQMNQQGNFPLQGMHPRANIMRPRTNTPKQLRMQLQQRLQGQQFLNQSRQALELKMENPTAGGAAVMRPMMQPQQGFLNAQMVAQRSRELLSHHFRQQRVAMMMQQQQQQQQQQQQQQQQQQQQQQQQQQQQQTQAFSPPPNVTASPSMDGLLAGPTMPQAPPQQFPYQPNYGMGQQPDPAFGRVSSPPNAMMSSRMGPSQNPMMQHPQAASIYQSSEMKGWPSGNLARNSSFSQQQFAHQGNPAVYSMVHMNGSSGHMGQMNMNPMPMSGMPMGPDQKYC

SEQ ID NO: 56099 - protein, 1350 aa, Homo sapiens
MSGLGENLDPLASDSRKRKLPCDTPGQGLTCSGEKRRREQESKYIEELAELISANLSDIDNFNVKPDKCAILKETVRQIRQIKEQGKTISNDDDVQKADVSSTGQGVIDKDSLGPLLLQALDGFLFVVNRDGNIVFVSENVTQYLQYKQEDLVNTSVYNILHEEDRKDFLKNLPKSTVNGVSWTNETQRQKSHTFNCRMLMKTPHDILEDINASPEMRQRYETMQCFALSQPRAMMEEGEDLQSCMICVARRITTGERTFPSNPESFITRHDLSGKVVNIDTNSLRSSMRPGFEDIIRRCIQRFFSLNDGQSWSQKRHYQEVTSDGIFSPTAYLNGHAETPVYRFSLADGTIVTAQTKSKLFRNPVTNDRHGFVSTHFLQREQNGYRPNPNPVGQGIRPPMAGCNSSVGGMSMSPNQGLQMPSSRAYGLADPSTTGQMSGARYGGSSNIASLTPGPGMQSPSSYQNNNYGLNMSSPPHGSPGLAPNQQNIMISPRNRGSPKIASHQFSPVAGVHSPMASSGNTGNHSFSSSSLSALQAISEGVGTSLLSTLSSPGPKLDNSPNMNITQPSKVSNQDSKSPLGFYCDQNPVESSMCQSNSRDHLSDKESKESSVEGAENQRGPLESKGHKKLLQLLTCSSDDRGHSSLTNSPLDSSCKESSVSVTSPSGVSSSTSGGVSSTSNMHGSLLQEKHRILHKLLQNGNSPAEVAKITAEATGKDTSSITSCGDGNVVKQEQLSPKKKENNALLRYLLDRDDPSDALSKELQPQVEGVDNKMSQCTSSTIPSSSQEKDPKIKTETSEEGSGDLDNLDAILGDLTSSDFYNNSISSNGSHLGTKQQVFQGTNSLGDWGLPNSKAGRMEPMNSNSMGRPGGDYNTSLPRPALGGSIPTLPLRSNSIPGARPVLQQQQQMLQMRPGEIPMGMGANPYGQAAASNQLGSWPDGMLSMEQVSHGTQNRPLLRNSLDDLVGPPSNLEGQSDERALLDQLHTLLSNTDATGLEEIDRALGIPELVNQGQALEPKQDAFQGQEAAVMMDQKAGLYGQTYPAQGPPMQGGFHLQGQSPSFNSMMNQMNQQGNFPLQGMHPRANIMRPRTNTPKQLRMQLQQRLQGQQFLNQSRQALELKMENPTAGGAAVMRPMMQPQQGFLNAQMVAQRSRELLSHHFRQQRVAMMMQQQQQQQQQQQQQQQQQQQQQQQQQQQQQTQAFSPPPNVTASPSMDGLLAGPTMPQAPPQQFPYQPNYGMGQQPDPAFGRVSSPPNAMMSSRMGPSQNPMMQHPQAASIYQSSEMKGWPSGNLARNSSFSQQQFAHQGNPAVYSMVHMNGSSGHMGQMNMNPMPMSGMPMGPDQKYC

SEQ ID NO: 56100 - protein, 1415 aa, Homo sapiens
MSGLGENLDPLASDSRKRKLPCDTPGQGLTCSGEKRRREQESKYIEELAELISANLSDIDNFNVKPDKCAILKETVRQIRQIKEQGKTISNDDDVQKADVSSTGQGVIDKDSLGPLLLQALDGFLFVVNRDGNIVFVSENVTQYLQYKQEDLVNTSVYNILHEEDRKDFLKNLPKSTVNGVSWTNETQRQKSHTFNCRMLMKTPHDILEDINASPEMRQRYETMQCFALSQPRAMMEEGEDLQSCMICVARRITTGERTFPSNPESFITRHDLSGKVVNIDTNSLRSSMRPGFEDIIRRCIQRFFSLNDGQSWSQKRHYQEVTSDGIFSPTAYLNGHAETPVYRFSLADGTIVTAQTKSKLFRNPVTNDRHGFVSTHFLQREQNGYRPNPNPVGQGIRPPMAGCNSSVGGMSMSPNQGLQMPSSRAYGLADPSTTGQMSGARYGGSSNIASLTPGPGMQSPSSYQNNNYGLNMSSPPHGSPGLAPNQQNIMISPRNRGSPKIASHQFSPVAGVHSPMASSGNTGNHSFSSSSLSALQAISEGVGTSLLSTLSSPGPKLDNSPNMNITQPSKVSNQDSKSPLGFYCDQNPVESSMCQSNSRDHLSDKESKESSVEGAENQRGPLESKGHKKLLQLLTCSSDDRGHSSLTNSPLDSSCKESSVSVTSPSGVSSSTSGGVSSTSNMHGSLLQEKHRILHKLLQNGNSPAEVAKITAEATGKDTSSITSCGDGNVVKQEQLSPKKKENNALLRYLLDRDDPSDALSKELQPQVEGVDNKMSQCTSSTIPSSSQEKDPKIKTETSEEGSGDLDNLDAILGDLTSSDFYNNSISSNGSHLGTKQQVFQGTNSLGLKSSQSVQSIRPPYNRAVSLDSPVSVGSSPPVKNISAFPMLPKQPMLGGNPRMMDSQENYGSSMGDWGLPNSKAGRMEPMNSNSMGRPGGDYNTSLPRPALGGSIPTLPLRSNSIPGARPVLQQQQQMLQMRPGEIPMGMGANPYGQAAASNQLGSWPDGMLSMEQVSHGTQNRPLLRNSLDDLVGPPSNLEGQSDERALLDQLHTLLSNTDATGLEEIDRALGIPELVNQGQALEPKQDAFQGQEAAVMMDQKAGLYGQTYPAQGPPMQGGFHLQGQSPSFNSMMNQMNQQGNFPLQGMHPRANIMRPRTNTPKQLRMQLQQRLQGQQFLNQSRQALELKMENPTAGGAAVMRPMMQPQQGFLNAQMVAQRSRELLSHHFRQQRVAMMMQQQQQQQQQQQQQQQQQQQQQQQQQQQQQTQAFSPPPNVTASPSMDGLLAGPTMPQAPPQQFPYQPNYGMGQQPDPAFGRVSSPPNAMMSSRMGPSQNPMMQHPQAASIYQSSEMKGWPSGNLARNSSFSQQQFAHQGNPAVYSMVHMNGSSGHMGQMNMNPMPMSGMPMGPDQKYC

SEQ ID NO: 56101 - protein, 1424 aa, Homo sapiens
MSGLGENLDPLASDSRKRKLPCDTPGQGLTCSGEKRRREQESKYIEELAELISANLSDIDNFNVKPDKCAILKETVRQIRQIKEQGKTISNDDDVQKADVSSTGQGVIDKDSLGPLLLQALDGFLFVVNRDGNIVFVSENVTQYLQYKQEDLVNTSVYNILHEEDRKDFLKNLPKSTVNGVSWTNETQRQKSHTFNCRMLMKTPHDILEDINASPEMRQRYETMQCFALSQPRAMMEEGEDLQSCMICVARRITTGERTFPSNPESFITRHDLSGKVVNIDTNSLRSSMRPGFEDIIRRCIQRFFSLNDGQSWSQKRHYQEAYLNGHAETPVYRFSLADGTIVTAQTKSKLFRNPVTNDRHGFVSTHFLQREQNGYRPNPNPVGQGIRPPMAGCNSSVGGMSMSPNQGLQMPSSRAYGLADPSTTGQMSGARYGGSSNIASLTPGPGMQSPSSYQNNNYGLNMSSPPHGSPGLAPNQQNIMISPRNRGSPKIASHQFSPVAGVHSPMASSGNTGNHSFSSSSLSALQAISEGVGTSLLSTLSSPGPKLDNSPNMNITQPSKVSNQDSKSPLGFYCDQNPVESSMCQSNSRDHLSDKESKESSVEGAENQRGPLESKGHKKLLQLLTCSSDDRGHSSLTNSPLDSSCKESSVSVTSPSGVSSSTSGGVSSTSNMHGSLLQEKHRILHKLLQNGNSPAEVAKITAEATGKDTSSITSCGDGNVVKQEQLSPKKKENNALLRYLLDRDDPSDALSKELQPQVEGVDNKMSQCTSSTIPSSSQEKDPKIKTETSEEGSGDLDNLDAILGDLTSSDFYNNSISSNGSHLGTKQQVFQGTNSLGLKSSQSVQSIRPPYNRAVSLDSPVSVGSSPPVKNISAFPMLPKQPMLGGNPRMMDSQENYGSSMGGPNRNVTVTQTPSSGDWGLPNSKAGRMEPMNSNSMGRPGGDYNTSLPRPALGGSIPTLPLRSNSIPGARPVLQQQQQMLQMRPGEIPMGMGANPYGQAAASNQLGSWPDGMLSMEQVSHGTQNRPLLRNSLDDLVGPPSNLEGQSDERALLDQLHTLLSNTDATGLEEIDRALGIPELVNQGQALEPKQDAFQGQEAAVMMDQKAGLYGQTYPAQGPPMQGGFHLQGQSPSFNSMMNQMNQQGNFPLQGMHPRANIMRPRTNTPKQLRMQLQQRLQGQQFLNQSRQALELKMENPTAGGAAVMRPMMQPQVSSQQGFLNAQMVAQRSRELLSHHFRQQRVAMMMQQQQQQQQQQQQQQQQQQQQQQQQQQQQQTQAFSPPPNVTASPSMDGLLAGPTMPQAPPQQFPYQPNYGMGQQPDPAFGRVSSPPNAMMSSRMGPSQNPMMQHPQAASIYQSSEMKGWPSGNLARNSSFSQQQFAHQGNPAVYSMVHMNGSSGHMGQMNMNPMPMSGMPMGPDQKYC

SEQ ID NO: 56102 - protein, 1420 aa, Homo sapiens; identical to SEQ ID NO: 56098

SEQ ID NO: 56103 - protein, 257 aa, Homo sapiens
MMEEGEDLQSCMICVARRITTGERTFPSNPESFITRHDLSGKVVNIDTNSLRSSMRPGFEDIIRRCIQRFFSLNDGQSWSQKRHYQEAYLNGHAETPVYRFSLADGTIVTAQTKSKLFRNPVTNDRHGFVSTHFLQREQNGYRPNPNPVGQGIRPPMAGCNSSVGGMSMSPNQGLQMPSSRAYGLADPSTTGQMSGARYGGSSNIASLTPGPGMQSPSSYQNNNYGLNMSSPPHGSPGLAPNQQNIMILLVIVGVQR

SEQ ID NO: 56104 - protein, 287 aa, Homo sapiens
MNTFQDQSGSSSNREPLLRCSDARRDLELAIGGVLRAEQQIKDNLREVKAQIHSCISRHLECLRSREVWLYEQVDLIYQLKEETLQQQAQQLYSLLGQFNCLTHQLECTQNKDLANQVSVCLERLGSLTLKPEDSTVLLFEADTITLRQTITTFGSLKTIQIPEHLMAHASSANIGPFLEKRGCISMPEQKSASGIVAVPFSEWLLGSKPASGYQAPYIPSTDPQDWLTQKQTLENSQQEVLLNSPLQEEHNFPPDHYGLPAVCDLFACMQLKVDKEKWLYRTPLQV

SEQ ID NO: 56105 - protein, 614 aa, Homo sapiens
MNTFQDQSGSSSNREPLLRCSDARRDLELAIGGVLRAEQQIKDNLREVKAQIHSCISRHLECLRSREVWLYEQVDLIYQLKEETLQQQAQQLYSLLGQFNCLTHQLECTQNKDLANQVSVCLERLGSLTLKPEDSTVLLFEADTITLRQTITTFGSLKTIQIPEHLMAHASSANIGPFLEKRGCISMPEQKSASGIVAVPFSEWLLGSKPASGYQAPYIPSTDPQDWLTQKQTLENSQTSSRACNFFNNVGGNLKGLENWLLKSEKSSYQKCNSHSTTSSFSIEMEKVGDQELPDQDEMDLSDWLVTPQESHKLRKPENGSRETSEKFKLLFQSYNVNDWLVKTDSCTNCQGNQPKGVEIENLGNLKCLNDHLEAKKPLSTPSMVTEDWLVQNHQDPCKVEEVCRANEPCTSFAECVCDENCEKEALYKWLLKKEGKDKNGMPVEPKPEPEKHKDSLNMWLCPRKEVIEQTKAPKAMTPSRIADSFQVIKNSPLSEWLIRPPYKEGSPKEVPGTEDRAGKQKFKSPMNTSWCSFNTADWVLPGKKMGNLSQLSSGEDKWLLRKKAQEVLLNSPLQEEHNFPPDHYGLPAVCDLFACMQLKVDKEKWLYRTPLQM

SEQ ID NO: 56106 - protein, 575 aa, Homo sapiens
MNTFQDQSGSSSNREPLLRCSDARRDLELAIGGVLRAEQQIKDNLREVKAQIHSCISRHLECLRSREVWLYEQVDLIYQLKEETLQQQAQQLYSLLGQFNCLTHQLECTQNKDLANQVSVCLERLGSLTLKPEDSTVLLFEADTITLRQTITTFGSLKTIQIPEHLMAHASSANIGPFLEKRGCISMPEQKSASGIVAVPFSEWLLGSKPASGYQAPYIPSTDPQDWLTQKQTLENSQTSSRACNFFNNVGGNLKGLENWLLKSEKSSYQKCNSHSTTSSFSIEMEKVGDQELPDQDEMDLSDWLVTPQESHKLRKPENGSRETSEKFKLLFQSYNVNDWLVKTDSCTNCQGNQPKGVEIENLGNLKCLNDHLEAKKPLSTPSMVTEDWLVQNHQDPCKVEEVCRANEPCTSFAECVCDENCEKEALYKWLLKKEGKDKNGMPVEPKPEPEKHKDSLNMWLCPRKEVIEQTKAPKAMTPSRIADSFQVIKNSPLSEWLIRPPYKEGSPKEVPGTEDRAGKQKYYLIHLYRRNITSPQTIMASLQFVISLPVCSLKLIKRSGYIELLYRCEGMDKS

SEQ ID NO: 56107 - protein, 614 aa, Homo sapiens; identical to SEQ ID NO: 56105

SEQ ID NO: 56108 - protein, 448 aa, Homo sapiens
MAHASSANIGPFLEKRGCISMPEQKSASGIVAVPFSEWLLGSKPASGYQAPYIPSTDPQDWLTQKQTLENSQTSSRACNFFNNVGGNLKGLENWLLKSEKSSYQKCNSHSTTSSFSIEMEKVGDQELPDQDEMDLSDWLVTPQESHKLRKPENGSRETSEKFKLLFQSYNVNDWLVKTDSCTNCQGNQPKGVEIENLGNLKCLNDHLEAKKPLSTPSMVTEDWLVQNHQDPCKVEEVCRANEPCTSFAECVCDENCEKEALYKWLLKKEGKDKNGMPVEPKPEPEKHKDSLNMWLCPRKEVIEQTKAPKAMTPSRIADSFQVIKNSPLSEWLIRPPYKEGSPKEVPGTEDRAGKQKFKSPMNTSWCSFNTADWVLPGKKMGNLSQLSSGEDKWLLRKKAQEVLLNSPLQEEHNFPPDHYGLPAVCDLFACMQLKVDKEKWLYRTPLQM

SEQ ID NO: 56109 - protein, 514 aa, Homo sapiens
MNRWTLFISLKRRHFNSRLSSSTRLGSLTLKPEDSTVLLFEADTITLRQTITTFGSLKTIQIPEHLMAHASSANIGPFLEKRGCISMPEQKSASGIVAVPFSEWLLGSKPASGYQAPYIPSTDPQDWLTQKQTLENSQTSSRACNFFNNVGGNLKGLENWLLKSEKSSYQKCNSHSTTSSFSIEMEKVGDQELPDQDEMDLSDWLVTPQESHKLRKPENGSRETSEKFKLLFQSYNVNDWLVKTDSCTNCQGNQPKGVEIENLGNLKCLNDHLEAKKPLSTPSMVTEDWLVQNHQDPCKVEEVCRANEPCTSFAECVCDENCEKEALYKWLLKKEGKDKNGMPVEPKPEPEKHKDSLNMWLCPRKEVIEQTKAPKAMTPSRIADSFQVIKNSPLSEWLIRPPYKEGSPKEVPGTEDRAGKQKFKSPMNTSWCSFNTADWVLPGKKMGNLSQLSSGEDKWLLRKKAQEVLLNSPLQEEHNFPPDHYGLPAVCDLFACMQLKVDKEKWLYRTPLQM

SEQ ID NO: 56110 - protein, 264 aa, Homo sapiens
  VARIANT 1: note = MOD_RES - Any amino acid
XCTPAWAAELDSVSKQKKNPKPTFKKKTEERTCEVKKVSRLGSLTLKPEDSTVLLFEADTITLRQTITTFGSLKTIQIPEHLMAHASSANIGPFLEKRGCISMPEQKSASGIVAVPFSEWLLGSKPASGYQAPYIPSTDPQDWLTQKQTLENSQTSSRACNFFNNVGGNLKGLENWLLKSEKSSYQKCNSHSTTSSFSIEMEKVGDQELPDQDEMDLSDWLVTPQESHKLRKPENGSRETSEKFKLLFQSYNVNDWLVKTDSCT

SEQ ID NO: 56111 - protein, 630 aa, Homo sapiens
MGAQLTTFALAGAVRRMNTFQDQSGSSSNREPLLRCSDARRDLELAIGGVLRAEQQIKDNLREVKAQIHSCISRHLECLRSREVWLYEQVDLIYQLKEETLQQQAQQLYSLLGQFNCLTHQLECTQNKDLANQVSVCLERLGSLTLKPEDSTVLLFEADTITLRQTITTFGSLKTIQIPEHLMAHASSANIGPFLEKRGCISMPEQKSASGIVAVPFSEWLLGSKPASGYQAPYIPSTDPQDWLTQKQTLENSQTSSRACNFFNNVGGNLKGLENWLLKSEKSSYQKCNSHSTTSSFSIEMEKVGDQELPDQDEMDLSDWLVTPQESHKLRKPENGSRETSEKFKLLFQSYNVNDWLVKTDSCTNCQGNQPKGVEIENLGNLKCLNDHLEAKKPLSTPSMVTEDWLVQNHQDPCKVEEVCRANEPCTSFAECVCDENCEKEALYKWLLKKEGKDKNGMPVEPKPEPEKHKDSLNMWLCPRKEVIEQTKAPKAMTPSRIADSFQVIKNSPLSEWLIRPPYKEGSPKEVPGTEDRAGKQKFKSPMNTSWCSFNTADWVLPGKKMGNLSQLSSGEDKWLLRKKAQEVLLNSPLQEEHNFPPDHYGLPAVCDLFACMQLKVDKEKWLYRTPLQM

SEQ ID NO: 56112 - protein, 614 aa, Homo sapiens; identical to SEQ ID NO: 56105

SEQ ID NO: 56113 - protein, 650 aa, Homo sapiens
MGAQLTTFALAGAVRRMNTFQDQSGSSSNREPLLRCSDARRDLELAIGGVLRAEQQIKDNLREVKAQIHSCISRHLECLRSREVWLYEQVDLIYQLKEETLQQQAQQLYSLLGQFNCLTHQLECTQNKDLANQVSVCLERLGSLTLKPEDSTVLLFEADTITLRQTITTFGSLKTIQIPEHLMAHASSANIGPFLEKRGCISMPEQKSASGIVAVPFSEWLLGSKPASGYQAPYIPSTDPQDWLTQKQTLENSQTSSRACNFFNNVGGNLKGLENWLLKSEKSSYQKCNSHSTTSSFSIEMEKVGDQELPDQDEMDLSDWLVTPQESHKLRKPENGSRETSEKFKLLFQSYNVNDWLVKTDSCTNCQGNQPKGVEIENLGNLKCLNDHLEAKKPLSTPSMVTEDWLVQNHQDPCKVEEVCRANEPCTSFAECVCDENCEKEALYKWLLKKEGKDKNGMPVEPKPEPEKHKDSLNMWLCPRKEVIEQTKAPKAMTPSRIADSFQVIKNSPLSEWLIRPPYKEGSPKEVPGTEDRAGKQKFKSPMNTSWCSFNTADWVLPGKKMGNLSQLSSGEDKWLLRKKAQEVLLNSPLQEEHNFPPDHYGLPAVCDLFACMQLKVDKEKWLYRTPLQAYFKMNFQDVTVGNFQIPCGF

SEQ ID NO: 56114 - protein, 2063 aa, Homo sapiens
MVLDDLPNLEDIYTSLCSSTMEDSEMDFDSGLEDDDTKSDSILEDSTIFVAFKGNIDDKDFKWKLDAILKNVPNLLHMESSKLKVQKVEPWNSVRVTFNIPREAAERLRILAQSNNQQLRDLGILSVQIEGEGAINLALAQNRSQDVRMNGPMGAGNSVRMEAGFPMASGPGIIRMNNPATVMIPPGGNVSSSMMAPGPNPELQPRTPRPASQSDAMDPLLSGLHIQQQSHPSGSLAPPHHPMQPVSVNRQMNPANFPQLQQQQQQQQQQQQQQQQQQQQQQQQQLQARPPQQHQQQQPQGIRPQFTAPTQVPVPPGWNQLPSGALQPPPAQGSLGTMTANQGWKKAPLPGPMQQQLQARPSLATVQTPSHPPPPYPFGSQQASQAHTNFPQMSNPGQFTAPQMKSLQGGPSRVPTPLQQPHLTNKSPASSPSSFQQGSPASSPTVNQTQQQMGPRPPQNNPLPQGFQQPVSSPGRNPMVQQGNVPPNFMVMQQQPPNQGPQSLHPGLGGMPKRLPPGFSAGQANPNFMQGQVPSTTATTPGNSGAPQLQANQNVQHAGGQGAGPPQNQMQVSHGPPNMMQPSLMGIHGNMNNQQAGTSGVPQVNLSNMQGQPQQGPPSQLMGMHQQIVPSQGQMVQQQGTLNPQNPMILSRAQLMPQGQMMVNPPSQNLGPSPQRMTPPKQMLSQQGPQMMAPHNQMMGPQGQVLLQQNPMIEQIMTNQMQGNKQQFNTQNQSNVMPGPAQIMRGPTPNMQGNMVQFTGQMSGQMLPQQGPVNNSPSQVMGIQGQVLRPPGPSPHMAQQHGDPATTANNDVSLSQMMPDVSIQQTNMVPPHVQAMQGNSASGNHFSGHGMSFNAPFSGAPNGNQMSCGQNPGFPVNKDVTLTSPLLVNLLQSDISAGHFGVNNKQNNTNANKPKKKKPPRKKKNSQQDLNTPDTRPAGLEEADQPPLPGEQGINLDNSGPKLPEFSNRPPGYPSQPVEQRPLQQMPPQLMQHVAPPPQPPQQQPQPQLPQQQQPPPPSQPQSQQQQQQQQQMMMMLMMQQDPKSVRLPVSQNVHPPRGPLNPDSQRMPMQQSGSVPVMVSLQGPASVPPSPDKQRMPMPVNTPLGSNSRKMVYQESPQNPSSSPLAEMASLPEASGSEAPSVPGGPNNMPSHVVLPQNQLMMTGPKPGPSPLSATQGATPQQPPVNSLPSSHGHHFPNVAAPTQTSRPKTPNRASPRPYYPQTPNNRPPSTEPSEISLSPERLNASIAGLFPPQINIPLPPRPNLNRGFDQQGLNPTTLKAIGQAPSNLTMNPSNFATPQTHKLDSVVVNSGKQSNSGATKRASPSNSRRSSPGSSRKTTPSPGRQNSKAPKLTLASQTNAALLQNVELPRNVLVSPTPLANPPVPGSFPNNSGLNPQNSTVSVAAVGGVVEDNKESLNVPQDSDCQNSQSRKEQVNIELKAVPAQEVKMVVPEDQSKKDGQPSDPNKLPSVEENKNLVSPAMREAPTSLSQLLDNSGAPNVTIKPPGLTDLEVTPPVVSGEDLKKASVIPTLQDLSSSKEPSNSLNLPHSNELCSSLVHPELSEVSSNVAPSIPPVMSRPVSSSSISTPLPPNQITVFVTSNPITTSANTSAALPTHLQSALMSTVVTMPNAGSKVMVSEGQSAAQSNARPQFITPVFINSSSIIQVMKGSQPSTIPAAPLTTNSGLMPPSVAVVGPLHIPQNIKFSSAPVPPNALSSSPAPNIQTGRPLVLSSRATPVQLPSPPCTSSPVVPSHPPVQQVKELNPDEASPQVNTSADQNTLPSSQSTTMVSPLLTNSPGSSGNRRSPVSSSKGKGKVDKIGQILLTKACKKVTGSLEKGEEQYGADGETEGQGLDTTAPGLMGTEQLSTELDSKTPTPPAPTLLKMTSSPVGPGTASAGPSLPGGALPTSVRSIVTTLVPSELISAVPTTKSNHGGIASESLAGGLVEEKVGSHPELLPSIAPSQNLVSKETSTTALQASVARPELEVNAAIVSGQSSEPKEIVEKSKIPGRRNSRTEEPTVASESVENGHRKRSSRPASASSSTKDITSAVQSKRRKSK

SEQ ID NO: 56115 - protein, 2063 aa, Homo sapiens; identical to SEQ ID NO: 56114

SEQ ID NO: 56116 - protein, 361 aa, Homo sapiens
MVLDDLPNLEDIYTSLCSSTMEDSEMDFDSGLEDDDTKSDSILEDSTIFVAFKGNIDDKDFKWKLDAILKNVPNLLHMESSKLKVQKVEPWNSVRVTFNIPREAAERLRILAQSNNQQLRDLGILSVQIEGEGAINLALAQNRSQDVRMNGPMGAGNSVRMEAGFPMASGPDAMDPLLSGLHIQQQSHPSGSLAPPHHPMQPVSVNRQMNPANFPQLQQQQQQQQQQQQQQQQQQQQQQQQQLQARPPQQHQQQQPQGIRPQFTAPTQVPVPPGWNQLPSGALQPPPAQGSLGTMTANQGWKKAPLPGPMQQQLQARPSLATVQTPSHPPPPYPFGSQQASQAHTNFPQMSNPGQFTAPQM

SEQ ID NO: 56117 - protein, 827 aa, Homo sapiens
MVVQKPHGTMEYTAGNQDTLNSIALKFNITPNKLVELNKLFTHTIVPGQVLFVPDANSPSSTLRLSSSSPGATVSPSSSDAEYDKLPDADLARKALKPIERVLSSTSEEDEPGVVKFLKMNCRYFTDGKGVVGGVMIVTPNNIMFDPHKSDPLVIENGCEEYGLICPMEEVVSIALYNDISHMKIKDALPSPGEWEDLASEKDINPFSKFKSINKEKRQQNGEKIMTSDSRPIVPLEKSTGHTPTKPSGSSVSEKLKKLDSSRETSHGSPTVTKLSKEPSDTSSAFESTAKENFLGEDDDFVDLEELSSQTGGGMHKKDTLKECLSLDPEERKKAESQINNSAVEMQVQSALAFLGTENDVELKGALDLETCEKQDIMPEVDKQSGSPESRVENTLNIHEDLDKVKLIEYYLTKNKEGPQVSENLQKTELSDGKSIEPGGIDITLSSSLSQAGDPITEGNKEPDKTWVKKGEPLPVKLNSSTEANVIKEALDSSLESTLDNSCQGAQMDNKSEVQLWLLKRIQVPIEDILPSKEEKSKTPPMFLCIKVGKPMRKSFATHTAAMVQQYGKRRKQPEYWFAVPRERVDHLYTFFVQWSPDVYGKDAKEQGFVVVEKEELNMIDNFFSEPTTKSWEIITVEEAKRRKSTCSYYEDEDEEVLPVLRPHSALLENMHIEQLARRLPARVQGYPWRLAYSTLEHGTSLKTLYRKSASLDSPVLLVIKDMDNQIFGAYATHPFKFSDHYYGTGETFLYTFSPHFKVFKWSGENSYFINGDISSLELGGGGGRFGLWLDADLYHGRSNSCSTFNNDILSKKEDFIVQDLEVWAFD

SEQ ID NO: 56118 - protein, 183 aa, Homo sapiens
MGAAHSVWEVDHLYTFFVQWSPDVYGKDAKEQGFVVVEKEELNMIDNFFSEPTTKSWEIITVEEAKRRKSTCSYYEDEDEEVLPVLRPHSALLENMHIEQLARRLPARVQGYPWRLAYSTLEHGTSLKTLYRKSASLDSPVLLVIKDMDNQIFGAYATHPFKFSDHYYGTGETFLYTFSPHFK

SEQ ID NO: 56119 - protein, 942 aa, Homo sapiens
MDTKEEKKERKQSYFARLKKKKQAKQNAETASAVATRTHTGKEDNNTVVLEPDKCNIAVEEEYMTDEKKKRKSNQLKEIRRTELKRYYSIDDNQNKTHDKKEKKMVVQKPHGTMEYTAGNQDTLNSIALKFNITPNKLVELNKLFTHTIVPGQVLFVPDANSPSSTLRLSSSSPGATVSPSSSDAEYDKLPDADLARKALKPIERVLSSTSEEDEPGVVKFLKMNCRYFTDGKGVVGGVMIVTPNNIMFDPHKSDPLVIENGCEEYGLICPMEEVVSIALYNDISHMKIKDALPSDLPQDLCPLYRPGEWEDLASEKDINPFSKFKSINKEKRQQNGEKIMTSDSRPIVPLEKSTGHTPTKPSGSSVSEKLKKLDSSRETSHGSPTVTKLSKEPSDTSSAFESTAKENFLGEDDDFVDLEELSSQTGGGMHKKDTLKECLSLDPEERKKAESQINNSAVEMQVQSALAFLGTENDVELKGALDLETCEKQDIMPEVDKQSGSPESRVENTLNIHEDLDKVKLIEYYLTKNKEGPQVSENLQKTELSDGKSIEPGGIDITLSSSLSQAGDPITEGNKEPDKTWVKKGEPLPVKLNSSTEANVIKEALDSSLESTLDNSCQGAQMDNKSEVQLWLLKRIQVPIEDILPSKEEKSKTPPMFLCIKVGKPMRKSFATHTAAMVQQYGKRRKQPEYWFAVPRERVDHLYTFFVQWSPDVYGKDAKEQGFVVVEKEELNMIDNFFSEPTTKSWEIITVEEAKRRKSTCSYYEDEDEEVLPVLRPHSALLENMHIEQLARRLPARVQGYPWRLAYSTLEHGTSLKTLYRKSASLDSPVLLVIKDMDNQIFGAYATHPFKFSDHYYGTGETFLYTFSPHFKVFKWSGENSYFINGDISSLELGGGGGRFGLWLDADLYHGRSNSCSTFNNDILSKKEDFIVQDLEVWAFD

SEQ ID NO: 56120 - protein, 942 aa, Homo sapiens; identical to SEQ ID NO: 56119

SEQ ID NO: 56121 - protein, 440 aa, Homo sapiens
DADLARKALKPIERVLSSTSEEDEPGVVKFLKMNCRYFTDGKGVVGGVMIVTPNNIMFDPHKSDPLVIENGCEEYGLICPMEEVVSIALYNDISHMKIKDALPSPGEWEDLASEKDINPFSKFKSINKEKRQQNGEKIMTSDSRPIVPLEKSTGHTPTKPSGSSVSEKLKKLDSSRETSHGSPTVTKLSKEPSDTSSAFESTAKENFLGEDDDFVDLEELSSQTGGGMHKKDTLKECLSLDPEERKKAESQINNSAVEMQVQSALAFLGTENDVELKGALDLETCEKQDIMPEVDKQSGSPESRVENTLNIHEDLDKVKLIEYYLTKNKEGPQVSENLQKTELSDGKSIEPGGIDITLSSSLSQAGDPITEGNKEPDKTWVKKGEPLPVKLNSSTEANVIKEALDSSLESTLDNSCQGAQMDNKSEVQLWLLKRIQVPIE

SEQ ID NO: 56122 - protein, 191 aa, Homo sapiens
MDTKEEKKERKQSYFARLKKKKQAKQNAETASAVATRTHTGKEDNNTVVLEPDKCNIAVEEEYMTDEKKKRKSNQLKEIRRTELKRYYSIDDNQNKTHDKKEKKMVVQKPHGTMEYTAGNQDTLNSIALKFNITPNKLVELNKLFTHTIVPGQVLFVPDANSPSSTLRLSSSSPGATVSPSSSDAEYDKLP

SEQ ID NO: 56123 - protein, 117 aa, Homo sapiens
MDTKEEKKERKQSYFARLKKKKQAKQNAETASAVATRTHTGKEDNNTVVLEPDKCNIAVEEEYMTDEKKKRKSNQLKEIRRTELKRYYSIDDNQNKTHDKKEKKMVVQKPHGTMEYT

SEQ ID NO: 56124 - protein, 90 aa, Homo sapiens
MDTKEEKKERKQSYFARLKKKKQAKQNAETASAVATRTHTGKEDNNTVVLEPDKCNIAVEEEYMTDEKKKRKSNQLKEIRRTELKRYYSI

SEQ ID NO: 56125 - protein, 90 aa, Homo sapiens; identical to SEQ ID NO: 56124

SEQ ID NO: 56126 - protein, 183 aa, Homo sapiens; identical to SEQ ID NO: 56118

SEQ ID NO: 56127 - protein, 237 aa, Homo sapiens
  VARIANT 1: note = MOD_RES - Any amino acid
XEKTCSSLEREPHFSLLTMRGQRLPLDIQIFYCARPDEEPFVKIITVEEAKRRKSTCSYYEDEDEEVLPVLRPHSALLENMHIEQLARRLPARVQGYPWRLAYSTLEHGTSLKTLYRKSASLDSPVLLVIKDMDNQIFGAYATHPFKFSDHYYGTGETFLYTFSPHFKVFKWSGENSYFINGDISSLELGGGGGRFGLWLDADLYHGRSNSCSTFNNDILSKKEDFIVQDLEVWAFD

SEQ ID NO: 56128 - protein, 177 aa, Homo sapiens
  VARIANT 1: note = MOD_RES - Any amino acid
XEKTCSSLEREPHFSLLTMRGQRLPLDIQIFYCARPDEEPFVKIITVEEAKRRKSTCSYYEDEDEEVLPVLRPHSALLENMHIEQLARRLPARVQGYPWRLAYSTLEHGTSLKTLYRKSASLDSPVLLVIKDMDNQIFGAYATHPFKFSDHYYGTGETFLYTFSPHFKGTIWFMARC

SEQ ID NO: 56129 - protein, 190 aa, Homo sapiens
  VARIANT 1: note = MOD_RES - Any amino acid
XEKTCSSLEREPHFSLLTMRGQRLPLDIQIFYCARPDEEPFVKIITVEEAKRRKSTCSYYEDEDEEVLPVLRPHSALLENMHIEQLARRLPARVQGYPWRLAYSTLEHGTSLKTLYRKSASLDSPVLLVIKDMDNQIFGAYATHPFKFSDHYYGTGETFLYTFSPHFKWSGENSYFINGDISSLELGGGG

SEQ ID NO: 56130 - protein, 90 aa, Homo sapiens; identical to SEQ ID NO: 56124

SEQ ID NO: 56131 - protein, 2521 aa, Homo sapiens
MSGSTQPVAQTWRATEPRYPPHSLSYPVQIARTHTDVGLLEYQHHSRDYASHLSPGSIIQPQRRRPSLLSEFQPGNERSQELHLRPESHSYLPELGKSEMEFIESKRPRLELLPDPLLRPSPLLATGQPAGSEDLTKDRSLTGKLEPVSPPSPPHTDPELELVPPRLSKEELIQNMDRVDREITMVEQQISKLKKKQQQLEEEAAKPPEPEKPVSPPPIESKHRSLVQIIYDENRKKAEAAHRILEGLGPQVELPLYNQPSDTRQYHENIKINQAMRKKLILYFKRRNHARKQWEQKFCQRYDQLMEAWEKKVERIENNPRRRAKESKVREYYEKQFPEIRKQRELQERMQSRVGQRGSGLSMSAARSEHEVSEIIDGLSEQENLEKQMRQLAVIPPMLYDADQQRIKFINMNGLMADPMKVYKDRQVMNMWSEQEKETFREKFMQHPKNFGLIASFLERKTVAECVLYYYLTKKNENYKSLVRRSYRRRGKSQQQQQQQQQQQQQQQQQPMPRSSQEEKDEKEKEKEAEKEEEKPEVENDKEDLLKEKTDDTSGEDNDEKEAVASKGRKTANSQGRRKGRITRSMANEANSEEAITPQQSAELASMELNESSRWTEEEMETAKKGLLEHGRNWSAIARMVGSKTVSQCKNFYFNYKKRQNLDEILQQHKLKMEKERNARRKKKKAPAAASEEAAFPPVVEDEEMEASGVSGNEEEMVEEAEALHASGNEVPRGECSGPATVNNSSDTESIPSPHTEAAKDTGQNGPKPPATLGADGPPPGPPTPPPEDIPAPTEPTPASEATGAPTPPPAPPSPSAPPPVVPKEEKEEETAAAPPVEEGEEQKPPAAEELAVDTGKAEEPVKSECTEEAEEGPAKGKDAEAAEATAEGALKAEKKEGGSGRATTAKSSGAPQDSDSSATCSADEVDEAEGGDKNRLLSPRPSLLTPTGDPRANASPQKPLDLKQLKQRAAAIPPIVTKVHEPPREDAAPTKPAPPAPPPPQNLQPESDAPQQPGSSPRGKSRSPAPPADKEAEKPVFFPAFAAEAQKLPGDPPCWTSGLPFPVPPREVIKASPHAPDPSAFSYAPPGHPLPLGLHDTARPVLPRPPTISNPPPLISSAKHPSVLERQIGAISQGMSVQLHVPYSEHAKAPVGPVTMGLPLPMDPKKLAPFSGVKQEQLSPRGQAGPPESLGVPTAQEASVLRGTALGSVPGGSITKGIPSTRVPSDSAITYRGSITHGTPADVLYKGTITRIIGEDSPSRLDRGREDSLPKGHVIYEGKKGHVLSYEGGMSVTQCSKEDGRSSSGPPHETAAPKRTYDMMEGRVGRAISSASIEGLMGRAIPPERHSPHHLKEQHHIRGSITQGIPRSYVEAQEDYLRREAKLLKREGTPPPPPPSRDLTEAYKTQALGPLKLKPAHEGLVATVKEAGRSIHEIPREELRHTPELPLAPRPLKEGSITQGTPLKYDTGASTTGSKKHDVRSLIGSPGRTFPPVHPLDVMADARALERACYEESLKSRPGTASSSGGSIARGAPVIVPELGKPRQSPLTYEDHGAPFAGHLPRGSPVTTREPTPRLQEGSLSSSKASQDRKLTSTPREIAKSPHSTVPEHHPHPISPYEHLLRGVSGVDLYRSHIPLAFDPTSIPRGIPLDAAAAYYLPRHLAPNPTYPHLYPPYLIRGYPDTAALENRQTIINDYITSQQMHHNAATAMAQRADMLRGLSPRESSLALNYAAGPRGIIDLSQVPHLPVLVPPTPGTPATAMDRLAYLPTAPQPFSSRHSSSPLSPGGPTHLTKPTTTSSSERERDRDRERDRDREREKSILTSTTTVEHAPIWRPGTEQSSGSSGGGGGSSSRPASHSHAHQHSPISPRTQDALQQRPSVLHNTGMKGIITAVEPSTPTVLRSTSTSSPVRPAATFPPATHCPLGGTLDGVYPTLMEPVLLPKEAPRVARPERPRADTGHAFLAKPPARSGLEPASSPSKGSEPRPLVPPVSGHATIARTPAKNLAPHHASPDPPAPPASASDPHREKTQSKPFSIQELELRSLGYHGSSYSPEGVEPVSPVSSPSLTHDKGLPKHLEELDKSHLEGELRPKQPGPVKLGGEAAHLPHLRPLPESQPSSSPLLQTAPGVKGHQRVVTLAQHISEVITQDYTRHHPQQLSAPLPAPLYSFPGASCPVLDLRRPPSDLYLPPPDHGAPARGSPHSEGGKRSPEPNKTSVLGGGEDGIEPVSPPEGMTEPGHSRSAVYPLLYRDGEQTEPSRMGSKSPGNTSQPPAFFSKLTESNSAMVKSKKQEINKKLNTHNRNEPEYNISQPGTEIFNMPAITGTGLMTYRSQAVQEHASTNMGLEAIIRKALMGKYDQWEESPPLSANAFNPLNASASLPAAMPITAADGRSDHTLTSPGGGGKAKVSGRPSSRKAKSPAPGLASGDRPPSVSSVHSEGDCNRRTPLTNRVWEDRPSSAGSTPFPYNPLIMRLQAGVMASPPPPGLPAGSGPLAGPHHAWDEEPKPLLCSQYETLSDSE

SEQ ID NO: 56132 - protein, 2459 aa, Homo sapiens
MSGSTQPVAQTWRATEPRYPPHSLSYPVQIARTHTDVGLLEYQHHSRDYASHLSPGSIIQPQRRRPSLLSEFQPGNERSQELHLRPESHSYLPELGKSEMEFIESKRPRLELLPDPLLRPSPLLATGQPAGSEDLTKDRSLTGKLEPVSPPSPPHTDPELELVPPRLSKEELIQNMDRVDREITMVEQQISKLKKKQQQLEEEAAKPPEPEKPVSPPPIESKHRSLVQIIYDENRKKAEAAHRILEGLGPQVELPLYNQPSDTRQYHENIKINQAMRKKLILYFKRRNHARKQWEQKFCQRYDQLMEAWEKKVERIENNPRRRAKESKVREYYEKQFPEIRKQRELQERMQSRVGQRGSGLSMSAARSEHEVSEIIDGLSEQENLEKQMRQLAVIPPMLYDADQQRIKFINMNGLMADPMKVYKDRQVMNMWSEQEKETFREKFMQHPKNFGLIASFLERKTVAECVLYYYLTKKNENYKSLVRRSYRRRGKSQQQQQQQQQQQQQQQQQPMPRSSQEEKDEKEKEKEAEKEEEKPEVENDKEDLLKEKTDDTSGEDNDEKEAVASKGRKTANSQGRRKGRITRSMANEANSEEAITPQQSAELASMELNESSRWTEEEMETAKKGLLEHGRNWSAIARMVGSKTVSQCKNFYFNYKKRQNLDEILQQHKLKMEKERNARRKKKKAPAAASEEAAFPPVVEDEEMEASGVSGNEEEMVEEAEATVNNSSDTESIPSPHTEAAKDTGQNGPKPPATLGADGPPPGPPTPPPEDIPAPTEPTPASEATGAPTPPPAPPSPSAPPPVVPKEEKEEETAAAPPVEEGEEQKPPAAEELAVDTGKAEEPVKSECTEEAEEGPAKGKDAEAAEATAEGALKAEKKEGGSGRATTAKSSGAPQDSDSSATCSADEVDEAEGGDKNRLLSPRPSLLTPTGDPRANASPQKPLDLKQLKQRAAAIPPIQVTKVHEPPREDAAPTKPAPPAPPPPQNLQPESDAPQQPGSSPRGKSRSPAPPADKEAEKPVFFPAFAAEAQKLPGDPPCWTSGLPFPVPPREVIKASPHAPDPSAFSYAPPGHPLPLGLHDTARPVLPRPPTISNPPPLISSAKHPSVLERQIGAISQGMSVQLHVPYSEHAKAPVGPVTMGLPLPMDPKKLAPFSGVKQEQLSPRGQAGPPESLGVPTAQEASVLRGTALGSVPGGSITKGIPSTRVPSDSAITYRGSITHGTPADVLYKGTITRIIGEDSPSRLDRGREDSLPKGHVIYEGKKGHVLSYEGGMSVTQCSKEDGRSSSGPPHETAAPKRTYDMMEGRVGRAISSASIEGLMGRAIPPERHSPHHLKEQHHIRGSITQGIPRSYVEAQEDYLRREAKLLKREGTPPPPPPSRDLTEAYKTQALGPLKLKPAHEGLVATVKEAGRSIHEIPREELRHTPELPLAPRPLKEGSITQGTPLKYDTGASTTGSKKHDVRSLIGSPGRTFPPVHPLDVMADARALERACYEESLKSRPGTASSSGGSIARGAPVIVPELGKPRQSPLTYEDHGAPFAGHLPRGSPVTTREPTPRLQEGSLSSSKASQDRKLTSTPREIAKSPHSTVPEHHPHPISPYEHLLRGVSGVDLYRSHIPLAFDPTSIPRGIPLDAAAAYYLPRHLAPNPTYPHLYPPYLIRGYPDTAALENRQTIINDYITSQQMHHNAATAMAQRADMLRGLSPRESSLALNYAAGPRGIIDLSQVPHLPVLVPPTPGTPATAMDRLAYLPTAPQPFSSRHSSSPLSPGGPTHLTKPTTTSSSERERDRDRERDRDREREKSILTSTTTVEHAPIWRPGTEQSSGSSGGGGGSSSRPASHSHAHQHSPISPRTQDALQQRPSVLHNTGMKGIITAVEPSTPTVLRSTSTSSPVRPAATFPPATHCPLGGTLDGVYPTLMEPVLLPKEAPRVARPERPRADTGHAFLAKPPARSGLEPASSPSKGSEPRPLVPPVSGHATIARTPAKNLAPHHASPDPPAPPASASDPHREKTQSKPFSIQELELRSLGYHGSSYSPEGVEPVSPVSSPSLTHDKGLPKHLEELDKSHLEGELRPKQPGPVKLGGEAAHLPHLRPLPESQPSSSPLLQTAPGVKGHQRVVTLAQHISEVITQDYTRHHPQQLSAPLPAPLYSFPGASCPVLDLRRPPSDLYLPPPDHGAPARGSPHSEGGKRSPEPNKTSVLGGGEDGIEPVSPPEGMTEPGHSRSAVYPLLYRDGEQTEPSRMGSKSPGNTSQPPAFFSKLTESNSAMVKSKKQEINKKLNTHNRNEPEYNISQPGTEIFNMPAITGTGLMTYRSQAVQEHASTNMGLEAIIRKALMGGGGKAKVSGRPSSRKAKSPAPGLASGDRPPSVSSVHSEGDCNRRTPLTNRVWEDRPSSAGSTPFPYNPLIMRLQAGVMASPPPPGLPAGSGPLAGPHHAWDEEPKPLLCSQYETLSDSE

SEQ ID NO: 56133 - protein, 2075 aa, Homo sapiens
MWSEQEKETFREKFMQHPKNFGLIASFLERKTVAECVLYYYLTKKNENYKSLVRRSYRRRGKSQQQQQQQQQQQQQQQQQPMPRSSQEEKDEKEKEKEAEKEEEKPEVENDKEDLLKEKTDDTSGEDNDEKEAVASKGRKTANSQGRRKGRITRSMANEANSEEAITPQQSAELASMELNESSRWTEEEMETAKKGLLEHGRNWSAIARMVGSKTVSQCKNFYFNYKKRQNLDEILQQHKLKMEKERNARRKKKKAPAAASEEAAFPPVVEDEEMEASGVSGNEEEMVEEAEATVNNSSDTESIPSPHTEAAKDTGQNGPKPPATLGADGPPPGPPTPPPEDIPAPTEPTPASEATGAPTPPPAPPSPSAPPPVVPKEEKEEETAAAPPVEEGEEQKPPAAEELAVDTGKAEEPVKSECTEEAEEGPAKGKDAEAAEATAEGALKAEKKEGGSGRATTAKSSGAPQDSDSSATCSADEVDEAEGGDKNRLLSPRPSLLTPTGDPRANASPQKPLDLKQLKQRAAAIPPIQVTKVHEPPREDAAPTKPAPPAPPPPQNLQPESDAPQQPGSSPRGKSRSPAPPADKEAEKPVFFPAFAAEAQKLPGDPPCWTSGLPFPVPPREVIKASPHAPDPSAFSYAPPGHPLPLGLHDTARPVLPRPPTISNPPPLISSAKHPSVLERQIGAISQGMSVQLHVPYSEHAKAPVGPVTMGLPLPMDPKKLAPFSGVKQEQLSPRGQAGPPESLGVPTAQEASVLRGTALGSVPGGSITKGIPSTRVPSDSAITYRGSITHGTPADVLYKGTITRIIGEDSPSRLDRGREDSLPKGHVIYEGKKGHVLSYEGGMSVTQCSKEDGRSSSGPPHETAAPKRTYDMMEGRVGRAISSASIEGLMGRAIPPERHSPHHLKEQHHIRGSITQGIPRSYVEAQEDYLRREAKLLKREGTPPPPPPSRDLTEAYKTQALGPLKLKPAHEGLVATVKEAGRSIHEIPREELRHTPELPLAPRPLKEGSITQGTPLKYDTGASTTGSKKHDVRSLIGSPGRTFPPVHPLDVMADARALERACYEESLKSRPGTASSSGGSIARGAPVIVPELGKPRQSPLTYEDHGAPFAGHLPRGSPVTTREPTPRLQEGSLSSSKASQDRKLTSTPREIAKSPHSTVPEHHPHPISPYEHLLRGVSGVDLYRSHIPLAFDPTSIPRGIPLDAAAAYYLPRHLAPNPTYPHLYPPYLIRGYPDTAALENRQTIINDYITSQQMHHNAATAMAQRADMLRGLSPRESSLALNYAAGPRGIIDLSQVPHLPVLVPPTPGTPATAMDRLAYLPTAPQPFSSRHSSSPLSPGGPTHLTKPTTTSSSERERDRDRERDRDREREKSILTSTTTVEHAPIWRPGTEQSSGSSGGGGGSSSRPASHSHAHQHSPISPRTQDALQQRPSVLHNTGMKGIITAVEPSTPTVLRSTSTSSPVRPAATFPPATHCPLGGTLDGVYPTLMEPVLLPKEAPRVARPERPRADTGHAFLAKPPARSGLEPASSPSKGSEPRPLVPPVSGHATIARTPAKNLAPHHASPDPPAPPASASDPHREKTQSKPFSIQELELRSLGYHGSSYSPEGVEPVSPVSSPSLTHDKGLPKHLEELDKSHLEGELRPKQPGPVKLGGEAAHLPHLRPLPESQPSSSPLLQTAPGVKGHQRVVTLAQHISEVITQDYTRHHPQQLSAPLPAPLYSFPGASCPVLDLRRPPSDLYLPPPDHGAPARGSPHSEGGKRSPEPNKTSVLGGGEDGIEPVSPPEGMTEPGHSRSAVYPLLYRDGEQTEPSRMGSKSPGNTSQPPAFFSKLTESNSAMVKSKKQEINKKLNTHNRNEPEYNISQPGTEIFNMPAITGTGLMTYRSQAVQEHASTNMGLEAIIRKALMGKYDQWEESPPLSANAFNPLNASASLPAAMPITAADGRSDHTLTSPGGGGKAKVSGRPSSRKAKSPAPGLASGDRPPSVSSVHSEGDCNRRTPLTNRVWEDRPSSAGSTPFPYNPLIMRLQAGVMASPPPPGLPAGSGPLAGPHHAWDEEPKPLLCSQYETLSDSE

SEQ ID NO: 56134 - protein, 2458 aa, Homo sapiens
MSGSTQPVAQTWRATEPRYPPHSLSYPVQIARTHTDVGLLEYQHHSRDYASHLSPGSIIQPQRRRPSLLSEFQPGNERSQELHLRPESHSYLPELGKSEMEFIESKRPRLELLPDPLLRPSPLLATGQPAGSEDLTKDRSLTGKLEPVSPPSPPHTDPELELVPPRLSKEELIQNMDRVDREITMVEQQISKLKKKQQQLEEEAAKPPEPEKPVSPPPIESKHRSLVQIIYDENRKKAEAAHRILEGLGPQVELPLYNQPSDTRQYHENIKINQAMRKKLILYFKRRNHARKQWEQKFCQRYDQLMEAWEKKVERIENNPRRRAKESKVREYYEKQFPEIRKQRELQERMQRVGQRGSGLSMSAARSEHEVSEIIDGLSEQENLEKQMRQLAVIPPMLYDADQQRIKFINMNGLMADPMKVYKDRQVMNMWSEQEKETFREKFMQHPKNFGLIASFLERKTVAECVLYYYLTKKNENYKSLVRRSYRRRGKSQQQQQQQQQQQQQQQQQPMPRSSQEEKDEKEKEKEAEKEEEKPEVENDKEDLLKEKTDDTSGEDNDEKEAVASKGRKTANSQGRRKGRITRSMANEANSEEAITPQQSAELASMELNESSRWTEEEMETAKKGLLEHGRNWSAIARMVGSKTVSQCKNFYFNYKKRQNLDEILQQHKLKMEKERNARRKKKKAPAAASEEAAFPPVVEDEEMEASGVSGNEEEMVEEAEATVNNSSDTESIPSPHTEAAKDTGQNGPKPPATLGADGPPPGPPTPPPEDIPAPTEPTPASEATGAPTPPPAPPSPSAPPPVVPKEEKEEETAAAPPVEEGEEQKPPAAEELAVDTGKAEEPVKSECTEEAEEGPAKGKDAEAAEATAEGALKAEKKEGGSGRATTAKSSGAPQDSDSSATCSADEVDEAEGGDKNRLLSPRPSLLTPTGDPRANASPQKPLDLKQLKQRAAAIPPIQVTKVHEPPREDAAPTKPAPPAPPPPQNLQPESDAPQQPGSSPRGKSRSPAPPADKEAEKPVFFPAFAAEAQKLPGDPPCWTSGLPFPVPPREVIKASPHAPDPSAFSYAPPGHPLPLGLHDTARPVLPRPPTISNPPPLISSAKHPSVLERQIGAISQGMSVQLHVPYSEHAKAPVGPVTMGLPLPMDPKKLAPFSGVKQEQLSPRGQAGPPESLGVPTAQEASVLRGTALGSVPGGSITKGIPSTRVPSDSAITYRGSITHGTPADVLYKGTITRIIGEDSPSRLDRGREDSLPKGHVIYEGKKGHVLSYEGGMSVTQCSKEDGRSSSGPPHETAAPKRTYDMMEGRVGRAISSASIEGLMGRAIPPERHSPHHLKEQHHIRGSITQGIPRSYVEAQEDYLRREAKLLKREGTPPPPPPSRDLTEAYKTQALGPLKLKPAHEGLVATVKEAGRSIHEIPREELRHTPELPLAPRPLKEGSITQGTPLKYDTGASTTGSKKHDVRSLIGSPGRTFPPVHPLDVMADARALERACYEESLKSRPGTASSSGGSIARGAPVIVPELGKPRQSPLTYEDHGAPFAGHLPRGSPVTTREPTPRLQEGSLSSSKASQDRKLTSTPREIAKSPHSTVPEHHPHPISPYEHLLRGVSGVDLYRSHIPLAFDPTSIPRGIPLDAAAAYYLPRHLAPNPTYPHLYPPYLIRGYPDTAALENRQTIINDYITSQQMHHNAATAMAQRADMLRGLSPRESSLALNYAAGPRGIIDLSQVPHLPVLVPPTPGTPATAMDRLAYLPTAPQPFSSRHSSSPLSPGGPTHLTKPTTTSSSERERDRDRERDRDREREKSILTSTTTVEHAPIWRPGTEQSSGSSGGGGGSSSRPASHSHAHQHSPISPRTQDALQQRPSVLHNTGMKGIITAVEPSTPTVLRSTSTSSPVRPAATFPPATHCPLGGTLDGVYPTLMEPVLLPKEAPRVARPERPRADTGHAFLAKPPARSGLEPASSPSKGSEPRPLVPPVSGHATIARTPAKNLAPHHASPDPPAPPASASDPHREKTQSKPFSIQELELRSLGYHGSSYSPEGVEPVSPVSSPSLTHDKGLPKHLEELDKSHLEGELRPKQPGPVKLGGEAAHLPHLRPLPESQPSSSPLLQTAPGVKGHQRVVTLAQHISEVITQDYTRHHPQQLSAPLPAPLYSFPGASCPVLDLRRPPSDLYLPPPDHGAPARGSPHSEGGKRSPEPNKTSVLGGGEDGIEPVSPPEGMTEPGHSRSAVYPLLYRDGEQTEPSRMGSKSPGNTSQPPAFFSKLTESNSAMVKSKKQEINKKLNTHNRNEPEYNISQPGTEIFNMPAITGTGLMTYRSQAVQEHASTNMGLEAIIRKALMGGGGKAKVSGRPSSRKAKSPAPGLASGDRPPSVSSVHSEGDCNRRTPLTNRVWEDRPSSAGSTPFPYNPLIMRLQAGVMASPPPPGLPAGSGPLAGPHHAWDEEPKPLLCSQYETLSDSE

SEQ ID NO: 56135 - protein, 2514 aa, Homo sapiens
MSGSTQPVAQTWRATEPRYPPHSLSYPVQIARTHTDVGLLEYQHHSRDYASHLSPGSIIQPQRRRPSLLSEFQPGNERSQELHLRPESHSYLPELGKSEMEFIESKRPRLELLPDPLLRPSPLLATGQPAGSEDLTKDRSLTGKLEPVSPPSPPHTDPELELVPPRLSKEELIQNMDRVDREITMVEQQISKLKKKQQQLEEEAAKPPEPEKPVSPPPIESKHRSLVQIIYDENRKKAEAAHRILEGLGPQVELPLYNQPSDTRQYHENIKINQAMRKKLILYFKRRNHARKQWEQKFCQRYDQLMEAWEKKVERIENNPRRRAKESKVREYYEKQFPEIRKQRELQERMQSRVGQRGSGLSMSAARSEHEVSEIIDGLSEQENLEKQMRQLAVIPPMLYDADQQRIKFINMNGLMADPMKVYKDRQVMNMWSEQEKETFREKFMQHPKNFGLIASFLERKTVAECVLYYYLTKKNENYKSLVRRSYRRRGKSQQQQQQQQQQQQQQQQQPMPRSSQEEKDEKEKEKEAEKEEEKPEVENDKEDLLKEKTDDTSGEDNDEKEAVASKGRKTANSQGRRKGRITRSMANEANSEEAITPQQSAELASMELNESSRWTEEEMETAKKGLLEHGRNWSAIARMVGSKTVSQCKNFYFNYKKRQNLDEILQQHKLKMEKERNARRKKKKAPAAASEEAAFPPVVEDEEMEASGVSGNEEEMVEEAEALHASGNEVPRGECSGPATVNNSSDTESIPSPHTEAAKDTGQNGPKPPATLGADGPPPGPPTPPPEDIPAPTEPTPASEATGAPTPPPAPPSPSAPPPVVPKEEKEEETAAAPPVEEGEEQKPPAAEELAVDTGKAEEPVKSECTEEAEEGPAKGKDAEAAEATAEGALKAEKKEGGSGRATTAKSSGAPQDSDSSATCSADEVDEAEGGDKNRLLSPRPSLLTPTGDPRANASPQKPLDLKQLKQRAAAIPPIQVTKVHEPPREDAAPTKPAPPAPPPPQNLQPESDAPQQPGSSPRGKSRSPAPPADKEAFAAEAQKLPGDPPCWTSGLPFPVPPREVIKASPHAPDPSAFSYAPPGHPLPLGLHDTARPVLPRPPTISNPPPLISSAKHPSVLERQIGAISQGMSVQLHVPYSEHAKAPVGPVTMGLPLPMDPKKLAPFSGVKQEQLSPRGQAGPPESLGVPTAQEASVLRGTALGSVPGGSITKGIPSTRVPSDSAITYRGSITHGTPADVLYKGTITRIIGEDSPSRLDRGREDSLPKGHVIYEGKKGHVLSYEGGMSVTQCSKEDGRSSSGPPHETAAPKRTYDMMEGRVGRAISSASIEGLMGRAIPPERHSPHHLKEQHHIRGSITQGIPRSYVEAQEDYLRREAKLLKREGTPPPPPPSRDLTEAYKTQALGPLKLKPAHEGLVATVKEAGRSIHEIPREELRHTPELPLAPRPLKEGSITQGTPLKYDTGASTTGSKKHDVRSLIGSPGRTFPPVHPLDVMADARALERACYEESLKSRPGTASSSGGSIARGAPVIVPELGKPRQSPLTYEDHGAPFAGHLPRGSPVTTREPTPRLQEGSLSSSKASQDRKLTSTPREIAKSPHSTVPEHHPHPISPYEHLLRGVSGVDLYRSHIPLAFDPTSIPRGIPLDAAAAYYLPRHLAPNPTYPHLYPPYLIRGYPDTAALENRQTIINDYITSQQMHHNAATAMAQRADMLRGLSPRESSLALNYAAGPRGIIDLSQVPHLPVLVPPTPGTPATAMDRLAYLPTAPQPFSSRHSSSPLSPGGPTHLTKPTTTSSSERERDRDRERDRDREREKSILTSTTTVEHAPIWRPGTEQSSGSSGGGGGSSSRPASHSHAHQHSPISPRTQDALQQRPSVLHNTGMKGIITAVEPSTPTVLRSTSTSSPVRPAATFPPATHCPLGGTLDGVYPTLMEPVLLPKEAPRVARPERPRADTGHAFLAKPPARSGLEPASSPSKGSEPRPLVPPVSGHATIARTPAKNLAPHHASPDPPAPPASASDPHREKTQSKPFSIQELELRSLGYHGSSYSPEGVEPVSPVSSPSLTHDKGLPKHLEELDKSHLEGELRPKQPGPVKLGGEAAHLPHLRPLPESQPSSSPLLQTAPGVKGHQRVVTLAQHISEVITQDYTRHHPQQLSAPLPAPLYSFPGASCPVLDLRRPPSDLYLPPPDHGAPARGSPHSEGGKRSPEPNKTSVLGGGEDGIEPVSPPEGMTEPGHSRSAVYPLLYRDGEQTEPSRMGSKSPGNTSQPPAFFSKLTESNSAMVKSKKQEINKKLNTHNRNEPEYNISQPGTEIFNMPAITGTGLMTYRSQAVQEHASTNMGLEAIIRKALMGKYDQWEESPPLSANAFNPLNASASLPAAMPITAADGRSDHTLTSPGGGGKAKVSGRPSSRKAKSPAPGLASGDRPPSVSSVHSEGDCNRRTPLTNRVWEDRPSSAGSTPFPYNPLIMRLQAGVMASPPPPGLPAGSGPLAGPHHAWDEEPKPLLCSQYETLSDSE

SEQ ID NO: 56136 - protein, 2504 aa, Homo sapiens
MSGSTQPVAQTWRATEPRYPPHSLSYPVQIARTHTDVGLLEYQHHSRDYASHLSPGSIIQPQRRRPSLLSEFQPGNERSQELHLRPESHSYLPELGKSEMEFIESKRPRLELLPDPLLRPSPLLATGQPAGSEDLTKDRSLTGKLEPVSPPSPPHTDPELELVPPRLSKEELIQNMDRVDREITMVEQQISKLKKKQQQLEEEAAKPPEPEKPVSPPPIESKHRSLVQIIYDENRKKAEAAHRILEGLGPQVELPLYNQPSDTRQYHENIKINQAMRKKLILYFKRRNHARKQWEQKFCQRYDQLMEAWEKKVERIENNPRRRAKESKVREYYEKQFPEIRKQRELQERMQRVGQRGSGLSMSAARSEHEVSEIIDGLSEQENLEKQMRQLAVIPPMLYDADQQRIKFINMNGLMADPMKVYKDRQVMNMWSEQEKETFREKFMQHPKNFGLIASFLERKTVAECVLYYYLTKKNENYKSLVRRSYRRRGKSQQQQQQQQQQQQQQQQQPMPRSSQEEKDEKEKEKEAEKEEEKPEVENDKEDLLKEKTDDTSGEDNDEKEAVASKGRKTANSQGRRKGRITRSMANEANSEEAITPQQSAELASMELNESSRWTEEEMETAKKGLLEHGRNWSAIARMVGSKTVSQCKNFYFNYKKRQNLDEILQQHKLKMEKERNARRKKKKAPAAASEEAAFPPVVEDEEMEASGVSGNEEEMVEEAEATVNNSSDTESIPSPHTEAAKDTGQNGPKPPATLGADGPPPGPPTPPPEDIPAPTEPTPASEATGAPTPPPAPPSPSAPPPVVPKEEKEEETAAAPPVEEGEEQKPPAAEELAVDTGKAEEPVKSECTEEAEEGPAKGKDAEAAEATAEGALKAEKKEGGSGRATTAKSSGAPQDSDSSATCSADEVDEAEGGDKNRLLSPRPSLLTPTGDPRANASPQKPLDLKQLKQRAAAIPPIQVTKVHEPPREDAAPTKPAPPAPPPPQNLQPESDAPQQPGSSPRGKSRSPAPPADKEAEKPVFFPAFAAEAQKLPGDPPCWTSGLPFPVPPREVIKASPHAPDPSAFSYAPPGHPLPLGLHDTARPVLPRPPTISNPPPLISSAKHPSVLERQIGAISQGMSVQLHVPYSEHAKAPVGPVTMGLPLPMDPKKLAPFSGVKQEQLSPRGQAGPPESLGVPTAQEASVLRGTALGSVPGGSITKGIPSTRVPSDSAITYRGSITHGTPADVLYKGTITRIIGEDSPSRLDRGREDSLPKGHVIYEGKKGHVLSYEGGMSVTQCSKEDGRSSSGPPHETAAPKRTYDMMEGRVGRAISSASIEGLMGRAIPPERHSPHHLKEQHHIRGSITQGIPRSYVEAQEDYLRREAKLLKREGTPPPPPPSRDLTEAYKTQALGPLKLKPAHEGLVATVKEAGRSIHEIPREELRHTPELPLAPRPLKEGSITQGTPLKYDTGASTTGSKKHDVRSLIGSPGRTFPPVHPLDVMADARALERACYEESLKSRPGTASSSGGSIARGAPVIVPELGKPRQSPLTYEDHGAPFAGHLPRGSPVTTREPTPRLQEGSLSSSKASQDRKLTSTPREIAKSPHSTVPEHHPHPISPYEHLLRGVSGVDLYRSHIPLAFDPTSIPRGIPLDAAAAYYLPRHLAPNPTYPHLYPPYLIRGYPDTAALENRQTIINDYITSQQMHHNAATAMAQRADMLRGLSPRESSLALNYAAGPRGIIDLSQVPHLPVLVPPTPGTPATAMDRLAYLPTAPQPFSSRHSSSPLSPGGPTHLTKPTTTSSSERERDRDRERDRDREREKSILTSTTTVEHAPIWRPGTEQSSGSSGGGGGSSSRPASHSHAHQHSPISPRTQDALQQRPSVLHNTGMKGIITAVEPSTPTVLRSTSTSSPVRPAATFPPATHCPLGGTLDGVYPTLMEPVLLPKEAPRVARPERPRADTGHAFLAKPPARSGLEPASSPSKGSEPRPLVPPVSGHATIARTPAKNLAPHHASPDPPAPPASASDPHREKTQSKPFSIQELELRSLGYHGSSYSPEGVEPVSPVSSPSLTHDKGLPKHLEELDKSHLEGELRPKQPGPVKLGGEAAHLPHLRPLPESQPSSSPLLQTAPGVKGHQRVVTLAQHISEVITQDYTRHHPQQLSAPLPAPLYSFPGASCPVLDLRRPPSDLYLPPPDHGAPARGSPHSEGGKRSPEPNKTSVLGGGEDGIEPVSPPEGMTEPGHSRSAVYPLLYRDGEQTEPSRMGSKSPGNTSQPPAFFSKLTESNSAMVKSKKQEINKKLNTHNRNEPEYNISQPGTEIFNMPAITGTGLMTYRSQAVQEHASTNMGLEAIIRKALMGKYDQWEESPPLSANAFNPLNASASLPAAMPITAADGRSDHTLTSPGGGGKAKVSGRPSSRKAKSPAPGLASGDRPPSVSSVHSEGDCNRRTPLTNRVWEDRPSSAGSTPFPYNPLIMRLQAGVMASPPPPGLPAGSGPLAGPHHAWDEEPKPLLCSQYETLSDSE

SEQ ID NO: 56137 - protein, 2513 aa, Homo sapiens
MSGSTQPVAQTWRATEPRYPPHSLSYPVQIARTHTDVGLLEYQHHSRDYASHLSPGSIIQPQRRRPSLLSEFQPGNERSQELHLRPESHSYLPELGKSEMEFIESKRPRLELLPDPLLRPSPLLATGQPAGSEDLTKDRSLTGKLEPVSPPSPPHTDPELELVPPRLSKEELIQNMDRVDREITMVEQQISKLKKKQQQLEEEAAKPPEPEKPVSPPPIESKHRSLVQIIYDENRKKAEAAHRILEGLGPQVELPLYNQPSDTRQYHENIKINQAMRKKLILYFKRRNHARKQWEQKFCQRYDQLMEAWEKKVERIENNPRRRAKESKVREYYEKQFPEIRKQRELQERMQSRVGQRGSGLSMSAARSEHEVSEIIDGLSEQENLEKQMRQLAVIPPMLYDADQQRIKFINMNGLMADPMKVYKDRQVMNMWSEQEKETFREKFMQHPKNFGLIASFLERKTVAECVLYYYLTKKNENYKSLVRRSYRRRGKSQQQQQQQQQQQQQQQQQPMPRSSQEEKDEKEKEKEAEKEEEKPEVENDKEDLLKEKTDDTSGEDNDEKEAVASKGRKTANSQGRRKGRITRSMANEANSEEAITPQQSAELASMELNESSRWTEEEMETAKKGLLEHGRNWSAIARMVGSKTVSQCKNFYFNYKKRQNLDEILQQHKLKMEKERNARRKKKKAPAAASEEAAFPPVVEDEEMEASGVSGNEEEMVEEAEALHASGNEVPRGECSGPATVNNSSDTESIPSPHTEAAKDTGQNGPKPPATLGADGPPPGPPTPPRRTSRPTEPTPASEATGAPTPPPAPPSPSAPPPVVPKEEKEEETAAAPPVEEGEEQKPPAAEELAVDTGKAEEPVKSECTEEAEEGPAKGKDAEAAEATAEGALKAEKKEGGSGRATTAKSSGAPQDSDSSATCSADEVDEAEGGDKNRLLSPRPSLLTPTGDPRANASPQKPLDLKQLKQRAAAIPPIQVTKVHEPPREDAAPTKPAPPAPPPPQNLQPESDAPQQPGSSPRGKSRSPAPPADKEAFAAEAQKLPGDPPCWTSGLPFPVPPREVIKASPHAPDPSAFSYAPPGHPLPLGLHDTARPVLPRPPTISNPPPLISSAKHPSVLERQIGAISQGMSVQLHVPYSEHAKAPVGPVTMGLPLPMDPKKLAPFSGVKQEQLSPRGQAGPPESLGVPTAQEASVLRGTALGSVPGGSITKGIPSTRVPSDSAITYRGSITHGTPADVLYKGTITRIIGEDSPSRLDRGREDSLPKGHVIYEGKKGHVLSYEGGMSVTQCSKEDGRSSSGPPHETAAPKRTYDMMEGRVGRAISSASIEGLMGRAIPPERHSPHHLKEQHHIRGSITQGIPRSYVEAQEDYLRREAKLLKREGTPPPPPPSRDLTEAYKTQALGPLKLKPAHEGLVATVKEAGRSIHEIPREELRHTPELPLAPRPLKEGSITQGTPLKYDTGASTTGSKKHDVRSLIGSPGRTFPPVHPLDVMADARALERACYEESLKSRPGTASSSGGSIARGAPVIVPELGKPRQSPLTYEDHGAPFAGHLPRGSPVTTREPTPRLQEGSLSSSKASQDRKLTSTPREIAKSPHSTVPEHHPHPISPYEHLLRGVSGVDLYRSHIPLAFDPTSIPRGIPLDAAAAYYLPRHLAPNPTYPHLYPPYLIRGYPDTAALENRQTIINDYITSQQMHHNAATAMAQRADMLRGLSPRESSLALNYAAGPRGIIDLSQVPHLPVLVPPTPGTPATAMDRLAYLPTAPQPFSSRHSSSPLSPGGPTHLTKPTTTSSSERERDRDRERDRDREREKSILTSTTTVEHAPIWRPGTEQSSGSSGGGGGSSSRPASHSHAHQHSPISPRTQDALQQRPSVLHNTGMKGIITAVEPSTPTVLRSTSTSSPVRPAATFPPATHCPLGGTLDGVYPTLMEPVLLPKEAPRVARPERPRADTGHAFLAKPPARSGLEPASSPSKGSEPRPLVPPVSGHATIARTPAKNLAPHHASPDPPAPPASASDPHREKTQSKPFSIQELELRSLGYHGSSYSPEGVEPVSPVSSPSLTHDKGLPKHLEELDKSHLEGELRPKQPGPVKLGGEAAHLPHLRPLPESQPSSSPLLQTAPGVKGHQRVVTLAQHISEVITQDYTRHHPQQLSAPLPAPLYSFPGASCPVLDLRRPPSDLYLPPPDHGAPARGSPHSEGGKRSPEPNKTSVLGGGEDGIEPVSPPEGMTEPGHSRSAVYPLLYRDGEQTEPSRMGSKSPGNTSQPPAFFSKLTESNSAMVKSKKQEINKKLNTHNRNEPEYNISQPGTEIFNMPAITGTGLMTYRSQAVQEHASTNMGLEAIIRKALMGKYDQWEESPPLSANAFNPLNASASLPAAMPITAADGRSDHTLTSPGGGGKAKVSGRPSSRKAKSPAPGLASGDRPPSVSSVHSEGDCNRRTPLTNRVWEDRPSSAGSTPFPYNPLIMRLQAGVMASPPPPGLPAGSGPLAGPHHAWDEEPKPLLCSQYETLSDSE

SEQ ID NO: 56138 - protein, 606 aa, Homo sapiens
LQSGATHCPLGGTLDGVYPTLMEPVLLPKEAPRVARPERPRADTGHAFLAKPPARSGLEPASSPSKGSEPRPLVPPVSGHATIARTPAKNLAPHHASPDPPAPPASASDPHREKTQSKPFSIQELELRSLGYHGSSYSPEGVEPVSPVSSPSLTHDKGLPKHLEELDKSHLEGELRPKQPGPVKLGGEAAHLPHLRPLPESQPSSSPLLQTAPGVKGHQRVVTLAQHISEVITQDYTRHHPQQLSAPLPAPLYSFPGASCPVLDLRRPPSDLYLPPPDHGAPARGSPHSEGGKRSPEPNKTSVLGGGEDGIEPVSPPEGMTEPGHSRSAVYPLLYRDGEQTEPSRMGSKSPGNTSQPPAFFSKLTESNSAMVKSKKQEINKKLNTHNRNEPEYNISQPGTEIFNMPAITGTGLMTYRSQAVQEHASTNMGLEAIIRKALMGKYDQWEESPPLSANAFNPLNASASLPAAMPITAADGRSDHTLTSPGGGGKAKVSGRPSSRKAKSPAPGLASGDRPPSVSSVHSEGDCNRRTPLTNRVWEDRPSSAGSTPFPYNPLIMRLQAGVMASPPPPGLPAGSGPLAGPHHAWDEEPKPLLCSQYETLSDSE

SEQ ID NO: 56139 - protein, 241 aa, Homo sapiens
MFYSGLLTEGGRKETDMREAASLRQQRRMKQAVQFIHKDSADLLPLDGLKKLGSSKDMQPHNILQRRLMETNLSKLRSGPRVPWASKTNKLNQAKSEGLKKSEEDDMILVSCQCAGKDVKALVDTGCLYNLISLACVDRLGLKEHVKSHKHEGEKLSLPRHLKVVGQIEHLVITLGSLRLDCPAAVVDDNEKNLSLGLQTLRSLKCIINLDKHRLIMGKTDKEEIPFVETVSLNEDNTSEA

SEQ ID NO: 56140 - protein, 257 aa, Homo sapiens
MSTSQPGACPCQGAASRPAILYALLSSSLKAVPRPRSRCLCRQHRPVQLCAPHRTCREALDVLAKTVAFLRNLPSFWQLPPQDQRRLLQGCWGPLFLLGLAQDAVTFEVAEAPVPSILKKILLEEPSSSGGSGQLPDRPQPSLAAVQWLQCCLESFWSLELSPKEYACLKGTILFNPDVPGLQAASHIGHLQQEAHWVLCEVLEPWCPAAQGRLTRVLLTASTLKSIPTSLLGDLFFRPIIGDVDIAGLLGDMLLLR

SEQ ID NO: 56141 - protein, 614 aa, Homo sapiens
MTTLDSNNNTGGVITYIGSSGSSPSRTSPESLYSDNSNGSFQSLTQGCPTYFPPSPTGSLTQDPARSFGSIPPSLSDDGSPSSSSSSSSSSSSFYNGSPPGSLQVAMEDSSRVSPSKSTSNITKLNGMVLLCKVCGDVASGFHYGVHACEGCKGFFRRSIQQNIQYKRCLKNENCSIVRINRNRCQQCRFKKCLSVGMSRDAVRFGRIPKREKQRMLAEMQSAMNLANNQLSSQCPLETSPTQHPTPGPMGPSPPPAPVPSPLVGFSQFPQQLTPPRSPSPEPTVEDVISQVARAHREIFTYAHDKLGSSPGNFNANHASGSPPATTPHRWENQGCPPAPNDNNTLAAQRHNEALNGLRQAPSSYPPTWPPGPAHHSCHQSNSNGHRLCPTHVYAAPEGKAPANSPRQGNSKNVLLACPMNMYPHGRSGRTVQEIWEDFSMSFTPAVREVVEFAKHIPGFRDLSQHDQVTLLKAGTFEVLMVRFASLFNVKDQTVMFLSRTTYSLQELGAMGMGDLLSAMFDFSEKLNSLALTEEELGLFTAVVLVSADRSGMENSASVEQLQETLLRALRALVLKNRPLETSRFTKLLLKLPDLRTLNNMHSEKLLSFRVDAQ

SEQ ID NO: 56142 - protein, 460 aa, Homo sapiens
MSSPTTSSLDTPLPGNGPPQPGAPSSSPTVKEEGPEPWPGGPDPDVPGTDEASSACSTDWVIPDPEEEPERKRKKGPAPKMLGHELCRVCGDKASGFHYNVLSCEGCKGFFRRSVVRGGARRYACRGGGTCQMDAFMRRKCQQCRLRKCKEAGMREQCVLSEEQIRKKKIRKQQQESQSQSQSPVGPQGSSSSASGPGASPGGSEAGSQGSGEGEGVQLTAAQELMIQQLVAAQLQCNKRSFSDQPKVTPWPLGADPQSRDARQQRFAHFTELAIISVQEIVDFAKQVPGFLQLGREDQIALLKASTIEIMLLETARRYNHETECITFLKDFTYSKDDFHRAGLQVEFINPIFEFSRAMRRLGLDDAEYALLIAINIFSADRPNVQEPGRVEALQQPYVEALLSYTRIKRPQDQLRFPRMLMKLVSLRTLSSVHSEQVFALRLQDKKLPPLLSEIWDVHE

SEQ ID NO: 56143 - protein, 458 aa, Homo sapiens
MSSPTTSSLDTPLPGNGPPQPGAPSSSPTVKEEGPEPWPGGPDPDVPGTDEASSACSTDWVIPDPEEEPERKRKKGPAPKMLGHELCRVCGDKASGFHYNVLSCEGCKGFFRRSVVRGGARRYACRGGGTCQMDAFMRRKCQQCRLRKCKEAGMREQCVLSEEQIRKKKIRKQQQESQSQSQSPVGPQGSSSSASGPGASPGGSEAGSQGSGEGEGVQLTAAQELMIQQLVAAQLQCNKRSFSDQPKVTPWPLGADPQSRDARQQRFAHFTELAIISVQEIVDFAKQVPGFLQLGREDQIALLKASTIEIMLLETARRYNHETECITFLKDFTYSKDDFHRAGLQVEFINPIFEFSRAMRRLGLDDAEYALLIAINIFSADRPNGAGPRGGVAAALRGGAAVLHAHQEAADQLRFPRMLMKLVSLRTLSSVHSEQVFALRLQDKKLPPLLSEIWDVHE

SEQ ID NO: 56144 - protein, 363 aa, Homo sapiens
MSSPTTSSLDTPLPGNGPPQPGAPSSSPTVKEEGPEPWPGGPDPDVPGTDEASSACSTDWGVLSEEQIRKKKIRKQQQESQSQSQSPVGPQGSSSSASGPGASPGGSEAGSQGSGEGEGVQLTAAQELMIQQLVAAQLQCNKRSFSDQPKVTPWPLGADPQSRDARQQRFAHFTELAIISVQEIVDFAKQVPGFLQLGREDQIALLKASTIEIMLLETARRYNHETECITFLKDFTYSKDDFHRAGLQVEFINPIFEFSRAMRRLGLDDAEYALLIAINIFSADRPNVQEPGRVEALQQPYVEALLSYTRIKRPQDQLRFPRMLMKLVSLRTLSSVHSEQVFALRLQDKKLPPLLSEIWDVHE

SEQ ID NO: 56145 - protein, 191 aa, Homo sapiens
MIQQLVAAQLQCNKRSFSDQPKVTLGREDQIALLKASTIEIMLLETARRYNHETECITFLKDFTYSKDDFHRAGLQVEFINPIFEFSRAMRRLGLDDAEYALLIAINIFSADRPNVQEPGRVEALQQPYVEALLSYTRIKRPQDQLRFPRMLMKLVSLRTLSSVHSEQVFALRLQDKKLPPLLSEIWDVHE

SEQ ID NO: 56146 - protein, 473 aa, Homo sapiens
MTVTRTHHFKEGSLRAPAIPLHSAAAELASNHPRGPEANLEVRPKESWNHADFVHCEDTESVPGKPSVNADEEVGGPQICRVCGDKATGYHFNVMTCEGCKGFFRRAMKRNARLRCPFRKGACEITRKTRRQCQACRLRKCLESGMKKEMIMSDEAVEERRALIKRKKSERTGTQPLGVQGLTEEQRMMIRELMDAQMKTFDTTFSHFKNFRLPGVLSSGCELPESLQAPSREEAAKWSQVRKDLCSLKVSLQLRGEDGSVWNYKPPADSGGKEIFSLLPHMADMSTYMFKGIISFAKVISYFRDLPIEDQISLLKGAAFELCQLRFNTVFNAETGTWECGRLSYCLEDTAGGFQQLLLEPMLKFHYMLKKLQLHEEEYVLMQAISLFSPDRPGVLQHRVVDQLQEQFAITLKSYIECNRPQPAHRFLFLKIMAMLTELRSINAQHTQRLLRIQDIHPFATPLMQELFGITGS

SEQ ID NO: 56147 - protein, 434 aa, Homo sapiens
LEVRPKESWNHADFVHCEDTESVPGKPSVNADEEVGGPQICRVCGDKATGYHFNVMTCEGCKGFFRRAMKRNARLRCPFRKGACEITRKTRRQCQACRLRKCLESGMKKEMIMSDEAVEERRALIKRKKSERTGTQPLGVQGLTEEQRMMIRELMDAQMKTFDTTFSHFKNFRLPGVLSSGCELPESLQAPSREEAAKWSQVRKDLCSLKVSLQLRGEDGSVWNYKPPADSGGKEIFSLLPHMADMSTYMFKGIISFAKVISYFRDLPIEDQISLLKGAAFELCQLRFNTVFNAETGTWECGRLSYCLEDTAGGFQQLLLEPMLKFHYMLKKLQLHEEEYVLMQAISLFSPDRPGVLQHRVVDQLQEQFAITLKSYIECNRPQPAHRFLFLKIMAMLTELRSINAQHTQRLLRIQDIHPFATPLMQELFGITGS

SEQ ID NO: 56148 - protein, 397 aa, Homo sapiens
LEVRPKESWNHADFVHCEDTESVPGKPSVNADEEVGGPQICRVCGDKATGYHFNVMTCEGCKGFFRRAMKRNARLRCPFRKGACEITRKTRRQCQACRLRKCLESGMKKEMIMSDEAVEERRALIKRKKSERTGTQPLGVQGLTEEQRMMIRELMDAQMKTFDTTFSHFKNFRVSLQLRGEDGSVWNYKPPADSGGKEIFSLLPHMADMSTYMFKGIISFAKVISYFRDLPIEDQISLLKGAAFELCQLRFNTVFNAETGTWECGRLSYCLEDTAGGFQQLLLEPMLKFHYMLKKLQLHEEEYVLMQAISLFSPDRPGVLQHRVVDQLQEQFAITLKSYIECNRPQPAHRFLFLKIMAMLTELRSINAQHTQRLLRIQDIHPFATPLMQELFGITGS

SEQ ID NO: 56149 - protein, 615 aa, Homo sapiens
MTSPSPRIQIISTDSAVASPQRIQGSEPASGPLSVFTSLNKEKIVTDQQTGQKIQIVTAVDASGSPKQQFILTSPDGAGTGKVILASPETSSAKQLIFTTSDNLVPGRIQIVTDSASVERLLGKTDVQRPQVVEYCVVCGDKASGRHYGAVSCEGCKGFFKRSVRKNLTYSCRSNQDCIINKHHRNRCQFCRLKKCLEMGMKMESVQSERKPFDVQREKPSNCAASTEKIYIRKDLRSPLIATPTFVADKDGARQTGLLDPGMLVNIQQPLIREDGTVLLATDSKAETSQGALGTLANVVTSLANLSESLNNGDTSEIQPEDQSASEITRAFDTLAKALNTTDSSSSPSLADGIDTSGGGSIHVISRDQSTPIIEVEGPLLSDTHVTFKLTMPSPMPEYLNVHYICESASRLLFLSMHWARSIPAFQALGQDCNTSLVRACWNELFTLGLAQCAQVMSLSTILAAIVNHLQNSIQEDKLSGDRIKQVMEHIWKLQEFCNSMAKLDIDGYEYAYLKAIVLFSPDHPGLTSTSQIEKFQEKAQMELQDYVQKTYSEDTYRLARILVRLPALRLMSSNITEELFFTGLIGNVSIDSIIPYILKMETAEYNGQITGASL

SEQ ID NO: 56150 - protein, 596 aa, Homo sapiens
MTSPSPRIQIISTDSAVASPQRIQIVTDQQTGQKIQIVTAVDASGSPKQQFILTSPDGAGTGKVILASPETSSAKQLIFTTSDNLVPGRIQIVTDSASVERLLGKTDVQRPQVVEYCVVCGDKASGRHYGAVSCEGCKGFFKRSVRKNLTYSCRSNQDCIINKHHRNRCQFCRLKKCLEMGMKMESVQSERKPFDVQREKPSNCAASTEKIYIRKDLRSPLIATPTFVADKDGARQTGLLDPGMLVNIQQPLIREDGTVLLATDSKAETSQGALGTLANVVTSLANLSESLNNGDTSEIQPEDQSASEITRAFDTLAKALNTTDSSSSPSLADGIDTSGGGSIHVISRDQSTPIIEVEGPLLSDTHVTFKLTMPSPMPEYLNVHYICESASRLLFLSMHWARSIPAFQALGQDCNTSLVRACWNELFTLGLAQCAQVMSLSTILAAIVNHLQNSIQEDKLSGDRIKQVMEHIWKLQEFCNSMAKLDIDGYEYAYLKAIVLFSPDHPGLTSTSQIEKFQEKAQMELQDYVQKTYSEDTYRLARILVRLPALRLMSSNITEELFFTGLIGNVSIDSIIPYILKMETAEYNGQITGASL

SEQ ID NO: 56151 - protein, 596 aa, Homo sapiens; identical to SEQ ID NO: 56150

SEQ ID NO: 56152 - protein, 596 aa, Homo sapiens; identical to SEQ ID NO: 56150

SEQ ID NO: 56153 - protein, 36 aa, Homo sapiens
MTSPSPRIQIISTDSAVASPQRIQGSEPASGPLSVF

SEQ ID NO: 56154 - protein, 205 aa, Homo sapiens
MTSPSPRIQIISTDSAVASPQRIQGSEPASGPLSVFTSLNKEKIVTDQQTGQKIQIVTAVDASGSPKQQFILTSPDGAGTGKVILASPETSSAKQLIFTTSDNLVPGRIQIVTDSASVERLLGKTDVQRPQVVEYCVVCGDKASGRHYGAVSCEGCKGFFKRSVRKNLTYSCRSNQDCIINKHHRNRCQFCRLKKCLEMGMKMEC

SEQ ID NO: 56155 - protein, 422 aa, Homo sapiens
MFRAGAEGAEKEPSPRPECRADPGPGLGFPLGSGLPWPSLLESPGGRILDIPCKVCGDRSSGKHYGVYACDGCSGFFKRSIRRNRTYVCKSGNQGGCPVDKTHRNQCRACRLKKCLEVNMNKDAVQHERGPRTSTIRKQVALYFRGHKEENGAAAHFPSAALPAPAFFTAVTQLEPHGLELAAVSTTPERQTLVSLAQPTPKYPHEVNGTPMYLYEVATESVCESAARLLFMSIKWAKSVPAFSTLSLQDQLMLLEDAWRELFVLGIAQWAIPVDANTLLAVSGMNGDNTDSQKLNKIISEIQALQEVVARFRQLRLDATEFACLKCIVTFKAVPTHSGSELRSFRNAAAIAALQDEAQLTLNSYIHTRYPTQPCRFGKLLLLLPALRSISPSTIEEVFFKKTIGNVPITRLLSDMYKSSDI

SEQ ID NO: 56156 - protein, 385 aa, Homo sapiens
MSKPAGSTSRILDIPCKVCGDRSSGKHYGVYACDGCSGFFKRSIRRNRTYVCKSGNQGGCPVDKTHRNQCRACRLKKCLEVNMNKDAVQHERGPRTSTIRKQVALYFRGHKEENGAAAHFPSAALPAPAFFTAVTQLEPHGLELAAVSTTPERQTLVSLAQPTPKYPHEVNGTPMYLYEVATESVCESAARLLFMSIKWAKSVPAFSTLSLQDQLMLLEDAWRELFVLGIAQWAIPVDANTLLAVSGMNGDNTDSQKLNKIISEIQALQEVVARFRQLRLDATEFACLKCIVTFKAVPTHSGSELRSFRNAAAIAALQDEAQLTLNSYIHTRYPTQPCRFGKLLLLLPALRSISPSTIEEVFFKKTIGNVPITRLLSDMYKSSDI

SEQ ID NO: 56157 - protein, 46 aa, Homo sapiens
MNKDAVQHERGPRTSTIRKQVALYFRGHKEENGAAAHFPSAALPAP

SEQ ID NO: 56158 - protein, 423 aa, Homo sapiens
MAMVVSSWRDPQDDVAGGNPGGPNPAAQAARGGGGGAGEQQQQAGSGAPHTPQTPGQPGAPATPGTAGDKGQGPPGSGQSQQHIECVVCGDKSSGKHYGQFTCEGCKSFFKRSVRRNLTYTCRANRNCPIDQHHRNQCQYCRLKKCLKVGMRREAVQRGRMPPTQPNPGQYALTNGDPLNGHCYLSGYISLLLRAEPYPTSRYGSQCMQPNNIMGIENICELAARLLFSAVEWARNIPFFPDLQITDQVSLLRLTWSELFVLNAAQCSMPLHVAPLLAAAGLHASPMSADRVVAFMDHIRIFQEQVEKLKALHVDSAEYSCLKAIVLFTSDACGLSDAAHIESLQEKSQCALEEYVRSQYPNQPSRFGKLLLRLPSLRTVSSSVIEQLFFVRLVGKTPIETLIRDMLLSGSSFNWPYMSIQCS

SEQ ID NO: 56159 - protein, 414 aa, Homo sapiens
MAMVVSTWRDPQDEVPGSQGSQASQAPPVPGPPPGAPHTPQTPGQGGPASTPAQTAAGGQGGPGGPGSDKQQQQQHIECVVCGDKSSGKHYGQFTCEGCKSFFKRSVRRNLSYTCRANRNCPIDQHHRNQCQYCRLKKCLKVGMRREAVQRGRMPPTQPTHGQFALTNGDPLNCHSYLSGYISLLLRAEPYPTSRFGSQCMQPNNIMGIENICELAARMLFSAVEWARNIPFFPDLQITDQVALLRLTWSELFVLNAAQCSMPLHVAPLLAAAGLHASPMSADRVVAFMDHIRIFQEQVEKLKALHVDSAEYSCLKAIVLFTSDACGLSDVAHVESLQEKSQCALEEYVRSQYPNQPTRFGKLLLRLPSLRTVSSSVIEQLFFVRLVGKTPIETLIRDMLLSGSSFNWPYMAIQ

SEQ ID NO: 56160 - protein, 261 aa, Homo sapiens
MPPTQPTHGQFALTNGDPLNCHSYLSGYISLLLRAEPYPTSRFGSQCMQPNNIMGIENICELAARMLFSAVEWARNIPFFPDLQITDQVALLRLTWSELFVLNAAQCSMPLHVAPLLAAAGLHASPMSADRVVAFMDHIRIFQEQVEKLKALHVDSAEYSCLKAIVLFTSDACGLSDVAHVESLQEKSQCALEEYVRSQYPNQPTRFGKLLLRLPSLRTVSSSVIEQLFFVRLVGKTPIETLIRDMLLSGSSFNWPYMAIQ

SEQ ID NO: 56161 - protein, 281 aa, Homo sapiens
MQAVWDLEQGKYGFAVQRGRMPPTQPTHGQFALTNGDPLNCHSYLSGYISLLLRAEPYPTSRFGSQCMQPNNIMGIENICELAARMLFSAVEWARNIPFFPDLQITDQVALLRLTWSELFVLNAAQCSMPLHVAPLLAAAGLHASPMSADRVVAFMDHIRIFQEQVEKLKALHVDSAEYSCLKAIVLFTSDACGLSDVAHVESLQEKSQCALEEYVRSQYPNQPTRFGKLLLRLPSLRTVSSSVIEQLFFVRLVGKTPIETLIRDMLLSGSSFNWPYMAIQ

SEQ ID NO: 56162 - protein, 261 aa, Homo sapiens; identical to SEQ ID NO: 56160

SEQ ID NO: 56163 - protein, 404 aa, Homo sapiens
MAMVTGGWGGPGGDTNGVDKAGGYPRAAEDDSASPPGAASDAEPGDEERPGLQVDCVVCGDKSSGKHYGVFTCEGCKSFFKRSIRRNLSYTCRSNRDCQIDQHHRNQCQYCRLKKCFRVGMRKEAVQRGRIPHSLPGAVAASSGSPPGSALAAVASGGDLFPGQPVSELIAQLLRAEPYPAAAGRFGAGGGAAGAVLGIDNVCELAARLLFSTVEWARHAPFFPELPVADQVALLRLSWSELFVLNAAQAALPLHTAPLLAAAGLHAAPMAAERAVAFMDQVRAFQEQVDKLGRLQVDSAEYGCLKAIALFTPDACGLSDPAHVESLQEKAQVALTEYVRAQYPSQPQRFGRLLLRLPALRAVPASLISQLFFMRLVGKTPIETLIRDMLLSGSTFNWPYGSGQ

SEQ ID NO: 56164 - protein, 377 aa, Homo sapiens
MAMVTGGWGGPGGDAEPGDEERPGLQVDCVVCGDKSSGKHYGVFTCEGCKSFFKRSIRRNLSYTCRSNRDCQIDQHHRNQCQYCRLKKCFRVGMRKEAVQRGRIPHSLPGAVAASSGSPPGSALAAVASGGDLFPGQPVSELIAQLLRAEPYPAAAGRFGAGGGAAGAVLGIDNVCELAARLLFSTVEWARHAPFFPELPVADQVALLRLSWSELFVLNAAQAALPLHTAPLLAAAGLHAAPMAAERAVAFMDQVRAFQEQVDKLGRLQVDSAEYGCLKAIALFTPDACGLSDPAHVESLQEKAQVALTEYVRAQYPSQPQRFGRLLLRLPALRAVPASLISQLFFMRLVGKTPIETLIRDMLLSGSTFNWPYGSGQ

SEQ ID NO: 56165 - protein, 706 aa, Homo sapiens
METKGYHSLPEGLDMERRWGQVSQAVERSSLGPTERTDENNYMEIVNVSCVSGAIPNNSTQGSSKEKQELLPCLQQDNNRPGILTSDIKTELESKELSATVAESMGLYMDSVRDADYSYEQQNQQGSMSPAKIYQNVEQLVKFYKGNGHRPSTLSCVNTPLRSFMSDSGSSVNGGVMRAVVKSPIMCHEKSPSVCSPLNMTSSVCSPAGINSVSSTTASFGSFPVHSPITQGTPLTCSPNVENRGSRSHSPAHASNVGSPLSSPLSSMKSSISSPPSHCSVKSPVSSPNNVTLRSSVSSPANINNSRCSVSSPSNTNNRSTLSSPAASTVGSICSPVNNAFSYTASGTSAGSSTLRDVVPSPDTQEKGAQEVPFPKTEEVESAISNGVTGQLNIVQYIKPEPDGAFSSSCLGGNSKINSDSSFSVPIKQESTKHSCSGTSFKGNPTVNPFPFMDGSYFSFMDDKDYYSLSGILGPPVPGFDGNCEGSGFPVGIKQEPDDGSYYPEASIPSSAIVGVNSGGQSFHYRIGAQGTISLSRSARDQSFQHLSSFPPVNTLVESWKSHGDLSSRRSDGYPVLEYIPENVSSSTLRSVSTGSSRPSKICLVCGDEASGCHYGVVTCGSCKVFFKRAVEGQHNYLCAGRNDCIIDKIRRKNCPACRLQKCLQAGMNLGERRCISLPCMNYARGCTKSAFSSFDCSSPLKNTPS

SEQ ID NO: 56166 - protein, 984 aa, Homo sapiens
METKGYHSLPEGLDMERRWGQVSQAVERSSLGPTERTDENNYMEIVNVSCVSGAIPNNSTQGSSKEKQELLPCLQQDNNRPGILTSDIKTELESKELSATVAESMGLYMDSVRDADYSYEQQNQQGSMSPAKIYQNVEQLVKFYKGNGHRPSTLSCVNTPLRSFMSDSGSSVNGGVMRAVVKSPIMCHEKSPSVCSPLNMTSSVCSPAGINSVSSTTASFGSFPVHSPITQGTPLTCSPNVENRGSRSHSPAHASNVGSPLSSPLSSMKSSISSPPSHCSVKSPVSSPNNVTLRSSVSSPANINNSRCSVSSPSNTNNRSTLSSPAASTVGSICSPVNNAFSYTASGTSAGSSTLRDVVPSPDTQEKGAQEVPFPKTEEVESAISNGVTGQLNIVQYIKPEPDGAFSSSCLGGNSKINSDSSFSVPIKQESTKHSCSGTSFKGNPTVNPFPFMDGSYFSFMDDKDYYSLSGILGPPVPGFDGNCEGSGFPVGIKQEPDDGSYYPEASIPSSAIVGVNSGGQSFHYRIGAQGTISLSRSARDQSFQHLSSFPPVNTLVESWKSHGDLSSRRSDGYPVLEYIPENVSSSTLRSVSTGSSRPSKICLVCGDEASGCHYGVVTCGSCKVFFKRAVEGQHNYLCAGRNDCIIDKIRRKNCPACRLQKCLQAGMNLGARKSKKLGKLKGIHEEQPQQQQPPPPPPPPQSPEEGTTYIAPAKEPSVNTALVPQLSTISRALTPSPVMVLENIEPEIVYAGYDSSKPDTAENLLSTLNRLAGKQMIQVVKWAKVLPGFKNLPLEDQITLIQYSWMCLSSFALSWRSYKHTNSQFLYFAPDLVFNEEKMHQSAMYELCQGMHQISLQFVRLQLTFEEYTIMKVLLLLSTIPKDGLKSQAAFEEMRTNYIKELRKMVTKCPNNSGQSWQRFYQLTKLLDSMHDLVSDLLEFCFYTFRESHALKVEFPAMLVEIISDQLPKVESGNAKPLYFHRK

SEQ ID NO: 56167 - protein, 988 aa, Homo sapiens
METKGYHSLPEGLDMERRWGQVSQAVERSSLGPTERTDENNYMEIVNVSCVSGAIPNNSTQGSSKEKQELLPCLQQDNNRPGILTSDIKTELESKELSATVAESMGLYMDSVRDADYSYEQQNQQGSMSPAKIYQNVEQLVKFYKGNGHRPSTLSCVNTPLRSFMSDSGSSVNGGVMRAVVKSPIMCHEKSPSVCSPLNMTSSVCSPAGINSVSSTTASFGSFPVHSPITQGTPLTCSPNVENRGSRSHSPAHASNVGSPLSSPLSSMKSSISSPPSHCSVKSPVSSPNNVTLRSSVSSPANINNSRCSVSSPSNTNNRSTLSSPAASTVGSICSPVNNAFSYTASGTSAGSSTLRDVVPSPDTQEKGAQEVPFPKTEEVESAISNGVTGQLNIVQYIKPEPDGAFSSSCLGGNSKINSDSSFSVPIKQESTKHSCSGTSFKGNPTVNPFPFMDGSYFSFMDDKDYYSLSGILGPPVPGFDGNCEGSGFPVGIKQEPDDGSYYPEASIPSSAIVGVNSGGQSFHYRIGAQGTISLSRSARDQSFQHLSSFPPVNTLVESWKSHGDLSSRRSDGYPVLEYIPENVSSSTLRSVSTGSSRPSKICLVCGDEASGCHYGVVTCGSCKVFFKRAVEGKCSWQHNYLCAGRNDCIIDKIRRKNCPACRLQKCLQAGMNLGARKSKKLGKLKGIHEEQPQQQQPPPPPPPPQSPEEGTTYIAPAKEPSVNTALVPQLSTISRALTPSPVMVLENIEPEIVYAGYDSSKPDTAENLLSTLNRLAGKQMIQVVKWAKVLPGFKNLPLEDQITLIQYSWMCLSSFALSWRSYKHTNSQFLYFAPDLVFNEEKMHQSAMYELCQGMHQISLQFVRLQLTFEEYTIMKVLLLLSTIPKDGLKSQAAFEEMRTNYIKELRKMVTKCPNNSGQSWQRFYQLTKLLDSMHDLVSDLLEFCFYTFRESHALKVEFPAMLVEIISDQLPKVESGNAKPLYFHRK

SEQ ID NO: 56168 - protein, 984 aa, Homo sapiens; identical to SEQ ID NO: 56166

SEQ ID NO: 56169 - protein, 988 aa, Homo sapiens; identical to SEQ ID NO: 56167

SEQ ID NO: 56170 - protein, 867 aa, Homo sapiens
METKGYHSLPEGLDMERRWGQVSQAVERSSLGPTERTDENNYMEIVNVSCVSGAIPNNSTQGSSKEKQELLPCLQQDNNRPGILTSDIKTELESKELSATVAESMGLYMDSVRDADYSYEQQNQQGSMSPAKIYQNVEQLVKFYKGNGHRPSTLSCVNTPLRSFMSDSGSSVNGGVMRAVVKSPIMCHEKSPSVCSPLNMTSSVCSPAGINSVSSTTASFGSFPVHSPITQGTPLTCSPNVENRGSRSHSPAHASNVGSPLSSPLSSMKSSISSPPSHCSVKSPVSSPNNVTLRSSVSSPANINNSRCSVSSPSNTNNRSTLSSPAASTVGSICSPVNNAFSYTASGTSAGSSTLRDVVPSPDTQEKGAQEVPFPKTEEVESAISNGVTGQLNIVQYIKPEPDGAFSSSCLGGNSKINSDSSFSVPIKQESTKHSCSGTSFKGNPTVNPFPFMDGSYFSFMDDKDYYSLSGILGPPVPGFDGNCEGSGFPVGIKQEPDDGSYYPEASIPSSAIVGVNSGGQSFHYRIGAQGTISLSRSARDQSFQHLSSFPPVNTLVESWKSHGDLSSRRSDGYPVLEYIPENVSSSTLRSVSTGSSRPSKICLVCGDEASGCHYGVVTCGSCKVFFKRAVEGQHNYLCAGRNDCIIDKIRRKNCPACRLQKCLQAGMNLGGFKNLPLEDQITLIQYSWMCLSSFALSWRSYKHTNSQFLYFAPDLVFNEEKMHQSAMYELCQGMHQISLQFVRLQLTFEEYTIMKVLLLLSTIPKDGLKSQAAFEEMRTNYIKELRKMVTKCPNNSGQSWQRFYQLTKLLDSMHDLVSDLLEFCFYTFRESHALKVEFPAMLVEIISDQLPKVESGNAKPLYFHRK

SEQ ID NO: 56171 - protein, 639 aa, Homo sapiens
METKGYHSLPEGLDMERRWGQVSQAVERSSLGPTERTDENNYMEIVNVSCVSGAIPNNSTQGSSKEKQELLPCLQQDNNRPGILTSDIKTELESKELSATVAESMGLYMDSVRDADYSYEQQNQQGSMSPAKIYQNVEQLVKFYKGNGHRPSTLSCVNTPLRSFMSDSGSSVNGGVMRAVVKSPIMCHEKSPSVCSPLNMTSSVCSPAGINSVSSTTASFGSFPVHSPITQGTPLTCSPNVENRGSRSHSPAHASNVGSPLSSPLSSMKSSISSPPSHCSVKSPVSSPNNVTLRSSVSSPANINNSRCSVSSPSNTNNRSTLSSPAASTVGSICSPVNNAFSYTASGTSAGSSTLRDVVPSPDTQEKGAQEVPFPKTEEVESAISNGVTGQLNIVQYIKPEPDGAFSSSCLGGNSKINSDSSFSVPIKQESTKHSCSGTSFKGNPTVNPFPFMDGSYFSFMDDKDYYSLSGILGPPVPGFDGNCEGSGFPVGIKQEPDDGSYYPEASIPSSAIVGVNSGGQSFHYRIGAQGTISLSRSARDQSFQHLSSFPPVNTLVESWKSHGDLSSRRSDGYPVLEYIPENVSSSTLRSVSTGSSRPSKKNIYRFLLCNNRTRGVGQQLPLSPRSSTVFCITGIHTR

SEQ ID NO: 56172 - protein, 598 aa, Homo sapiens
MPCIQAQYGTPAPSPGPRDHLASDPLTPEFIKPTMDLASPEAAPAAPTALPSFSTFMDGYTGEFDTFLYQLPGTVQPCSSASSSASSTSSSSATSPASASFKFEDFQVYGCYPGPLSGPVDEALSSSGSDYYGSPCSAPSPSTPSFQPPQLSPWDGSFGHFSPSQTYEGLRAWTEQLPKASGPPQPPAFFSFSPPTGPSPSLAQSPLKLFPSQATHQLGEGESYSMPTAFPGLAPTSPHLEGSGILDTPVTSTKARSGAPGGSEGRCAVCGDNASCQHYGVRTCEGCKGFFKRTVQKNAKYICLANKDCPVDKRRRNRCQFCRFQKCLAVGMVKEVVRTDSLKGRRGRLPSKPKQPPDASPANLLTSLVRAHLDSGPSTAKLDYSKFQELVLPHFGKEDAGDVQQFYDLLSGSLEVIRKWAEKIPGFAELSPADQDLLLESAFLELFILRLAYRSKPGEGKLIFCSGLVLHRLQCARGFGDWIDSILAFSRSLHSLLVDVPAFACLSALVLITDRHGLQEPRRVEELQNRIASCLKEHVAAVAGEPQPASCLSRLLGKLPELRTLCTQGLQRIFYLKLEDLVPPPPIIDKIFMDTLPF

SEQ ID NO: 56173 - protein, 611 aa, Homo sapiens
MWLAKACWSIQSEMPCIQAQYGTPAPSPGPRDHLASDPLTPEFIKPTMDLASPEAAPAAPTALPSFSTFMDGYTGEFDTFLYQLPGTVQPCSSASSSASSTSSSSATSPASASFKFEDFQVYGCYPGPLSGPVDEALSSSGSDYYGSPCSAPSPSTPSFQPPQLSPWDGSFGHFSPSQTYEGLRAWTEQLPKASGPPQPPAFFSFSPPTGPSPSLAQSPLKLFPSQATHQLGEGESYSMPTAFPGLAPTSPHLEGSGILDTPVTSTKARSGAPGGSEGRCAVCGDNASCQHYGVRTCEGCKGFFKRTVQKNAKYICLANKDCPVDKRRRNRCQFCRFQKCLAVGMVKEVVRTDSLKGRRGRLPSKPKQPPDASPANLLTSLVRAHLDSGPSTAKLDYSKFQELVLPHFGKEDAGDVQQFYDLLSGSLEVIRKWAEKIPGFAELSPADQDLLLESAFLELFILRLAYRSKPGEGKLIFCSGLVLHRLQCARGFGDWIDSILAFSRSLHSLLVDVPAFACLSALVLITDRHGLQEPRRVEELQNRIASCLKEHVAAVAGEPQPASCLSRLLGKLPELRTLCTQGLQRIFYLKLEDLVPPPPIIDKIFMDTLPF

SEQ ID NO: 56174 - protein, 598 aa, Homo sapiens; identical to SEQ ID NO: 56172

SEQ ID NO: 56175 - protein, 598 aa, Homo sapiens; identical to SEQ ID NO: 56172

SEQ ID NO: 56176 - protein, 652 aa, Homo sapiens
MTSAQYKIKILIEGLHHGQRPGPAPPRQPGSFCWALKADGIMWLAKACWSIQSEMPCIQAQYGTPAPSPGPRDHLASDPLTPEFIKPTMDLASPEAAPAAPTALPSFSTFMDGYTGEFDTFLYQLPGTVQPCSSASSSASSTSSSSATSPASASFKFEDFQVYGCYPGPLSGPVDEALSSSGSDYYGSPCSAPSPSTPSFQPPQLSPWDGSFGHFSPSQTYEGLRAWTEQLPKASGPPQPPAFFSFSPPTGPSPSLAQSPLKLFPSQATHQLGEGESYSMPTAFPGLAPTSPHLEGSGILDTPVTSTKARSGAPGGSEGRCAVCGDNASCQHYGVRTCEGCKGFFKRTVQKNAKYICLANKDCPVDKRRRNRCQFCRFQKCLAVGMVKEVVRTDSLKGRRGRLPSKPKQPPDASPANLLTSLVRAHLDSGPSTAKLDYSKFQELVLPHFGKEDAGDVQQFYDLLSGSLEVIRKWAEKIPGFAELSPADQDLLLESAFLELFILRLAYRSKPGEGKLIFCSGLVLHRLQCARGFGDWIDSILAFSRSLHSLLVDVPAFACLSALVLITDRHGLQEPRRVEELQNRIASCLKEHVAAVAGEPQPASCLSRLLGKLPELRTLCTQGLQRIFYLKLEDLVPPPPIIDKIFMDTLPF

SEQ ID NO: 56177 - protein, 325 aa, Homo sapiens
MPCIQAQYGTPAPSPGPRDHLASDPLTPEFIKPTMDLASPEAAPAAPTALPSFSTFMDGYTGEFDTFLYQLPGTVQPCSSASSSASSTSSSSATSPASASFKFEDFQVYGCYPGPLSGPVDEALSSSGSDYYGSPCSAPSPSTPSFQPPQLSPWDGSFGHFSPSQTYEGLRAWTEQLPKASGPPQPPAFFSFSPPTGPSPSLAQSPLKLFPSQATHQLGEGESYSMPTAFPGLAPTSPHLEGSGILDTPVTSTKARSGAPGGSEGRCAVCGDNASCQHYGVRTCEGCKGFFKVPRSPRWGLLLEMERGWPHPIGTCGLPLGSPPS

SEQ ID NO: 56178 - protein, 611 aa, Homo sapiens; identical to SEQ ID NO: 56173

SEQ ID NO: 56179 - protein, 598 aa, Homo sapiens
MPCVQAQYGSSPQGASPASQSYSYHSSGEYSSDFLTPEFVKFSMDLTNTEITATTSLPSFSTFMDNYSTGYDVKPPCLYQMPLSGQQSSIKVEDIQMHNYQQHSHLPPQSEEMMPHSGSVYYKPSSPPTPTTPGFQVQHSPMWDDPGSLHNFHQNYVATTHMIEQRKTPVSRLSLFSFKQSPPGTPVSSCQMRFDGPLHVPMNPEPAGSHHVVDGQTFAVPNPIRKPASMGFPGLQIGHASQLLDTQVPSPPSRGSPSNEGLCAVCGDNAACQHYGVRTCEGCKGFFKRTVQKNAKYVCLANKNCPVDKRRRNRCQYCRFQKCLAVGMVKEVVRTDSLKGRRGRLPSKPKSPQEPSPPSPPVSLISALVRAHVDSNPAMTSLDYSRFQANPDYQMSGDDTQHIQQFYDLLTGSMEIIRGWAEKIPGFADLPKADQDLLFESAFLELFVLRLAYRSNPVEGKLIFCNGVVLHRLQCVRGFGEWIDSIVEFSSNLQNMNIDISAFSCIAALAMVTERHGLKEPKRVEELQNKIVNCLKDHVTFNNGGLNRPNYLSKLLGKLPELRTLCTQGLQRIFYLKLEDLVPPPAIIDKLFLDTLPF

SEQ ID NO: 56180 - protein, 598 aa, Homo sapiens; identical to SEQ ID NO: 56179

SEQ ID NO: 56181 - protein, 392 aa, Homo sapiens
MDNYSTGYDVKPPCLYQMPLSGQQSSIKVEDIQMHNYQQHSHLPPQSEEMMPHSGSVYYKPSSPPTPTTPGFQVQHSPMWDDPGSLHNFHQNYVATTHMIEQRKTPVSRLSLFSFKQSPPGTPVSSCQMRFDGPLHVPMNPEPAGSHHVVDGQTFAVPNPIRKPASMGFPGLQIGHASQLLDTQVPSPPSRGSPSNEGLCAVCGDNAACQHYGVRTCEGCKGFFKRTVQKNAKYVCLANKNCPVDKRRRNRCQYCRFQKCLAVGMVKEVVRTDSLKGRRGRLPSKPKSPQEPSPPSPPVSLISALVRAHVDSNPAMTSLDYSRFQANPDYQMSGDDTQHIQQFYDLLTGSMEIIRGWAEKIPGFADLPKADQDLLFESAFLELFVLRLAYRI

SEQ ID NO: 56182 - protein, 392 aa, Homo sapiens; identical to SEQ ID NO: 56181

SEQ ID NO: 56183 - protein, 258 aa, Homo sapiens
MPCVQAQYGSSPQGASPASQSYSYHSSGEYSSDFLTPEFVKFSMDLTNTEITATTSLPSFSTFMDNYSTGYDVKPPCLYQMPLSGQQSSIKVEDIQMHNYQQHSHLPPQSEEMMPHSGSVYYKPSSPPTPTTPGFQVQHSPMWDDPGSLHNFHQNYVATTHMIEQRKTPVSRLSLFSFKQSPPGTPVSSCQMRFDGPLHVPMNPEPAGSHHVVDGQTFAVPNPIRKPASMGFPGLQIGHASQLLDTQVPSPPSRGSPS

SEQ ID NO: 56184 - protein, 535 aa, Homo sapiens
MDNYSTGYDVKPPCLYQMPLSGQQSSIKVEDIQMHNYQQHSHLPPQSEEMMPHSGSVYYKPSSPPTPTTPGFQVQHSPMWDDPGSLHNFHQNYVATTHMIEQRKTPVSRLSLFSFKQSPPGTPVSSCQMRFDGPLHVPMNPEPAGSHHVVDGQTFAVPNPIRKPASMGFPGLQIGHASQLLDTQVPSPPSRGSPSNEGLCAVCGDNAACQHYGVRTCEGCKGFFKRTVQKNAKYVCLANKNCPVDKRRRNRCQYCRFQKCLAVGMVKEVVRTDSLKGRRGRLPSKPKSPQEPSPPSPPVSLISALVRAHVDSNPAMTSLDYSRFQANPDYQMSGDDTQHIQQFYDLLTGSMEIIRGWAEKIPGFADLPKADQDLLFESAFLELFVLRLAYRSNPVEGKLIFCNGVVLHRLQCVRGFGEWIDSIVEFSSNLQNMNIDISAFSCIAALAMVTERHGLKEPKRVEELQNKIVNCLKDHVTFNNGGLNRPNYLSKLLGKLPELRTLCTQGLQRIFYLKLEDLVPPPAIIDKLFLDTLPF

SEQ ID NO: 56185 - protein, 609 aa, Homo sapiens
MNEDRRGELLTMPCVQAQYGSSPQGASPASQSYSYHSSGEYSSDFLTPEFVKFSMDLTNTEITATTSLPSFSTFMDNYSTGYDVKPPCLYQMPLSGQQSSIKVEDIQMHNYQQHSHLPPQSEEMMPHSGSVYYKPSSPPTPTTPGFQVQHSPMWDDPGSLHNFHQNYVATTHMIEQRKTPVSRLSLFSFKQSPPGTPVSSCQMRFDGPLHVPMNPEPAGSHHVVDGQTFAVPNPIRKPASMGFPGLQIGHASQLLDTQVPSPPSRGSPSNEGLCAVCGDNAACQHYGVRTCEGCKGFFKRTVQKNAKYVCLANKNCPVDKRRRNRCQYCRFQKCLAVGMVKEVVRTDSLKGRRGRLPSKPKSPQEPSPPSPPVSLISALVRAHVDSNPAMTSLDYSRFQANPDYQMSGDDTQHIQQFYDLLTGSMEIIRGWAEKIPGFADLPKADQDLLFESAFLELFVLRLAYRSNPVEGKLIFCNGVVLHRLQCVRGFGEWIDSIVEFSSNLQNMNIDISAFSCIAALAMVTERHGLKEPKRVEELQNKIVNCLKDHVTFNNGGLNRPNYLSKLLGKLPELRTLCTQGLQRIFYLKLEDLVPPPAIIDKLFLDTLPF

SEQ ID NO: 56186 - protein, 245 aa, Homo sapiens
VEEEGDVSNRGVELLQLEPDEDQVRARILGCLQEPTKSRPDQPAAFGLLCRMADQTFISIVDWARRCMVFKELEVADQMTLLQNCWSELLVFDHIYRQVQHGKEGSILLVTGQEVELTTVATQAGSLLHSLVLRAQELVLQLLALQLDRQEFVCLKFIILFSLDLKFLNNHILVKDAQEKANAALLDYTLCHYPHCGDKFQQLLLCLVEVRALSMQAKEYLYHKHLGNEMPRNNLLIEMLQAKQT

SEQ ID NO: 56187 - protein, 461 aa, Homo sapiens
MDYSYDEDLDELCPVCGDKVSGYHYGLLTCESCKGFFKRTVQNNKHYTCTESQSCKIDKTQRKRCPFCRFQKCLTVGMRLEAVRADRMRGGRNKFGPMYKRDRALKQQKKAQIRANGFKLETGPPMGVPPPPPPAPDYVLPPSLHGPEPKGLAAGPPAGPLGDFGAPALPMAVPGAHGPLAGYLYPAFPGRAIKSEYPEPYASPPQPGLPYGYPEPFSGGPNVPELILQLLQLEPDEDQVRARILGCLQEPTKSRPDQPAAFGLLCRMADQTFISIVDWARRCMVFKELEVADQMTLLQNCWSELLVFDHIYRQVQHGKEGSILLVTGQEVELTTVATQAGSLLHSLVLRAQELVLQLLALQLDRQEFVCLKFIILFSLDLKFLNNHILVKDAQEKANAALLDYTLCHYPHCGDKFQQLLLCLVEVRALSMQAKEYLYHKHLGNEMPRNNLLIEMLQAKQT

SEQ ID NO: 56188 - protein, 178 aa, Homo sapiens
MDYSYDEDLDELCPVCGDKVSGYHYGLLTCESCKGFFKRTVQNNKHYTCTESQSCKIDKTQRKRCPFCRFQKCLTVGMRLEAVRADRMRGGRNKFGPMYKRDRALKQQKKAQIRANGFKLETGPPMGVPPPPPPAPDYVLPPSLHGPEPKGLAAGPPAGPLGDFGAPALPMAVPGAHG

SEQ ID NO: 56189 - protein, 323 aa, Homo sapiens
DLEELCPVCGDKVSGYHYGLLTCESCKGFFKRTVQNNKRYTCIENQNCQIDKTQRKRCPYCRFQKCLSVGMKLEAVRADRMRGGRNKFGPMYKRDRALKQQKKALIRANGLKLEAMSQVIQAMPSDLTISSAIQNIHSASKGLPLNHAALPPTDYDRSPFVTSPISMTMPPHGSLQGYQTYGHFPSRAIKSEYPDPYTSSPESIMGYSYMDSYQTSSPASIPHLILELLKCEPDEPQVQAKIMAYLQQEQANRSKHEKLSTFGLMCKMADQTLFSIVEWARSSIFFRELKGLTLSPSLECSGSWLMATSTSCIQVIRLPQPPE

SEQ ID NO: 56190 - protein, 495 aa, Homo sapiens
MSSNSDTGDLQESLKHGLTPIVSQFKMVNYSYDEDLEELCPVCGDKVSGYHYGLLTCESCKGFFKRTVQNNKRYTCIENQNCQIDKTQRKRCPYCRFQKCLSVGMKLEAVRADRMRGGRNKFGPMYKRDRALKQQKKALIRANGLKLEAMSQVIQAMPSDLTISSAIQNIHSASKGLPLNHAALPPTDYDRSPFVTSPISMTMPPHGSLQGYQTYGHFPSRAIKSEYPDPYTSSPESIMGYSYMDSYQTSSPASIPHLILELLKCEPDEPQVQAKIMAYLQQEQANRSKHEKLSTFGLMCKMADQTLFSIVEWARSSIFFRELKVDDQMKLLQNCWSELLILDHIYRQVVHGKEGSIFLVTGQQVDYSIIASQAGATLNNLMSHAQELVAKLRSLQFDQREFVCLKFLVLFSLDVKNLENFQLVEGVQEQVNAALLDYTMCNYPQQTEKFGQLLLRLPEIRAISMQAEEYLYYKHLNGDVPYNNLLIEMLHAKRA

SEQ ID NO: 56191 - protein, 377 aa, Homo sapiens
  VARIANT 1: note = MOD_RES - Any amino acid
XDLEELCPVCGDKVSGYHYGLLTCESCKGFFKRTVQNNKRYTCIENQNCQIDKTQRKRCPYCRFQKCLSVGMKLEAVRADRMRGGRNKFGPMYKRDRALKQQKKALIRANGLKLEAMSQVIQAMPSDLTISSAIQNIHSASKGLPLNHAALPPTDYDRSPFVTSPISMTMPPHGSLQGYQTYGHFPSRAIKSEYPDPYTSSPESIMGYSYMDSYQTSSPASIPHLILELLKCEPDEPQVQAKIMAYLQQEQANRSKHEKLSTFGLMCKMADQTLFSIVEWARSSIFFRELKGLTLSPSLECSGTILAHGNLHLLHSSDSPASASRVAGITGVHHNTHLIFVFLVEMGFCHVGQAGLKTPDLRVICLPRPPKVLGLWA

SEQ ID NO: 56192 - protein, 541 aa, Homo sapiens
MSSNSDTGDLQESLKHGLTPIGAGLPDRHGSPIPARGRLVMLPKVETEALGLARSHGEQGQMPENMQVSQFKMVNYSYDEDLEELCPVCGDKVSGYHYGLLTCESCKGFFKRTVQNNKRYTCIENQNCQIDKTQRKRCPYCRFQKCLSVGMKLEAVRADRMRGGRNKFGPMYKRDRALKQQKKALIRANGLKLEAMSQVIQAMPSDLTISSAIQNIHSASKGLPLNHAALPPTDYDRSPFVTSPISMTMPPHGSLQGYQTYGHFPSRAIKSEYPDPYTSSPESIMGYSYMDSYQTSSPASIPHLILELLKCEPDEPQVQAKIMAYLQQEQANRSKHEKLSTFGLMCKMADQTLFSIVEWARSSIFFRELKVDDQMKLLQNCWSELLILDHIYRQVVHGKEGSIFLVTGQQVDYSIIASQAGATLNNLMSHAQELVAKLRSLQFDQREFVCLKFLVLFSLDVKNLENFQLVEGVQEQVNAALLDYTMCNYPQQTEKFGQLLLRLPEIRAISMQAEEYLYYKHLNGDVPYNNLLIEMLHAKRA

SEQ ID NO: 56193 - protein, 71 aa, Homo sapiens
  VARIANT 1: note = MOD_RES - Any amino acid
XSLKHGLTPIDRGNCRSGCFSFAATLRQRSLLTSCAGLPDRHGSPIPARGRLVMLPKVETEALGLARSHGE

SEQ ID NO: 56194 - protein, 21 aa, Homo sapiens
MSSNSDTGDLQESLKHGLTPI

SEQ ID NO: 56195 - protein, 82 aa, Homo sapiens
MSSNSDTGDLQESLKHGLTPIDRGNCRSGCFSFAATLRQRSLLTSCAGLPDRHGSPIPARGRLVMLPKVETEALGLARSHGE

SEQ ID NO: 56196 - protein, 469 aa, Homo sapiens
MVNYSYDEDLEELCPVCGDKVSGYHYGLLTCESCKGFFKRTVQNNKRYTCIENQNCQIDKTQRKRCPYCRFQKCLSVGMKLEAVRADRMRGGRNKFGPMYKRDRALKQQKKALIRANGLKLEAMSQVIQAMPSDLTISSAIQNIHSASKGLPLNHAALPPTDYDRSPFVTSPISMTMPPHGSLQGYQTYGHFPSRAIKSEYPDPYTSSPESIMGYSYMDSYQTSSPASIPHLILELLKCEPDEPQVQAKIMAYLQQEQANRSKHEKLSTFGLMCKMADQTLFSIVEWARSSIFFRELKVDDQMKLLQNCWSELLILDHIYRQVVHGKEGSIFLVTGQQVDYSIIASQAGATLNNLMSHAQELVAKLRSLQFDQREFVCLKFLVLFSLDVKNLENFQLVEGVQEQVNAALLDYTMCNYPQQTEKFGQLLLRLPEIRAISMQAEEYLYYKHLNGDVPYNNLLIEMLHAKRA

SEQ ID NO: 56197 - protein, 503 aa, Homo sapiens
MEEHGVTQTEHMATIEAHAVAQQVQQVHVATYTEHSMLSADEDSPSSPEDTSYDDSDILNSTAADEVTAHLAAAGPVGMAAAAAVATGKKRKRPHVFESNPSIRKRQQTRLLRKLRATLDEYTTRVGQQAIVLCISPSKPNPVFKVFGAAPLENVVRKYKSMILEDLESALAEHAPAPQEVNSELPPLTIDGIPVSVDKMTQAQLRAFIPEMLKYSTGRGKPGWGKESCKPIWWPEDIPWANVRSDVRTEEQKQRVSWTQALRTIVKNCYKQHGREDLLYAFEDQQTQTQATATHSIAHLVPSQTVVQTFSNPDGTVSLIQVGTGATVATLADASELPTTVTVAQVNYSAVADGEVEQNWATLQGGEMTIQTTQASEATQAVASLAEAAVAASQEMQQGATVTMALNSEAAAHAVATLAEATLQGGGQIVLSGETAAAVGALTGVQDANGLVQIPVSMYQTVVTSLAQGNGPVQVAMAPVTTRISDSAVTMDGQAVEVVTLEQ

SEQ ID NO: 56198 - protein, 522 aa, Homo sapiens
MEEHGVTQTEHMATIEAHAVAQQVQQVHVATYTEHSMLSADEDSPSSPEDTSYDDSDILNSTAADEVTAHLAAAGPVGMAAAAAVATGKKRKRPHVFESNPSIRKRQQTRLLRKLRATLDEYTTRVGQQAIVLCISPSKPNPVFKVFGAAPLENVVRKYKSMILEDLESALAEHAPAPQEVNSELPPLTIDGIPVSVDKMTQAQLRAFIPEMLKYSTGRGKPGWGKESCKPIWWPEDIPWANVRSDVRTEEQKQRVSWTQALRTIVKNCYKQHGREDLLYAFEDQQTQTQATATHSIAHLVPSQTVVQTFSNPDGTVSLIQVGTGATVATLADASELPTTVTVAQVNYSAVADGEVEQNWATLQGGEMTIQTTQASEATQAVASLAEAAVAASQEMQQGATVTMALNSEAAAHAVATLAEATLQGGGQIVLSGETAAAVGALTGVQDANGLFMADRAGRKWILTDKATGLVQIPVSMYQTVVTSLAQGNGPVQVAMAPVTTRISDSAVTMDGQAVEVVTLEQ

SEQ ID NO: 56199 - protein, 437 aa, Homo sapiens
MEEHGVTQTEHMATIEAHAVAQQVQQVHVATYTEHSMLSADEDSPSSPEDTSYDDSDILNSTAADEVTAHLAAAGPVGMAAAAAVATGKKRKRPHVFESNPSIRKRQQTRLLRKLRATLDEYTTRVGQQAIVLCISPSKPNPVFKVFGAAPLENVVRKYKSMILEDLESALAEHAPAPQEVNSELPPLTIDGIPVSVDKMTQAQLRAFIPEMLKYSTGRGKPGWGKESCKPIWWPEDIPWANVRSDVRTEEQKQRVGTGATVATLADASELPTTVTVAQVNYSAVADGEVEQNWATLQGGEMTIQTTQASEATQAVASLAEAAVAASQEMQQGATVTMALNSEAAAHAVATLAEATLQGGGQIVLSGETAAAVGALTGVQDANGLVQIPVSMYQTVVTSLAQGNGPVQVAMAPVTTRISDSAVTMDGQAVEVVTLEQ

SEQ ID NO: 56200 - protein, 503 aa, Homo sapiens; identical to SEQ ID NO: 56197

SEQ ID NO: 56201 - protein, 522 aa, Homo sapiens; identical to SEQ ID NO: 56198

SEQ ID NO: 56202 - protein, 503 aa, Homo sapiens; identical to SEQ ID NO: 56197

SEQ ID NO: 56203 - protein, 210 aa, Homo sapiens
MEEHGVTQTEHMATIEAHAVAQQVQQVHVATYTEHSMLSADEDSPSSPEDTSYDDSDILNSTAADEVTAHLAAAGPVGMAAAAAVATGKKRKRPHVFESNPSIRKRQQTRLLRKLRATLDEYTTRVGQQAIVLCISPSKPNPVFKVFGAAPLENVVRKYKSMILEDLESALAEHAPAPQEVNSELPPLTIDGIPVSVDKMTQAQLRAFIP

SEQ ID NO: 56204 - protein, 342 aa, Homo sapiens
MILEDLESALAEHAPAPQEVNSELPPLTIDGIPVSVDKMTQAQLRAFIPEMLKYSTGRGKPGWGKESCKPIWWPEDIPWANVRSDVRTEEQKQRVSWTQALRTIVKNCYKQHGREDLLYAFEDQQTQTQATATHSIAHLVPSQTVVQTFSNPDGTVSLIQVGTGATVATLADASELPTTVTVAQVNYSAVADGEVEQNWATLQGGEMTIQTTQASEATQAVASLAEAAVAASQEMQQGATVTMALNSEAAAHAVATLAEATLQGGGQIVLSGETAAAVGALTGVQDANGLVQIPVSMYQTVVTSLAQGNGPVQVAMAPVTTRISDSAVTMDGQAVEVVTLEQ

SEQ ID NO: 56205 - protein, 619 aa, Homo sapiens
MADEGKSYSEHDDERVNFPQRKKKGRGPFRWKYGEGNRRSGRGGSGIRSSRLEEDDGDVAMSDAQDGPRVRYNPYTTRPNRRGDTWHDRDRIHVTVRRDRAPPERGGAGTSQDGTSKNWFKITIPYGRKYDKAWLLSMIQSKCSVPFTPIEFHYENTRAQFFVEDASTASALKAVNYKILDRENRRISIIINSSAPPHTILNELKPEQVEQLKLIMSKRYDGSQQALDLKGLRSDPDLVAQNIDVVLNRRSCMAATLRIIEENIPELLSLNLSNNRLYRLDDMSSIVQKAPNLKILNLSGNELKSERELDKIKGLKLEELWLDGNSLCDTFRDQSTYISAIRERFPKLLRLDGHELPPPIAFDVEAPTTLPPCKGSYFGTENLKSLVLHFLQQYYAIYDSGDRQGLLDAYHDGACCSLSIPFIPQNPARSSLAEYFKDSRNVKKLKDPTLRFRLLKHTRLNVVAFLNELPKTQHDVNSFVVDISAQTSTLLCFSVNGVFKEVDGKSRDSLRAFTRTFIAVPASNSGLCIVNDELFVRNASSEEIQRAFAMPAPTPSSSPVPTLSPEQQEMLQAFSTQSGMNLEWSQKCLQDNNWDYTRSAQAFTHLKAKGEIPEVAFMK

SEQ ID NO: 56206 - protein, 356 aa, Homo sapiens
MADEGKSYSEHDDERVNFPQRKKKGRGPFRWKYGEGNRRSGRGGSGIRSSRLEEDDGDVAMSDAQDGPRVRYNPYTTRPNRRGDTWHDRDRIHVTVRRDRAPPERGGAGTSQDGTSKNWFKITIPYGRKYDKAWLLSMIQSKCSVPFTPIEFHYENTRAQFFVEDASTASALKAVNYKILDRENRRISIIINSSAPPHTILNELKPEQVEQLKLIMSKRYDGSQQALDLKGLRSDPDLVAQNIDVVLNRRSCMAATLRIIEENIPELLSLNLSNNRLYRLDDMSSIVQKAPNLKILNLSGNELKSERELDKIKGLKLEELWLDGNSLCDTFRDQSTYIRSVVACVSPPGDLHPLGG

SEQ ID NO: 56207 - protein, 356 aa, Homo sapiens; identical to SEQ ID NO: 56206

SEQ ID NO: 56208 - protein, 619 aa, Homo sapiens; identical to SEQ ID NO: 56205

SEQ ID NO: 56209 - protein, 626 aa, Homo sapiens
MCSTLKKCGTYRTEVAECHDHGSTFQGRKKGGSSFRDNFDKRSCHYEHGGYERPPSHCQENDGSVEMRDVHKDQQLRHTPYSIRCERRMKWHSEDEIRITTWRNRKPPERKMSQNTQDGYTRNWFKVTIPYGIKYDKAWLMNSIQSHCSDRFTPVDFHYVRNRACFFVQDASAASALKDVSYKIYDDENQKICIFVNHSTAPYSVKNKLKPGQMEMLKLTMNKRYNVSQQALDLQNLRFDPDLMGRDIDIILNRRNCMAATLKIIERNFPELLSLNLCNNKLYQLDGLSDITEKAPKVKTLNLSKNKLESAWELGKVKGLKLEELWLEGNPLCSTFSDQSAYVSAIRDCFPKLLRLDGRELSAPVIVDIDSSETMKPCKENFTGSETLKHLVLQFLQQYYSIYDSGDRQGLLGAYHDEACFSLAIPFDPKDSAPSSLCKYFEDSRNMKTLKDPYLKGELLRRTKRDIVDSLSALPKTQHDLSSILVDVWCQTERMLCFSVNGVFKEVEGQSQGSVLAFTRTFIATPGSSSSLCIVNDELFVRDASPQETQSAFSIPVSTLSSSSEPSLSQEQQEMVQAFSAQSGMKLEWSQKCLQDNEWNYTRAGQAFTMLQTEGKIPAEAFKQIS

SEQ ID NO: 56210 - protein, 626 aa, Homo sapiens; identical to SEQ ID NO: 56209

SEQ ID NO: 56211 - protein, 626 aa, Homo sapiens; identical to SEQ ID NO: 56209

SEQ ID NO: 56212 - protein, 409 aa, Homo sapiens
MKWHSEDEIRITTWRNRKPPERKMSQNTQDGYTRNWFKVTIPYGIKYDKAWLMNSIQSHCSDRFTPVDFHYVRNRACFFVQDASAASALKDVSYKIYDDENQKICIFVNHSTAPYSVKNKLKPGQMEMLKLTMNKRYNVSQQALDLQNLRFDPDLMGRDIDIILNRRNCMAATLKIIERNFPELLSLNLCNNKLYQLDGLSDITEKAPKVKTLNLSKNKLESAWELGKVKGLKLEELWLEGNPLCSTFSDQSAYVSAIRDCFPKLLRLDGRELSAPVIVDIDSSETMKPCKENFTGSETLKHLVLQFLQQYYSIYDSGDRQGLLGAYHDEACFSLAIPFDPKDSAPSSLCKYFEDSRNMKTLKDPYLKGELLRRTKRDIVDSLSALPKTQHDLSSILVDVWCQTVPSGQ

SEQ ID NO: 56213 - protein, 626 aa, Homo sapiens; identical to SEQ ID NO: 56209

SEQ ID NO: 56214 - protein, 531 aa, Homo sapiens
MSLPSGHTTGHTDQVVQRRARCWDIYQRRFSSRSEPVNPGMHSSSHQQQDGDAAMHGAHMDSPVRYTPYTISPYNRKGSFRKQDQTHVNMEREQKPPERRMEGNMPDGTLGSWFKITVPFGIKYNEKWLLNLIQNECSVPFVPVEFHYENMHASFFVENASIAYALKNVSGKIWDEDNEKISIFVNPAGIPHFVHRELKSEKVEQIKLAMNQQCDVSQEALDIQRLPFYPDMVNRDTKMASNPRKCMAASLDVHEENIPTVMSAGEMDKWKGIEPGEKCADRSPVCTTFSDTSSNINSILELFPKLLCLDGQQSPRATLCGTEAHKRLPTCKGSFFGSEMLKNLVLQFLQQYYLIYDSGDRQGLLSAYHDEACFSLSIPFNPEDSAPSSFCKFFKDSRNIKILKDPYLRGELLKHTKLDIVDSLSALPKTQHDLSSFLVDMWYQTEWMLCFSVNGVFKEVEGQSQGSVLAFTRTFIATPGSSSSLCIVNDKLFVRDTSHQGTQSALFTLVPTAFSSSVPAFSQEQQKMLPS

SEQ ID NO: 56215 - protein, 233 aa, Homo sapiens
MEREQKPPERRMEGNMPDGTLGSWFKITVPFGIKYNEKWLLNLIQNECSVPFVPVEFHYENMHASFFVENASIAYALKNVSGKIWDEDNEKISIFVNPAGIPHFVHRELKSEKVEQIKLAMNQQCDVSQEALDIQRLPFYPDMVNRDTKMASNPRKCMAASLDVHEENIPTVMSAGEMDKWKGIEPGEKCADRSPVCTTFSDTSSNIKSVVPSVTTWDPDLCLIAPFCRRRQH

SEQ ID NO: 56216 - protein, 203 aa, Homo sapiens
MASSHPEQLYVVLKPTRGYQPVRYYLIYDSGDRQGLLSAYHDEACFSLSIPFNPEDSAPSSFCKFFKDSRNIKILKDPYLRGELLKHTKLDIVDSLSALPKTQHDLSSFLVDMWYQTEWMLCFSVNGVFKEVEGQSQGSVLAFTRTFIATPGSSSSLCIVNDKLFVRDTSHQGTQSALFTLVPTAFSSSVPAFSQEQQKMLPS

SEQ ID NO: 56217 - protein, 361 aa, Homo sapiens
  VARIANT 1: note = MOD_RES - Any amino acid
XNEKWLLNLIQNECSVPFVPVEFHYENMHASFFVENASIAYALKNVSGKIWDEDNEKISIFVNPAGIPHFVHRELKSEKVEQIKLAMNQQCDVSQEALDIQRLPFYPDMVNRDTKMASNPRKCMAASLDVHEENIPTVMSAGEMDKWKGIEPGEKCADRSPVCTTFSDTSSNINSILELFPKLLCLDGQQSPRATLCGTEAHKRLPTCKGSFFGSEMLKNLVLQFLQQYYLIYDSGDRQGLLSAYHDEACFSLSIPFNPEDSAPSSFCKFFKDSRNIKILKDPYLRGELLKHTKLDIVDSLSALPKTQHDLSSFLVDMWYQTEWMLCFSVNGVFKEVSGFCSRLHPDLHCYPWQQFQSVHR

SEQ ID NO: 56218 - protein, 397 aa, Homo sapiens
MRRNTQDENMRKWFKVTIPYGIKYDKAWLMNSIQSNCSVPFTPVDFHYIRNRACFFVQVASAASALKDVSYKIYDDENQKICIFVSHFTAPYSVKNKLKPGQMEMLKLTMNKRYNVSQQALDLQNLRFDPDLMGRDIDIILNRRNCMAATLKITERNFPELLSLNLCNNKLYQLDGLSDITEKAPKVKTLNLSKNKLESAWELGKVKGLKLEELWLEGNPLCSTFSDQSAYVSAIRDCFPKLLRLDGRELSAPVIVDIDSSETMKPCKENFTGSETLKHLVLQFLQQSNLCKYFKDSRNIKILKDPYLQRKLLKHTKCPRNVDSLSALPETQHDFTSILVDMWYQTVNTCFLPRAGPESQRWWCLLSLKWKDGLRVLILPSCGPSSLPLAAIPVCAS

SEQ ID NO: 56219 - protein, 397 aa, Homo sapiens; identical to SEQ ID NO: 56218

SEQ ID NO: 56220 - protein, 365 aa, Homo sapiens
MRRNTQDENMRKWFKVTIPYGIKYDKAWLMNSIQSNCSVPFTPVDFHYIRNRACFFVQVASAASALKDVSYKIYDDENQKICIFVSHFTAPYSVKNKLKPGQMEMLKLTMNKRYNVSQQALDLQNLRFDPDLMGRDIDIILNRRNCMAATLKITERNFPELLSLNLCNNKLYQLDGLSDITEKAPKVKTLNLSKNKLESAWELGKVKGLKLEELWLEGNPLCSTFSDQSAYVSAIRDCFPKLLRLDGRELSAPVIVDIDSSETMKPCKENFTGSETLKHLVLQFLQQSNLCKYFKDSRNIKILKDPYLQRKLLKHTKCPRNVDSLSALPETQHDFTSILVDMWYQTVNTCFLPRAGPESQSLRPL

SEQ ID NO: 56221 - protein, 365 aa, Homo sapiens; identical to SEQ ID NO: 56220

SEQ ID NO: 56222 - protein, 347 aa, Homo sapiens
MEQYTANSNSSTEQIVVQAGQIQQQQQGGVTAVQLQTEAQVASASGQQVQTLQVVQGQPLMVQVSGGQLITSTGQPIMVQAVPGGQGQTIMQVPVSGTQGLQQIQLVPPGQIQIQGGQAVQVQGQQGQTQQIIIQQPQTAVTAGQTQTQQQIAVQGQQVAQTAEGQTIVYQPVNADGTILQQVTVPVSGMITIPAASLAGAQIVQTGANTNTTSSGQGTVTVTLPVAGNVVNSGGMVMMVPGAGSVPAIQRIPLPGAEMLEEEPLYVNAKQYHRILKRRQARAKLEAEGKIPKERRKYLHESRHRHAMARKRGEGGRFFSPKEKDSPHMQDPNQADEEAMTQIIRVS

SEQ ID NO: 56223 - protein, 318 aa, Homo sapiens
MEQYTANSNSSTEQIVVQAGQIQQQVQGQPLMVQVSGGQLITSTGQPIMVQAVPGGQGQTIMQVPVSGTQGLQQIQLVPPGQIQIQGGQAVQVQGQQGQTQQIIIQQPQTAVTAGQTQTQQQIAVQGQQVAQTAEGQTIVYQPVNADGTILQQVTVPVSGMITIPAASLAGAQIVQTGANTNTTSSGQGTVTVTLPVAGNVVNSGGMVMMVPGAGSVPAIQRIPLPGAEMLEEEPLYVNAKQYHRILKRRQARAKLEAEGKIPKERRKYLHESRHRHAMARKRGEGGRFFSPKEKDSPHMQDPNQADEEAMTQIIRVS

SEQ ID NO: 56224 - protein, 207 aa, Homo sapiens
MTMDGDSSTTDASQLGISADYIGGSHYVIQPHDDTEDSMNDHEDTNGSKESFREQDIYLPIANVARIMKNAIPQTGKIAKDAKECVQECVSEFISFITSEASERCHQEKRKTINGEDILFAMSTLGFDSYVEPLKLYLQKFREAMKGEKGIGGAVTATDGLSEELTEEAFTNQLPAGLITTDGQQQNVMVYTTSYQQISGVQQIQFS

SEQ ID NO: 56225 - protein, 207 aa, Homo sapiens; identical to SEQ ID NO: 56224

SEQ ID NO: 56226 - protein, 458 aa, Homo sapiens
MSTEGGFGGTSSSDAQQSLQSFWPRVMEEIRNLTVKDFRVQELPLARIKKIMKLDEDVKMISAEAPVLFAKAAQIFITELTLRAWIHTEDNKRRTLQRNDIAMAITKFDQFDFLIDIVPRDELKPPKRQEEVRQSVTPAEPVQYYFTLAQQPTAVQVQGQQQGQQTTSSTTTIQPGQIIIAQPQQGQTTPVTMQVGEGQQVQIVQAQPQGQAQQAQSGTGQTMQVMQQIITNTGEIQQIPVQLNAGQLQYIRLAQPVSGTQVVQGQIQTLATNAQQGQRNASQGKPRRCLKETLQITQTEVQQGQQQFSQFTDGQRNSVQQARVSELTGEAEPREVKATGNSTPCTSSLPTTHPPSHRAGASCVCCSQPQQSSTSPPPSDALQWVVVEVSGTPNQLETHRELHAPLPGMTSLSPLHPSQQLYQIQQVTMPAGQDLAQPMFIQSANQPSDGQAPQVTGD

SEQ ID NO: 56227 - protein, 335 aa, Homo sapiens
MSTEGGFGGTSSSDAQQSLQSFWPRVMEEIRNLTVKDFRVQELPLARIKKIMKLDEDVKMISAEAPVLFAKAAQIFITELTLRAWIHTEDNKRRTLQRNDIAMAITKFDQFDFLIDIVPRDELKPPKRQEEVRQSVTPAEPVQYYFTLAQQPTAVQVQGQQQGQQTTSSTTTIQPGQIIIAQPQQGQTTPVTMQVGEGQQVQIVQAQPQGQAQQAQSGTGQTMQVMQQIITNTGEIQQIPVQLNAGQLQYIRLAQPVSGTQVVQGQIQTLATNAQQITQTEVQQGQQQFSQFTDGQQLYQIQQVTMPAGQDLAQPMFIQSANQPSDGQAPQVTGD

SEQ ID NO: 56228 - protein, 439 aa, Homo sapiens
MSTEGGFGGTSSSDAQQSLQSFWPRVMEEIRNLTVKDFRVQELPLARIKKIMKLDEDVKMISAEAPVLFAKAAQIFITELTLRAWIHTEDNKRRTLQRNDIAMAITKFDQFDFLIDIVPRDELKPPKRQEEVRQSVTPAEPVQYYFTLAQQPTAVQVQGQQQGQQTTSSTTTIQPGQIIIAQPQQGQTTPVTMQVGEGQQVQIVQAQPQGQAQQAQSGTGQTMQVMQQIITNTGEIQQIPVQLNAGQLQYIRLAQPVSGTQVVQGQIQTLATNAQQITQTEVQQGQQQFSQFTDGQRNSVQQARVSELTGEAEPREVKATGNSTPCTSSLPTTHPPSHRAGASCVCCSQPQQSSTSPPPSDALQWVVVEVSGTPNQLETHRELHAPLPGMTSLSPLHPSQQLYQIQQVTMPAGQDLAQPMFIQSANQPSDGQAPQVTGD

SEQ ID NO: 56229 - protein, 301 aa, Homo sapiens
MSTEGGFGGTSSSDAQQSLQSFWPRVMEEIRNLTVKDFRVQELPLARIKKIMKLDEDVKMISAEAPVLFAKAAQIFITELTLRAWIHTEDNKRRTLQRNDIAMAITKFDQFDFLIDIVPRDELKPPKRQEEVRQSVTPAEPVQYYFTLAQQPTAVQVQGQQQGQQTTSSTTTIQPGQIIIAQPQQGQTMQVMQQIITNTGEIQQIPVQLNAGQLQYIRLAQPVSGTQVVQGQIQTLATNAQQITQTEVQQGQQQFSQFTDGQQLYQIQQVTMPAGQDLAQPMFIQSANQPSDGQAPQVTGD

SEQ ID NO: 56230 - protein, 335 aa, Homo sapiens; identical to SEQ ID NO: 56227

SEQ ID NO: 56231 - protein, 233 aa, Homo sapiens
MAITKFDQFDFLIDIVPRDELKPPKRQEEVRQSVTPAEPVQYYFTLAQQPTAVQVQGQQQGQQTTSSTTTIQPGQIIIAQPQQGQTTPVTMQVGEGQQVQIVQAQPQGQAQQAQSGTGQTMQVMQQIITNTGEIQQIPVQLNAGQLQYIRLAQPVSGTQVVQGQIQTLATNAQQITQTEVQQGQQQFSQFTDGQQLYQIQQVTMRARTSPSPCSSSQPTSPPTGPPGDRRLRA

SEQ ID NO: 56232 - protein, 201 aa, Homo sapiens
MAITKFDQFDFLIDIVPRDELKPPKRQEEVRQSVTPAEPVQYYFTLAQQPTAVQVQGQQQGQQTTSSTTTIQPGQIIIAQPQQGQTTPVTMQVGEGQQVQIVQAQPQGQAQQAQSGTGQTMQVMQQIITNTGEIQQIPVQLNAGQLQYIRLAQPVSGTQVVQGQIQTQAMETFFAFKRQIYSLWRVGGFIATLFSPRDPGN

SEQ ID NO: 56233 - protein, 313 aa, Homo sapiens
MSTEGGFGGTSSSDAQQSLQSFWPRVMEEIRNLTVKDFRVQELPLARIKKIMKLDEDVKMISAEAPVLFAKAAQIFITELTLRAWIHTEDNKRRTLQRNDIAMAITKFDQFDFLIDIVPRDELKPPKRQEEVRQSVTPAEPVQYYFTLAQQPTAVQVQGQQQGQQTTSSTTTIQPGQIIIAQPQQGQTTPVTMQVGEGQQVQIVQAQPQGQAQQAQSGTGQTMQVMQQIITNTGEIQQIPETGLAVSLRLMKCSGLISAHCSFRLPGSSDSPASASRVAGIIGAAECRPAAVYPLSPACIRHSSCAGTDPDTC

SEQ ID NO: 56234 - protein, 180 aa, Homo sapiens [sequence omitted]

SEQ ID NO: 56235 - protein, 354 aa, Homo sapiens
MSTEGGFGGTSSSDAQQSLQSFWPRVMEEIRNLTVKDFRVQELPLARIKKIMKLDEDVKMISAEAPVLFAKAAQIFITELTLRAWIHTEDNKRRTLQRNDIAMAITKFDQFDFLIDIVPRDELKPPKRQEEVRQSVTPAEPVQYYFTLAQQPTAVQVQGQQQGQQTTSSTTTIQPGQIIIAQPQQGQTTPVTMQVGEGQQVQIVQAQPQGQAQQAQSGTGQTMQVMQQIITNTGEIQQIPVQLNAGQLQYIRLAQPVSGTQVVQGQIQTLATNAQQGQRNASQGKPRRCLKETLQITQTEVQQGQQQFSQFTDGQQLYQIQQVTMPAGQDLAQPMFIQSANQPSDGQAPQVTGD

SEQ ID NO: 56236 - protein, 297 aa, Homo sapiens
MSTEGGFGGTSSSDAQQSLQSFWPRVMEEIRNLTVKDFRVQELPLARIKKIMKLDEDVKRNDIAMAITKFDQFDFLIDIVPRDELKPPKRQEEVRQSVTPAEPVQYYFTLAQQPTAVQVQGQQQGQQTTSSTTTIQPGQIIIAQPQQGQTTPVTMQVGEGQQVQIVQAQPQGQAQQAQSGTGQTMQVMQQIITNTGEIQQIPVQLNAGQLQYIRLAQPVSGTQVVQGQIQTLATNAQQITQTEVQQGQQQFSQFTDGQQLYQIQQVTMPAGQDLAQPMFIQSANQPSDGQAPQVTGD

SEQ ID NO: 56237 - protein, 335 aa, Homo sapiens; identical to SEQ ID NO: 56227

SEQ ID NO: 56238 - protein, 335 aa, Homo sapiens; identical to SEQ ID NO: 56227

SEQ ID NO: 56239 - protein, 129 aa, Homo sapiens
MSTEGGFGGTSSSDAQQSLQSFWPRVMEEIRNLTVKDFRVQELPLARIKKIMKLDEDVKMISAEAPVLFAKAAQIFITELTLRAWIHTEDNKRRTLQRNDIAMAITKFDQFDFLIDIVPRDELKPPKRQ

SEQ ID NO: 56240 - protein, 334 aa, Homo sapiens
MSTEGGFGGTSSSDAQQSLQSFWPRVMEEIRNLTVKDFRVQELPLARIKKIMKLDEDVKMISAEAPVLFAKAAQIFITELTLRAWIHTEDNKRRTLQRNDIAMAITKFDQFDFLIDIVPRDELKPPKRQEEVRQSVTPAEPVQYYFTLAQQPTAVQVQGQQQGQQTTSSTTTIQPGQIIIAQPQQGQTTPVTMQVGEGQQVQIVQAQPQGQAQQAQSGTGQTMQVMQQIITNTGEIQQIPVQLNAGQLQYIRLAQPVSGTQVVQGQIQTLATNAQQITQTEVQQGQQQFSQFTDGQLYQIQQVTMPAGQDLAQPMFIQSANQPSDGQAPQVTGD

SEQ ID NO: 56241 - protein, 141 aa, Homo sapiens
MSTEGGFGGTSSSDAQQSLQSFWPRVMEEIRNLTVKDFRVQELPLARIKKIMKLDEDVKMISAEAPVLFAKAAQIFITELTLRAWIHTEDNKRRTLQRNDIAMAITKFDQFDFLIDIVPRDELKPPKRQEVRQSVTPAEPV

SEQ ID NO: 56242 - protein, 95 aa, Homo sapiens
MSTEGGFGGTSSSDAQQSLQSFWPRVMEEIRNLTVMISAEAPVLFAKAAQIFITELTLRAWIHTEDNKRRTLQRNDIAMAITKFDQFDFLIDIVP

SEQ ID NO: 56243 - protein, 60 aa, Homo sapiens
MSTEGGFGGTSSSDAQQSLQSFWPRVMEEIRNLTVKDFRVQELPLARIKKIMKLDEDVKM

SEQ ID NO: 56244 - protein, 52 aa, Homo sapiens
MSTEGGFGGTSSSDAQQSLQSFWPRVMEEIRNLTVKDFRVQELPLARIKKIM

SEQ ID NO: 56245 - protein, 197 aa, Homo sapiens
MRKYRSHWSQGDREGYQRRSNYYEGPHTSHSSPADRTREEVVTPTLPEHTATRSQMATSLDFKTYVDQACRAAEEFVNIYYETMDKRRRALTRLYLDKATLIWNGNAVSGLDALNNFFDTLPSSEFQVNMLDCQPVHEQATQSQTTVLVVTSGTVKFDGNKQHFFNQNFLLTAQSTPNNTVWKIASDCFRFQDWSSS

SEQ ID NO: 56246 - protein, 114 aa, Homo sapiens
MDKRRRALTRLYLDKATLIWNGNAVSGLDALNNFFDTLPSSEFQVNMLDCQPVHEQATQSQTTVLVVTSGTVKFDGNKQHFFNQNFLLTAQSTPNNTVWKIASDCFRFQDWSSS

SEQ ID NO: 56247 - protein, 142 aa, Homo sapiens
MATSLDFKTYVDQACRAAEEFVNIYYETMDKRRRALTRLYLDKATLIWNGNAVSGLDALNNFFDTLPSSEFQVNMLDCQPVHEQATQSQTTVLVVTSGTVKFDGNKQHFFNQNFLLTAQSTPNNTVWKIASDCFRFQDWSSS

SEQ ID NO: 56248 - protein, 114 aa, Homo sapiens; identical to SEQ ID NO: 56246

SEQ ID NO: 56249 - protein, 293 aa, Homo sapiens
MTGLYELVWRVLHALLCLHRTLTSWLRVRFGTWNWIWRRCCRAASAAVLAPLGFTLRKPPAVGRNRRHHRHPRGGSCLAAAHHRMRWRADGRSLEKLPVHMGLVITEVEQEPSFSDIASLVVWCMAVGISYISVYDHQGIFKRNNSRLMDEILKQQQELLGLDCSKYSPEFANSNDKDDQVLNCHLAVKVLSPEDGKADIVRAAQDFCQLVAQKQKRPTDLDVDTLASLLSSNGCPDPDLVLKFGPVDSTLGFLPWHIRLTEIVSLPSHLNISYEDFFSALRQYAACEQRLGK

SEQ ID NO: 56250 - protein, 856 aa, Homo sapiens
MKPRPAGFVDNKLKQRVIQYLTSNKCGKYVDIGVLASDLQRVYSIDYGRRKRNAFRIQVEKVFSIISSEKELKNLTELEDEHLAKRARQGEEDNEYTESYSDDDSSMEDYPDPQSANHMNSSLLSLYRKGNPDSVSNTPEMEQRETTSSTPRISSKTGSIPLKTPAKDSEGGWFIDKTPSVKKDSFFLDLSCEKSNPKKPITEIQDSKDSSLLESDMKRKGKLKNKGSKRKKEDLQEVDGEIEAVLQKKAKARGLEFQISNVKFEDVGGNDMTLKEVCKMLIHMRHPEVYHHLGVVPPRGVLLHGPPGCGKTLLAHAIAGELDLPILKVAAPEIVSGVSGESEQKLRELFEQAVSNAPCIIFIDEIDAITPKREVASKDMERRIVAQLLTCMDDLNNVAATARVLVIGATNRPDSLDPALRRAGRFDREICLGIPDEASRERILQTLCRKLRLPQAFDFCHLAHLTPGFVGADLMALCREAAMCAVNRVLMKLQEQQKKNPEMEDLPSKGVQEERLGTEPTSETQDELQRLLGLLRDQDPLSEEQMQGLCIELNDFIVALSSVQPSAKREGFVTVPNVTWADIGALEDIREELTMAILAPVRNPDQFKALGLVTPAGVLLAGPPGCGKTLLAKAVANESGLNFISVKGPELLNMYVGESERAVRQVFQRAKNSAPCVIFFDEVDALCPRRSDRETGASVRVVNQLLTEMDGLEARQQVFIMAATNRPDIIDPAILRPGRLDKTLFVGLPPPADRLAILKTITKNGTKPPLDADVNLEAIAGDLRCDCYTGADLSALVREASICALRQEMARQKSGNEKGELKVSHKHFEEAFKKVRSSISKKDQIMYERLQESLSR

SEQ ID NO: 56251 - protein, 667 aa, Homo sapiens
MKRKGKLKNKGSKRKKEDLQEVDGEIEAVLQKKAKARGLEFQISNVKFEDVGGNDMTLKEVCKMLIHMRHPEVYHHLGVVPPRGVLLHGPPGCGKTLLAHAIAGAECSGMITAHCSFDFSGSNDPPASASQELDLPILKVAAPEIVSGVSGESEQKLRELFEQAVSNAPCIIFIDEIDAITPKREVASKDMERRIVAQLLTCMDDLNNVAATARVLVIGATNRPDSLDPALRRAGRFDREICLGIPDEASRERILQTLCRKLRLPQAFDFCHLAHLTPGFVGADLMALCREAAMCAVNRVLMKLQEQQKKNPEMEDLPSKGVQEERLGTEPTSETQDELQRLLGLLRDQDPLSEEQMQGLCIELNDFIVALSSVQPSAKREGFVTVPNVTWADIGALEDIREELTMAILAPVRNPDQFKALGLVTPAGVLLAGPPGCGKTLLAKAVANESGLNFISVKGPELLNMYVGESERAVRQVFQRAKNSAPCVIFFDEVDALCPRRSDRETGASVRVVNQLLTEMDGLEARQQVFIMAATNRPDIIDPAILRPGRLDKTLFVGLPPPADRLAILKTITKNGTKPPLDADVNLEAIAGDLRCDCYTGADLSALVREASICALRQEMARQKSGNEKGELKVSHKHFEEAFKKVRSSISKKDQIMYERLQESLSR

SEQ ID NO: 56252 - protein, 589 aa, Homo sapiens
MEDYPDPQSANHMNSSLLSLYRKGNPDSVSNTPEMEQRETTSSTPRISSKTGSIPLKTPAKDSEGGWFIDKTPSVKKDSFFLDLSCEKSNPKKPITEIQDSKDSSLLESDMKRKGKLKNKGSKRKKEDLQEVDGEIEAVLQKKAKARGLEFQISNVKFEDVGGNDMTLKEVCKMLIHMRHPEVYHHLGVVPPRGVLLHGPPGCGKTLLAHAIAGELDLPILKVAAPEIVSGVSGESEQKLRELFEQAVSNAPCIIFIDEIDAITPKREVASKDMERRIVAQLLTCMDDLNNVAATARVLVIGATNRPDSLDPALRRAGRFDREICLGIPDEASRERILQTLCRKLRLPQAFDFCHLAHLTPGFVGADLMALCREAAMCAVNRVLMKLQEQQKKNPEMEDLPSKGVQEERLGTEPTSETQDELQRLLGLLRDQDPLSEEQMQGLCIELNDFIVALSSVQPSAKREGFVTVPNVTWADIGALEDIREELTMAILAPVRNPDQFKALGLVTPAGVLLAGPPGCGKTLLAKAVANESGLNFISVKGPELLNMYVGESERAVRQVFQRAKNSAPCVIFFDEVDALCPRRSDREI

SEQ ID NO: 56253 - protein, 750 aa, Homo sapiens
MEDYPDPQSANHMNSSLLSLYRKGNPDSVSNTPEMEQRETTSSTPRISSKTGSIPLKTPAKDSEGGWFIDKTPSVKKDSFFLDLSCEKSNPKKPITEIQDSKDSSLLESDMKRKGKLKNKGSKRKKEDLQEVDGEIEAVLQKKAKARGLEFQISNVKFEDVGGNDMTLKEVCKMLIHMRHPEVYHHLGVVPPRGVLLHGPPGCGKTLLAHAIAGELDLPILKVAAPEIVSGVSGESEQKLRELFEQAVSNAPCIIFIDEIDAITPKREVASKDMERRIVAQLLTCMDDLNNVAATARVLVIGATNRPDSLDPALRRAGRFDREICLGIPDEASRERILQTLCRKLRLPQAFDFCHLAHLTPGFVGADLMALCREAAMCAVNRVLMKLQEQQKKNPEMEDLPSKGVQEERLGTEPTSETQDELQRLLGLLRDQDPLSEEQMQGLCIELNDFIVALSSVQPSAKREGFVTVPNVTWADIGALEDIREELTMAILAPVRNPDQFKALGLVTPAGVLLAGPPGCGKTLLAKAVANESGLNFISVKGPELLNMYVGESERAVRQVFQRAKNSAPCVIFFDEVDALCPRRSDRETGASVRVVNQLLTEMDGLEARQQVFIMAATNRPDIIDPAILRPGRLDKTLFVGLPPPADRLAILKTITKNGTKPPLDADVNLEAIAGDLRCDCYTGADLSALVREASICALRQEMARQKSGNEKGELKVSHKHFEEAFKKVRSSISKKDQIMYERLQESLSR

SEQ ID NO: 56254 - protein, 765 aa, Homo sapiens
MKPRPAGFVDNKLKQRVIQYLTSNKCGKYVDIGVLASDLQRVYSIDYGRRKRNAFRIQVEKVFSIISSEKELKNLTELEDEHLAKRARQGEEDNEYTESYSDDDSSMEDYPDPQDSKDSSLLESDMKRKGKLKNKGSKRKKEDLQEVDGEIEAVLQKKAKARGLEFQISNVKFEDVGGNDMTLKEVCKMLIHMRHPEVYHHLGVVPPRGVLLHGPPGCGKTLLAHAIAGELDLPILKVAAPEIVSGVSGESEQKLRELFEQAVSNAPCIIFIDEIDAITPKREVASKDMERRIVAQLLTCMDDLNNVAATARVLVIGATNRPDSLDPALRRAGRFDREICLGIPDEASRERILQTLCRKLRLPQAFDFCHLAHLTPGFVGADLMALCREAAMCAVNRVLMKLQEQQKKNPEMEDLPSKGVQEERLGTEPTSETQDELQRLLGLLRDQDPLSEEQMQGLCIELNDFIVALSSVQPSAKREGFVTVPNVTWADIGALEDIREELTMAILAPVRNPDQFKALGLVTPAGVLLAGPPGCGKTLLAKAVANESGLNFISVKGPELLNMYVGESERAVRQVFQRAKNSAPCVIFFDEVDALCPRRSDRETGASVRVVNQLLTEMDGLEARQQVFIMAATNRPDIIDPAILRPGRLDKTLFVGLPPPADRLAILKTITKNGTKPPLDADVNLEAIAGDLRCDCYTGADLSALVREASICALRQEMARQKSGNEKGELKVSHKHFEEAFKKVRSSISKKDQIMYERLQESLSR

SEQ ID NO: 56255 - protein, 461 aa, Homo sapiens
MPPSGPRGTLLLLPLLLLLLLRAVLAVPLERGAPNKEETPATESPDTGLYYHRYLQEVIDVLETDGHFREKLQAANAEDIKSGKLSRELDFVSHHVRTKLDELKRQEVSRLRMLLKAKMDAEQDPNVQVDHLNLLKQFEHLDPQNQHTFEARDLELLIQTATRDLAQYDAAHHEEFKRYEMLKEHERRRYLESLGEEQRKEAERKLEEQQRRHREHPKVNVPGSQAQLKEVWEELDGLDPNRFNPKTFFILHDINSDGVLDEQELEALFTKELEKVYDPKNEEDDMREMEEERLRMREHVMKNVDTNQDRLVTLEEFLASTQRKEFGDTGEGWETVEMHPAYTEEELRRFEEELAAREAELNAKAQRLSQETEALGRSQGRLEAQKRELQQAVLHMEQRKQQQQQQQGHKAPAAHPEGQLKFHPDTDDVPVPAPAGDQKEVDTSEKKLLERLPEVEVPQHL

SEQ ID NO: 56256 - protein, 461 aa, Homo sapiens; identical to SEQ ID NO: 56255

SEQ ID NO: 56257 - protein, 461 aa, Homo sapiens; identical to SEQ ID NO: 56255

SEQ ID NO: 56258 - protein, 124 aa, Homo sapiens
MPPSGPRGTLLLLPLLLLLLLRAVLAVPLERGAPNKEETPATESPDTGLYYHRYLQEVIDVLETDGHFREKLQAANAEDIKSGKLSRELDFVSHHVRTKLDELKRQEVSRLRMLLKAKMDAEQD

SEQ ID NO: 56259 - protein, 111 aa, Homo sapiens
MPPSGPRGTLLLLPLLLLLLLRAVLAVPLERGAPNKEETPATESPDTGLYYHRYLQEVIDVLETDGHFREKLQAANAEDIKSGKLSRELDFVSHHVRTKLDELKRQEVSRL

SEQ ID NO: 56260 - protein, 420 aa, Homo sapiens
MRWRTILLQYCFLLITCLLTALEAVPIDIDKTKVQNIHPVESAKIEPPDTGLYYDEYLKQVIDVLETDKHFREKLQKADIEEIKSGRLSKELDLVSHHVRTKLDELKRQEVGRLRMLIKAKLDSLQDIGMDHQALLKQFDHLNHLNPDKFESTDLDMLIKAATSDLEHYDKTRHEEFKKYEMMKEHERREYLKTLNEEKRKEEESKFEEMKKKHENHPKVNHPGSKDQLKEVWEETDGLDPNDFDPKTFFKLHDVNSDGFLDEQELEALFTKELEKVYDPKNEEDDMVEMEEERLRMREHVMSEVDTNKDRLVTLEEFLKATEKKEFLEPDSWETLDQQQFFTEEELKEYENIIALQENELKKKADELQKQKEELQRQHDQLEAQKLEYHQVIQQMEQKKLQQGIPPSGPAGELKFEPRV

SEQ ID NO: 56261 - protein, 390 aa, Homo sapiens
MRWRTILLQYCFLLITCLLTALEAVPIDIDKTKVQNIHPVESAKIEPPDTGLYYDEYLKQVIDVLETDKHFREKLQKADIEEIKSGRLSKELDLVSHHVRTKLDELKRQEVGRLRMLIKAKLDSLQDIGMDHQALLKQFDHLNHLNPDKFESTDLDMLIKAATSDLEHYDKTRHEEFKKYEMMKEHERREYLKTLNEEKRKEEESKFEEMKKKHENHPKVNHPGSKDQLKEVWEETDGLDPNDFDPKTFFKLHDVNSDGFLDEQELEALFTKELEKVYDPKNEEDDMVEMEEERLRMREHVMSETLDQQQFFTEEELKEYENIIALQENELKKKADELQKQKEELQRQHDQLEAQKLEYHQVIQQMEQKKLQQGIPPSGPAGELKFEPHI

SEQ ID NO: 56262 - protein, 69 aa, Homo sapiens
MRWRTILLQYCFLLITCLLTALEAVPIDIDKTKVQNIHPVESAKIEPPDTGLYYDEYLKQVIDVLETDK

SEQ ID NO: 56263 - protein, 34 aa, Homo sapiens
MRWRTILLQYCFLLITCLLTALEAVPIDIDKTKV

SEQ ID NO: 56264 - protein, 420 aa, Homo sapiens
MRWRTILLQYCFLLITCLLTALEAVPIDIDKTKVQNIHPVESAKIEPPDTGLYYDEYLKQVIDVLETDKHFREKLQKADIEEIKSGRLSKELDLVSHHVRTKLDELKRQEVGRLRMLIKAKLDSLQDIGMDHQALLKQFDHLNHLNPDKFESTDLDMLIKAATSDLEHYDKTRHEEFKKYEMMKEHERREYLKTLNEEKRKEEESKFEEMKKKHENHPKVNHPGSKDQLKEVWEETDGLDPNDFDPKTFFKLHDVNSDGFLDEQELEALFTKELEKVYDPKNEEDDMVEMEEERLRMREHVMSEVDTNKDRLVTLEEFLKATEKKEFLEPDSWETLDQQQFFTEEELKEYENIIALQENELKKKADELQKQKEELQRQHDQLEAQKLEYHQVIQQMEQKKLQQGIPPSGPAGELKFEPHI

SEQ ID NO: 56265 - protein, 195 aa, Homo sapiens
MRWRTILLQYCFLLITCLLTALEAVPIDIDKTKVQNIHPVESAKIEPPDTGLYYDEYLKQVIDVLETDKHFREKLQKADIEEIKSGRLSKELDLVSHHVRTKLDELKRQEVGRLRMLIKAKLDSLQDIGMDHQALLKQFDHLNHLNPDKFESTDLDMLIKAATSDLEHYDKTRHEEFKKYEMMKEHERREYLKTL

SEQ ID NO: 56266 - protein, 198 aa, Homo sapiens
MRWRTILLQYCFLLITCLLTALEAVPIDIDKTKVQNIHPVESAKIEPPDTGLYYDEYLKQVIDVLETDKHFREKLQKADIEEIKSGRLSKELDLVSHHVRTKLDELKRQEVGRLRMLIKAKLDSLQDIGMDHQALLKQFDHLNHLNPDKFESTDLDMLIKAATSDLEHYDKTRHEEFKKYEMMKEHERREYLKTLNEE

SEQ ID NO: 56267 - protein, 34 aa, Homo sapiens; identical to SEQ ID NO: 56263

SEQ ID NO: 56268 - protein, 39 aa, Homo sapiens
MRWRTILLQYCFLLITCLLTALEAVPIDIDKTKVQNIHP

SEQ ID NO: 56269 - protein, 69 aa, Homo sapiens; identical to SEQ ID NO: 56262

SEQ ID NO: 56270 - protein, 90 aa, Homo sapiens
MRWRTILLQYCFLLITCLLTALEAVPIDIDKTKVQNIHPVESAKIEPPDTGLYYDEYLKQVIDVLETDKHFREKLQKADIEEIKSGRLSK

SEQ ID NO: 56271 - protein, 440 aa, Homo sapiens
MIIPSLEELDSLKYSDLQNLAKSLGLRANLRATKLLKALKGYIKHEARKGNENQDESQTSASSCDETEIQISNQEEAERQPLGHVTKTRRRCKTVRVDPDSQQNHSEIKISNPTEFQNHEKQESQDLRATAKVPSPPDEHQEAENAVSSGNRDSKVPSEGKKSLYTDESSKPGKNKRTAITTPNFKKLHEAHFKEMESIDQYIERKKKHFEEHNSMNELKQPINKGGVRTPVPPRGRLSVASTPISQRRSQGRSCGPASQSTLGLKGSLKRSAISAAKTGVRFSAATKDNEHKRSLTKTPARKSAHVTVSGGTPKGEAVLGTHKLKTITGNSAAVITPFKLTTEATQTPVSNKKPVFDLKASLSRPLNYEPHKGKLKPWGQSKENNYLNQHVNRINFYKKTYKQPHLQTKEEQRKKREQERKEKKAKVLGMRRGLILAED

SEQ ID NO: 56272 - protein, 402 aa, Homo sapiens
MIIPSLEELDSLKYSDLQNLAKSLGLRANLRATKLLKALKGYIKHEARKGNENQDESQTSASSCDETEIQISNQEEAERQPLGHVTKTRRRCKTVRVDPDSQQNHSEIKISNPTEFQNHEKQESQDLRATAKVPSPPDEHQEAENAVSSGNRDSKVPSEGKKSLYTDESSKPGKNKRTAITTPNFKKLHEAHFKEMESIDQYIERKKKHFEEHNSMNELKQQPINKGGVRTPVPPRGRLSVASTPISQRRSQGRSCGPASQSTLGLKGSLKRSAISAAKTGVRFSAATKDNEHKRSLTKTPARKSAHVTVSGGTPKGEAVLGTHKLKTITGNSAAGKLKPWGQSKENNYLNQHVNRINFYKKTYKQPHLQTKEEQRKKREQERKEKKAKVLGMRRGLILAED

SEQ ID NO: 56273 - protein, 441 aa, Homo sapiens
MIIPSLEELDSLKYSDLQNLAKSLGLRANLRATKLLKALKGYIKHEARKGNENQDESQTSASSCDETEIQISNQEEAERQPLGHVTKTRRRCKTVRVDPDSQQNHSEIKISNPTEFQNHEKQESQDLRATAKVPSPPDEHQEAENAVSSGNRDSKVPSEGKKSLYTDESSKPGKNKRTAITTPNFKKLHEAHFKEMESIDQYIERKKKHFEEHNSMNELKQQPINKGGVRTPVPPRGRLSVASTPISQRRSQGRSCGPASQSTLGLKGSLKRSAISAAKTGVRFSAATKDNEHKRSLTKTPARKSAHVTVSGGTPKGEAVLGTHKLKTITGNSAAVITPFKLTTEATQTPVSNKKPVFDLKASLSRPLNYEPHKGKLKPWGQSKENNYLNQHVNRINFYKKTYKQPHLQTKEEQRKKREQERKEKKAKVLGMRRGLILAED

SEQ ID NO: 56274 - protein, 440 aa, Homo sapiens
MIIPSLEELDSLKYSDLQNLAKSLGLRANLRATKLLKALKGYIKHEARKGNENQDESQTSASSCDETEIQISNQEEAERQPLGHVTKTRRRCKTVRVDPDSQNHSEIKISNPTEFQNHEKQESQDLRATAKVPSPPDEHQEAENAVSSGNRDSKVPSEGKKSLYTDESSKPGKNKRTAITTPNFKKLHEAHFKEMESIDQYIERKKKHFEEHNSMNELKQQPINKGGVRTPVPPRGRLSVASTPISQRRSQGRSCGPASQSTLGLKGSLKRSAISAAKTGVRFSAATKDNEHKRSLTKTPARKSAHVTVSGGTPKGEAVLGTHKLKTITGNSAAVITPFKLTTEATQTPVSNKKPVFDLKASLSRPLNYEPHKGKLKPWGQSKENNYLNQHVNRINFYKKTYKQPHLQTKEEQRKKREQERKEKKAKVLGMRRGLILAED

SEQ ID NO: 56275 - protein, 439 aa, Homo sapiens
MIIPSLEELDSLKYSDLQNLAKSLGLRANLRATKLLKALKGYIKHEARKGNENQDESQTSASSCDETEIQISNQEEAERQPLGHVTKTRRRCKTVRVDPDSQNHSEIKISNPTEFQNHEKQESQDLRATAKVPSPPDEHQEAENAVSSGNRDSKVPSEGKKSLYTDESSKPGKNKRTAITTPNFKKLHEAHFKEMESIDQYIERKKKHFEEHNSMNELKQPINKGGVRTPVPPRGRLSVASTPISQRRSQGRSCGPASQSTLGLKGSLKRSAISAAKTGVRFSAATKDNEHKRSLTKTPARKSAHVTVSGGTPKGEAVLGTHKLKTITGNSAAVITPFKLTTEATQTPVSNKKPVFDLKASLSRPLNYEPHKGKLKPWGQSKENNYLNQHVNRINFYKKTYKQPHLQTKEEQRKKREQERKEKKAKVLGMRRGLILAED

SEQ ID NO: 56276 - protein, 426 aa, Homo sapiens
MIIPSLEELDSLKYSDLQNLAKSLGLRANLRATKLLKALKGYIKHEARKGNENQDESQTSASSCDETEIQISNQEEAERQPLGHVTKTRRRCKTVRVDPDSQNHEKQESQDLRATAKVPSPPDEHQEAENAVSSGNRDSKVPSEGKKSLYTDESSKPGKNKRTAITTPNFKKLHEAHFKEMESIDQYIERKKKHFEEHNSMNELKQQPINKGGVRTPVPPRGRLSVASTPISQRRSQGRSCGPASQSTLGLKGSLKRSAISAAKTGVRFSAATKDNEHKRSLTKTPARKSAHVTVSGGTPKGEAVLGTHKLKTITGNSAAVITPFKLTTEATQTPVSNKKPVFDLKASLSRPLNYEPHKGKLKPWGQSKENNYLNQHVNRINFYKKTYKQPHLQTKEEQRKKREQERKEKKAKVLGMRRGLILAED

SEQ ID NO: 56277 - protein, 749 aa, Homo sapiens [sequence omitted]

SEQ ID NO: 56278 - protein, 800 aa, Homo sapiens
MKFRRNKKQIPSFRKLIKTSKVKLENKLKNKQFKQQSTLKKYRKEQRKLRQAVKDAVSKKPIPLENPKEKRPGKRIEREEEEEEEALPLDMMDEDDLQLMKDLGQRVSFLTRDLSSSEPVHAKKRKHERIIDKYEKIPRTLQTAPEKELIHLLPIKDKSGIIPQTREKPVTDSNKDEEDQEEERELEEEIIEDPIQELTIEEHLIERKKKLQEKKMHIAALASAILSDPENNIKKLKELRSMLMEQDPDVAVTVRKLVIVSLMELFKDITPSYKIRPLTEAEKSTKTRKETQKLREFEEGLVSQYKFYLENLEQMVKDWKQRKLKKSNVVSLKAYKGLAEVAVKSLCELLVALPHFNFHNNIIVLIVPLMNDMSKLISEMCCEAVKKLFKQDKLGQASLGVIKVISGFVKGRNYEVRPEMLKTFLCLRIKEVEVKKDTEDINKPKKFMTFKEKRKSLSRMQRKWKKAEEKLERELREAEASESTEKKLKLHTETLNIVFVTYFRILKKAQRSPLLPAVLEGLAKFAHLINVEFFDDLLVVLHTLIESGDLSYQESLHCVQTAFHILSGQGDVLNIDPLKFYTHLYKTLFKLHAGATNEGVEIVLQCLDVMLTKRRKQVSQQRALAFIKRLCTLALHVLPNSSIGILATTRILMHTFPKTDLLLDSESQGSGVFLPELDEPEYCNAQNTALWELHALRRHYHPIVQRFAAHLIAGAPSEGSGALKPELSRRSATELFEAYSMAEMTFNPPVESSNPKIKGKFLQGDSFLNEDLNQLIKRYSSEVATESPLDFTKYLKTSLH

SEQ ID NO: 56279 - protein, 800 aa, Homo sapiens
MKARRNKKQIPSFRKLIKTSKVKLENKLKNKQFKQQSTLKKYRKEQRKLRQAVKDAVSKKPIPLENPKEKRPGKRIEREEEEEEEALPLDMMDEDDLQLMKDLGQRVSFLTRDLSSSEPVHAKKRKHERIIDKYEKIPRTLQTAPEKELIHLLPIKDKSGIIPQTREKPVTDSNKDEEDQEEERELEEEIIEDPIQELTIEEHLIERKKKLQEKKMHIAALASAILSDPENNIKKLKELRSMLMEQDPDVAVTVRKLVIVSLMELFKDITPSYKIRPLTEAEKSTKTRKETQKLREFEEGLVSQYKFYLENLEQMVKDWKQRKLKKSNVVSLKAYKGLAEVAVKSLCELLVALPHFNFHNNIIVLIVPLMNDMSKLISEMCCEAVKKLFKQDKLGQASLGVIKVISGFVKGRNYEVRPEMLKTFLCLRIKEVEVKKDTEDINKPKKFMTFKEKRKSLSRMQRKWKKAEEKLERELREAEASESTEKKLKLHTETLNIVFVTYFRILKKAQRSPLLPAVLEGLAKFAHLINVEFFDDLLVVLHTLIESGDLSYQESLHCVQTAFHILSGQGDVLNIDPLKFYTHLYKTLFKLHAGATNEGVEIVLQCLDVMLTKRRKQVSQQRALAFIKRLCTLALHVLPNSSIGILATTRILMHTFPKTDLLLDSESQGSGVFLPELDEPEYCNAQNTALWELHALRRHYHPIVQRFAAHLIAGAPSEGSGALKPELSRRSATELFEAYSMAEMTFNPPVESSNPKIKGKFLQGDSFLNEDLNQLIKRYSSEVATESPLDFTKYLKTSLH

SEQ ID NO: 56280 - protein, 501 aa, Homo sapiens
MELFKDITPSYKIRPLTEAEKSTKTRKETQKLREFEEGLVSQYKFYLENLEQMVKDWKQRKLKKSNVVSLKAYKGLAEVAVKSLCELLVALPHFNFHNNIIVLIVPLMNDMSKLISEMCCEAVKKLFKQDKLGQASLGVIKVISGFVKGRNYEVRPEMLKTFLCLRIKEVEVKKDTEDINKPKKFMTFKEKRKSLSRMQRKWKKAEEKLERELREAEASESTEKKLKLHTETLNIVFVTYFRILKKAQRSPLLPAVLEGLAKFAHLINVEFFDDLLVVLHTLIESGDLSYQESLHCVQTAFHILSGQGDVLNIDPLKFYTHLYKTLFKLHAGATNEGVEIVLQCLDVMLTKRRKQVSQQRALAFIKRLCTLALHVLPNSSIGILATTRILMHTFPKTDLLLDSESQGSGVFLPELDEPEYCNAQNTALWELHALRRHYHPIVQRFAAHLIAGAPSEGSGALKPELSRRSATELFEAYSMAEMTFNPPVESSNPKIKVTTKG

SEQ ID NO: 56281 - protein, 516 aa, Homo sapiens
MEREPGAAGVRRALGRRLEAVLASRSEANAVFDILAVLQSEDQEEIQEAVRTCSRLFGALLERGELFVGQLPSEEMVMTGSQGATRKYKVWMRHRYHSCCNRLGELLGHPSFQVKELALSALLKFVQLEGAHPLEKSKWEGNYLFPRELFKLVVGGLLSPEEDQSLLLSQFREYLDYDDTRYHTMQAAVDAVARVTGQHPEVPPAFWNNAFTLLSAVSLPRREPTVSSFYVKRAELWDTWKVAHLKEHRRVFQAMWLSFLKHKLPLSLYKKVLLIVHDAILPQLAQPTLMIDFLTRACDLGGALSLLALNGLFILIHKHNLEYPDFYRKLYGLLDPSVFHVKYRARFFHLADLFLSSSHLPAYLVAAFAKRLARLALTAPPEALLMVLPFICNLLRRHPACRVLVHRPHGPELDADPYDPGEEDPAQSRALESSLWELQALQRHYHPEVSKAASVINQALSMPEVSIAPLLELTAYEIFERDLKKKGPEPVPLEFIPAQGLLGRPGELCAQHFTLS

SEQ ID NO: 56282 - protein, 83 aa, Homo sapiens
  VARIANT 1: note = MOD_RES - Any amino acid
XPEELTFASAQAEAREEERRVRETVRRDKTLLKEKRKRREELFIEQKKRKLLPDTILEKLTTASQTNIKKSPGKVKEGMTILI

SEQ ID NO: 56283 - protein, 257 aa, Homo sapiens
MVQLRPRASRAPASAEAMVDEGQLASEEEEAEHGLLLGQPSSGAAAEPLEEDEEGDDEFDDEAPEELTFASAQAEAREEERRVRETVRRDKTLLKEKRKRREELFIEQKKRKLLPDTILEKLTTASQTNIKKSPGKVKEVNLQKKNEDCEKGNDSKKVKVQKVQSVSQNKSYLAVRLKDQDLRDSRQQAAQAFIHNSLYGPGTNRTTVNKFLSLANKRLPVKRAAVQFLNNAWGIQKKQNAKRFKRRWMVRKMKTKK

SEQ ID NO: 56284 - protein, 1099 aa, Homo sapiens
MSVLNKTKWKGGTLQIQLAKESFLHRLAQEREAAKAKKEESTTGNANLLEKTGGVDFHMKAVPGTEVPGHKNWVVSKFGRVLPVLHLKNQHKRKIIKYDPSKYCHNLKKIGEDFSNTIPISSLTWELEGGNDPMSKKRRGEFSDFHGPPKKIIKVQKDESSTGSLAMSTRPRRVIERPPLTQQQAAQKRTCDSITPSKSSPVPVSDTQKLKNLPFKTSGLETAKKRNSISDDDTDSEDELRMMIAKEENLQRTTQPSINESESDPFEVVRDDFKSGVHKLHSLIGLGIKNRVSCHDSDDDIMRNDREYDSGDTDEIIAMKKNVAKVKNSTEFSQMEKSTKKTSFKNRENCELSDHCIKLQKRKSNVESALSHGLKSLNRKSPSHSSSSEDADSASELADSEGGEEYNAMMKNCLRVNLTLADLEQLAGSDLKVPNEDTKSDGPETTTQCKFDRGSKSPKTPTGLRRGRQCIRPAEIVASLLEGEENTCGKQKPKENNLKPKFQAFKGVGCLYEKESMKKSLKDSVASNNKDQNSMKHEDPSIISMEDGSPYVNGSLGEVTPCQHAKKANGPNYIQPQKRQTTFESQDRKAVSPSSSEKRSKNPISRPLEGKKSLSLSAKTHNIGFDKDSCHSTTKTEASQEERSDSSGLTSLKKSPKVSSKDTREIKTDFSLSISNSSDVSAKDKHAEDNEKRLAALEARQKAKEVQKKLVHNALANLDGHPEDKPTHIIFGSDSECETEETSTQEQSHPGEEWVKESMGKTSGKLFDSSDDDESDSEDDSNRFKIKPQFEGRAGQKLMDLQSHFGTDDRFRMDSRFLETDSEEEQEEVNEKKTAEEEELAEEKKKALNVVQSVLQINLSNSTNRGSVAAKKFKDIIHYDPTKQDHATYERKRDDKPKESKAKRKKKREEAEKLPEVSKEMYYNIAMDLKEIFQTTKYTSEKEEGTPWNEDCGKEKPEEIQDPAALTSDAEQPSGFTFSFFDSDTKDIKEETYRVETVKPGKIVWQEDPRLQDSSSEEEDVTEETDHRNSSPGEASLLEKETTRFFFFSKNDERLQGSDLFWRGVGSNMSRNSWEARTTNLRMDCRKKHKDAKRKMKPK

SEQ ID NO: 56285 - protein, 1131 aa, Homo sapiens
MKVNRETKRLYVGGLSQDISEADLQNQFSRFGEVSDVEIITRKDDQGNPQKVFAYINISVAEADLKKCMSVLNKTKWKGGTLQIQLAKESFLHRLAQEREAAKAKKEESTTGNANLLEKTGGVDFHMKAVPGTEVPGHKNWVVSKFGRVLPVLHLKNQHKHLRNIIKYDPSKYCHNLKKIGEDFSNTIPISSLTWELEGGNDPMSKKRRGEFSDFHGPPKKIIKVQKDESSTGSLAMSTRPRRVIERPPLTQQQAAQKRTCDSITPSKSSPVPVSDTQKLKNLPFKTSGLETAKKRNSISDDDTDSEDELRMMIAKEENLQRTTQPSINESESDPFEVVRDDFKSGVHKLHSLIGLGIKNRVSCHDSDDDIMRNDREYDSGDTDEIIAMKKNVAKVKNSTEFSQMEKSTKKTSFKNRENCELSDHCIKLQKRKSNVESALSHGLKSLNRKSPSHSSSSEDADSASELADSEGGEEYNAMMKNCLRVNLTLADLEQLAGSDLKVPNEDTKSDGPETTTQCKFDRGSKSPKTPTGLRRGRQCIRPAEIVASLLEGEENTCGKQKPKENNLKPKFQAFKGVGCLYEKESMKKSLKDSVASNNKDQNSMKHEDPSIISMEDGSPYVNGSLGEVTPCQHAKKANGPNYIQPQKRQTTFESQDRKAVSPSSSEKRSKNPISRPLEGKKSLSLSAKTHNIGFDKDSCHSTTKTEASQEERSDSSGLTSLKKSPKVSSKDTREIKTDFSLSISNSSDVSAKDKHAEDNEKRLAALEARQKAKEVQKKLVHNALANLESMGKTSGKLFDSSDDDESDSEDDSNRFKIKPQFEGRAGQKLMDLQSHFGTDDRFRMDSRFLETDSEEEQEEVNEKKTAEEEELAEEKKKALNVVQSVLQINLSNSTNRGSVAAKKFKDIIHYDPTKQDHATYERKRDDKPKESKAKRKKKREEAEKLPEVSKEMYYNIAMDLKEIFQTTKYTSEKEEGTPWNEDCGKEKPEEIQDPAALTSDAEQPSGFTFSFFDSDTKDIKEETYRVETVKPGKIVWQEDPRLQDSSSEEEDVTEETDHRNSSPGEASLLEKETTRFFFFSKNDERLQGSDLFWRGVGSNMSRNSWEARTTNLRMDCRKKHKDAKRKMKPK

SEQ ID NO: 56286 - protein, 258 aa, Homo sapiens
MKVNRETKRLYVGGLSQDISEADLQNQFSRFGEVSDVEIITRKDDQGNPQKVFAYINISVAEADLKKCMSVLNKTKWKGGTLQIQLAKESFLHRLAQEREAAKAKKEESTTGNANLLEKTGGVDFHMKAVPGTEVPGHKNWVVSKFGRVLPVLHLKNQHKRKIIKYDPSKYCHNLKKIGEDFSNTIPISSLTWELEGGNDPMSKKRRGEFSDFHGPPKKIIKVQKDESSTGSLAMSTRPRRVIERPPLTQQQAAQKRT

SEQ ID NO: 56287 - protein, 970 aa, Homo sapiens
MKVNRETKRLYVGGLSQDISEADLQNQFSRFGEVSDVEIITRKDDQGNPQKVFAYINISVAEADLKKCMSVLNKTKWKGGTLQIQLAKESFLHRLAQEREAAKAKKEESTTGNANLLEKTGGVDFHMKAVPGTEVPGHKNWVVSKFGRVLPVLHLKNQHKRKIIKYDPSKYCHNLKKIGEDFSNTIPISSLTWELEGGNDPMSKKRRGEFSDFHGPPKKIIKVQKDESSTGSLAMSTRPRRVIERPPLTQQQAAQKRTCDSITPSKSSPVPVSDTQKLKNLPFKTSGLETAKKRNSISDDDTDSEDELRMMIAKEENLQRTTQPSINESESDPFEVVRDDFKSGVHKLHSLIGLGIKNRVSCHDSDDDIMRNDREYDSGDTDEIIAMKKNVAKVKNSTEFSQMEKSTKKTSFKNRENCELSDHCIKLQKRKSNVESALSHGLKSLNRKSPSHSSSSEDADSASELADSEGGEEYNAMMKNCLRVNLTLADLEQLAGSDLKVPNEDTKSDGPETTTQCKFDRGSKSPKTPTGLRRGRQCIRPAEIVASLLEGEENTCGKQKPKENNLKPKFQAFKGVGCLYEKESMKKSLKDSVASNNKDQNSMKHEDPSIISMEDGSPYVNGSLGEVTPCQHAKKANGPNYIQPQKRQTTFESQDRKAVSPSSSEKRSKNPISRPLEGKKSLSLSAKTHNIGFDKDSCHSTTKTEASQEERSDSSGLTSLKKSPKVSSKDTREIKTDFSLSISNSSDVSAKDKHAEDNEKRLAALEARQKAKEVQKKLVHNALANLDGHPEDKPTHIIFGSDSECETEETSTQEQSHPGEEWVKESMGKTSGKLFDSSDDDESDSEDDSNRFKIKPQFEGRAGQKLMDLQSHFGTDDRFRMDSRFLETDSEEEQEEVNEKKTAEEEELAEEKKKALNVVQSVLQINLSNSTNRGSVAAKKFKDIIHYDPTKQDHATYERKRDDKPKESKA

SEQ ID NO: 56288 - protein, 413 aa, Homo sapiens
MKVNRETKRLYVGGLSQDISEADLQNQFSRFGEVSDVEIITRKDDQGNPQKVFAYINISVAEADLKKCMSVLNKTKWKGGTLQIQLAKESFLHRLAQEREAAKAKKEESTTGNANLLEKTGGVDFHMKAVPGTEVPGHKNWVVSKFGRVLPVLHLKNQHKRKIIKYDPSKYCHNLKKIGEDFSNTIPISSLTWELEGGNDPMSKKRRGEFSDFHGPPKKIIKVQKDESSTGSLAMSTRPRRVIERPPLTQQQAAQKRTCDSITPSKSSPVPVSDTQKLKNLPFKTSGLETAKKRNSISDDDTDSEDELRMMIAKEENLQRTTQPSINESESDPFEVVRDDFKSGVHKLHSLIGLGIKNRVSCHDSDDDIMRNDREYDSGDTDEIIAMKKNVAKVKNSTEFSQMEKSTKKTSFK

SEQ ID NO: 56289 - protein, 1167 aa, Homo sapiens
MKVNRETKRLYVGGLSQDISEADLQNQFSRFGEVSDVEIITRKDDQGNPQKVFAYINISVAEADLKKCMSVLNKTKWKGGTLQIQLAKESFLHRLAQEREAAKAKKEESTTGNANLLEKTGGVDFHMKAVPGTEVPGHKNWVVSKFGRVLPVLHLKNQHKRKIIKYDPSKYCHNLKKIGEDFSNTIPISSLTWELEGGNDPMSKKRRGEFSDFHGPPKKIIKVQKDESSTGSLAMSTRPRRVIERPPLTQQQAAQKRTCDSITPSKSSPVPVSDTQKLKNLPFKTSGLETAKKRNSISDDDTDSEDELRMMIAKEENLQRTTQPSINESESDPFEVVRDDFKSGVHKLHSLIGLGIKNRVSCHDSDDDIMRNDREYDSGDTDEIIAMKKNVAKVKNSTEFSQMEKSTKKTSFKNRENCELSDHCIKLQKRKSNVESALSHGLKSLNRKSPSHSSSSEDADSASELADSEGGEEYNAMMKNCLRVNLTLADLEQLAGSDLKVPNEDTKSDGPETTTQCKFDRGSKSPKTPTGLRRGRQCIRPAEIVASLLEGEENTCGKQKPKENNLKPKFQAFKGVGCLYEKESMKKSLKDSVASNNKDQNSMKHEDPSIISMEDGSPYVNGSLGEVTPCQHAKKANGPNYIQPQKRQTTFESQDRKAVSPSSSEKRSKNPISRPLEGKKSLSLSAKTHNIGFDKDSCHSTTKTEASQEERSDSSGLTSLKKSPKVSSKDTREIKTDFSLSISNSSDVSAKDKHAEDNEKRLAALEARQKAKEVQKKLVHNALANLDGHPEDKPTHIIFGSDSECETEETSTQEQSHPGEEWVKESMGKTSGKLFDSSDDDESDSEDDSNRFKIKPQFEGRAGQKLMDLQSHFGTDDRFRMDSRFLETDSEEEQEEVNEKKTAEEEELAEEKKKALNVVQSVLQINLSNSTNRGSVAAKKFKDIIHYDPTKQDHATYERKRDDKPKESKAKRKKKREEAEKLPEVSKEMYYNIAMDLKEIFQTTKYTSEKEEGTPWNEDCGKEKPEEIQDPAALTSDAEQPSGFTFSFFDSDTKDIKEETYRVETVKPGKIVWQEDPRLQDSSSEEEDVTEETDHRNSSPGEASLLEKETTRFFFFSKNDERLQGSDLFWRGVGSNMSRNSWEARTTNLRMDCRKKHKDAKRKMKPK

SEQ ID NO: 56290 - protein, 145 aa, Homo sapiens
MKVNRETKRLYVGGLSQDISEADLQNQFSRFGEVSDVEIITRKDDQGNPQKVFAYINISVAEADLKKCMSVLNKTKWKGGTLQIQLAKESFLHRLAQEREAAKAKKEESTTGNANLLEKTGGVDFHMKAVPGTEVPGHKNWVVSK

SEQ ID NO: 56291 - protein, 1167 aa, Homo sapiens; identical to SEQ ID NO: 56289

SEQ ID NO: 56292 - protein, 86 aa, Homo sapiens
MKVNRETKRLYVGGLSQDISEADLQNQFSRFGEVSDVEIITRKDDQGNPQKVFAYINISVAEADLKKSIFHVIQRDSSDEENSSIV

SEQ ID NO: 56293 - protein, 1146 aa, Homo sapiens
MGPAPAGEQLRGATGEPEVMEPALEGTGKEGKKASSRKRTLAEPPAKGLLQPVKLSRAELYKEPTNEELNRLRETEILFHSSLLRLQVEELLKEVRLSEKKKDRIDAFLREVNQRVVRVPSVPETELTDQAWLPAGVRVPLHQVPYAVKGCFRFLPPAQVTVVGSYLLGTCIRPDINVDVALTMPREILQDKDGLNQRYFRKRALYLAHLAHHLAQDPLFGSVCFSYTNGCHLKPSLLLRPRGKDERLVTVRLHPCPPPDFFRPCRLLPTKNNVRSAWYRGQSPAGDGSPEPPTPRYNTWVLQDTVLESHLQLLSTILSSAQGLKDGVALLKVWLRQRELDKGQGGFTGFLVSMLVVFLVSTRKIHTTMSGYQVLRSVLQFLATTDLTVNGISLCLSSDPSLPALADFHQAFSVVFLDSSGHLNLCADVTASTYHQVQHEARLSMMLLDSRADDGFHLLLMTPKPMIRAFDHVLHLRPLSRLQAACHRLKLWPELQDNGGDYVSAALGPLTTLLEQGLGARLNLLAHSRPPVPEWDISQDPPKHKDSGTLTLGLLLRPEGLTSVLELGPEADQPEAAKFRQFWGSRSELRRFQDGAIREAVVWEAASMSQKRLIPHQVVTHLLALHADIPETCVHYVGGPLDALIQGLKETSSTGEEALVAAVRCYDDLSRLLWGLEGLPLTVSAVQGAHPVLRYTEVFPPTPVRPAFSFYETLRERSSLLPRLDKPCPAYVEPMTVVCHLEGSGQWPQDAEAVQRVRAAFQLRLAELLTQQHGLQCRATATHTDVLKDGFVFRIRVAYQREPQILKEVQSPEGMISLRDTAASLRLERDTRQLPLLTSALHGLQQQHPAFSGVARLAKRWVRAQLLGEGFADESLDLVAAALFLHPEPFTPPSSPQVGFLRFLFLVSTFDWKNNPLFVNLNNELTVEEQVEIRSGFLAARAQLPVMVIVTPQDRKNSVWTQDGPSAQILQQLVVLAAEALPMLEKQLMDPRGPGDIRTVFRPPLDIYDVLIRLSPRHIPRHRQAVDSPAASFCRGLLSQPGPSSLMPVLGYDPPQLYLTQLREAFGDLALFFYDQHGGEVIGVLWKPTSFQPQPFKASSTKGRMVMSRGGELVMVPNVEAILEDFAVLGEGLVQTVEARSERWTV

SEQ ID NO: 56294 - protein, 1007 aa, Homo sapiens
MGPAPAGEQLRGATGEPEVMEPALEGTGKEGKKASSRKRTLAEPPAKGLLQPVKLSRAELYKEPTNEELNRLRETEILFHSSLLRLQVEELLKEVRLSEKKKDRIDAFLREVNQRVVRVPSVPETELTDQAWLPAGVRVPLHQVPYAVKGCFRFLPPAQVTVVGSYLLGTCIRPDINVDVALTMPREILQDKDGLNQRYFRKRALYLAHLAHHLAQDPLFGSVCFSYTNGCHLKPSLLLRPRGKDERLVTVRLHPCPPPDFFRPCRLLPTKNNVRSAWYRGQSPAGDGSPEPPTPRYNTWVLQDTVLESHLQLLSTILSSAQGLKDGVALLKVWLRQRELDKGQGGFTGFLVSMLVVFLVSTRKIHTTMSGYQVLRSVLQFLATTDLTVNGISLCLSSDPSLPALADFHQAFSVVFLDSSGHLNLCADVTASTYHQVQHEARLSMMLLDSRADDGFHLLLMTPKPMIRAFDHVLHLRPLSRLQAACHRLKLWPELQDNGGDYVSAALGPLTTLLEQGLGARLNLLAHSRPPVPEWDISQDPPKHKDSGTLTLGLLLRPEGLTSVLELGPEADQPEAAKFRQFWGSRSELRRFQDGAIREAVVWEAASMSQKRLIPHQVVTHLLALHADIPETCVHYVGGPLDALIQGLKETSSTGEEALVAAVRCYDDLSRLLWGLEGLPLTVSAVQGAHPVLRYTEVFPPTPVRPAFSFYETLRERSSLLPRLDKPCPAYVEPMTVVCHLEGSGQWPQDAEAVQRVRAAFQLRLAELLTQQHGLQCRATATHTDVLKDGFVFRIRVAYQREPQILKEVQSPEGMISLRDTAASLRLERDTRQLPLLTSALHGLQQQHPAFSGVARLAKRWVRAQLLGEGFADESLDLVAAALFLHPEPFTPPSSPQVGFLRFLFLVSTFDWKNNPLFVNLNNELTVEEQVEIRSGFLAARAQLPVMVIVTPQDRKNSVWTQDGPSAQILQQLVVLAAEALPMLEKQLMDPRGPGDIRWDPAKMWPF

SEQ ID NO: 56295 - protein, 699 aa, Homo sapiens
MGPAPAGEQLRGATGEPEVMEPALEGTGKEGKKASSRKRTLAEPPAKGLLQPVKLSRAELYKEPTNEELNRLRETEILFHSSLLRLQVEELLKEVRLSEKKKDRIDAFLREVNQRVVRVPSVPETELTDQAWLPAGVRVPLHQVPYAVKGCFRFLPPAQVTVVGSYLLGTCIRPDINVDVALTMPREILQDKDGLNQRYFRKRALYLAHLAHHLAQDPLFGSVCFSYTNGCHLKPSLLLRPRGKDERLVTVRLHPCPPPDFFRPCRLLPTKNNVRSAWYRGQSPAGDGSPEPPTPRYNTWVLQDTVLESHLQLLSTILSSAQGLKDGVALLKVWLRQRELDKGQGGFTGFLVSMLVVFLVSTRKIHTTMSGYQVLRSVLQFLATTDLTVNGISLCLSSDPSLPALADFHQAFSVVFLDSSGHLNLCADVTASTYHQVQHEARLSMMLLDSRADDGFHLLLMTPKPMIRAFDHVLHLRPLSRLQAACHRLKLWPELQDNGGDYVSAALGPLTTLLEQGLGARLNLLAHSRPPVPEWDISQDPPKHKDSGTLTLGLLLRPEGLTSVLELGPEADQPEAAKFRQFWGSRSELRRFQDGAIREAVVWEAASMSQKRLIPHQVVTHLLALHADIPETCVHYVGGPLDALIQGLKEASSTKGRMVMSRGGELVMVPNVEAILEDFAVLGEGLVQTVEARSERWTV

SEQ ID NO: 56296 - protein, 200 aa, Homo sapiens
MVIVTPQDRKNSVWTQDGPSAQILQQLVVLAAEALPMLEKQLMDPRGPGDIRTVFRPPLDIYDVLIRLSPRHIPRHRQAVDSPAASFCRGLLSQPGPSSLMPVLGYDPPQLYLTQLREAFGDLALFFYDQHGGEVIGVLWKPTSFQPQPFKASSTKGRMVMSRGGELVMVPNVEAILEDFAVLGEGLVQTVEARSERWTV

SEQ ID NO: 56297 - protein, 1023 aa, Homo sapiens
MGPAPAGEQLRGATGEPEVMEPALEGTGKEGKKASSRKRTLAEPPAKGLLQPVKLSRAELYKEPTNEELNRLRETEILFHSSLLRLQVEELLKEVRLSEKKKDRIDAFLREVNQRVVRVPSVPETELTDQAWLPAGVRVPLHQVPYAVKGCFRFLPPAQVTVVGSYLLGTCIRPDINVDVALTMPREILQDKDGLNQRYFRKRALYLAHLAHHLAQDPLFGSVCFSYTNGCHLKPSLLLRPRGKDERLVTVRLHPCPPPDFFRPCRLLPTKNNVRSAWYRGQSPAGDGSPEPPTPRYNTWVLQDTVLESHLQLLSTILSSAQGLKDGVALLKVWLRQRELDKGQGGFTGFLVSMLVVFLVSTRKIHTTMSGYQVLRSVLQFLATTDLTVNGISLCLSSDPSLPALADFHQAFSVVFLDSSGHLNLCADVTASTYHQVQHEARLSMMLLDSRADDGFHLLLMTPKPMIRAFDHVLHLRPLSRLQAACHRLKLWPELQDNGGDYVSAALGPLTTLLEQGLGARLNLLAHSRPPVPEWDISQDPPKHKDSGTLTLGLLLRPEGLTSVLELGPEADQPEAAKFRQFWGSRSELRRFQDGAIREAVVWEAASMSQKRLIPHQVVTHLLALHADIPETCVHYVGGPLDALIQGLKETSSTGEEALVAAVRCYDDLSRLLWGLEGLPLTVSAVQGAHPVLRYTEVFPPTPVRPAFSFYETLRERSSLLPRLDKPCPAYVEPMTVVCHLEGSGQWPQDAEAVQRVRAAFQLRLAELLTQQHGLQCRATATHTDVLKDGFVFRIRVAYQREPQILKEVQSPEGMISLRDTAASLRLERDTRQLPLLTSALHGLQQQHPAFSGVARLAKRWVRAQLLGEGFADESLDLVAAALFLHPEPFTPPSSPQVGFLRFLFLVSTFDWKNNPLFVNLNNELTVEEQVEIRSGFLAARAQLPVMVIVTPQDRKNSVWTQDGPSAQILQQLVVLAAEALPMLEKQLMDPRGPGDIRMGPSENVALLSHITDTEQWKGAICV

SEQ ID NO: 56298 - protein, 1094 aa, Homo sapiens
MGPAPAGEQLRGATGEPEVMEPALEGTGKEGKKASSRKRTLAEPPAKGLLQPVKLSRAELYKEPTNEELNRLRETEILFHSSLLRLQVEELLKEVRLSEKKKDRIDAFLREVNQRVVRVPSVPETEEILQDKDGLNQRYFRKRALYLAHLAHHLAQDPLFGSVCFSYTNGCHLKPSLLLRPRGKDERLVTVRLHPCPPPDFFRPCRLLPTKNNVRSAWYRGQSPAGDGSPEPPTPRYNTWVLQDTVLESHLQLLSTILSSAQGLKDGVALLKVWLRQRELDKGQGGFTGFLVSMLVVFLVSTRKIHTTMSGYQVLRSVLQFLATTDLTVNGISLCLSSDPSLPALADFHQAFSVVFLDSSGHLNLCADVTASTYHQGWSLLWLQVQHEARLSMMLLDSRADDGFHLLLMTPKPMIRAFDHVLHLRPLSRLQAACHRLKLWPELQDNGGDYVSAALGPLTTLLEQGLGARLNLLAHSRPPVPEWDISQDPPKHKDSGTLTLGLLLRPEGLTSVLELGPEADQPEAAKFRQFWGSRSELRRFQDGAIREAVVWEAASMSQKRLIPHQVVTHLLALHADIPETCVHYVGGPLDALIQGLKETSSTGEEALVAAVRCYDDLSRLLWGLEGLPLTVSAVQGAHPVLRYTEVFPPTPVRPAFSFYETLRERSSLLPRLDKPCPAYVEPMTVVCHLEGSGQWPQDAEAVQRVRAAFQLRLAELLTQQHGLQCRATATHTDVLKDGFVFRIRVAYQREPQILKEVQSPEGMISLRDTAASLRLERDTRQLPLLTSALHGLQQQHPAFSGVARLAKRWVRAQLLGEGFADESLDLVAAALFLHPEPFTPPSSPQVGFLRFLFLVSTFDWKNNPLFVNLNNELTVEEQVEIRSGFLAARAQLPVMVIVTPQDRKNSVWTQDGPSAQILQQLVVLAAEALPMLEKQLMDPRGPGDIRTVFRPPLDIYDVLIRLSPRHIPRHRQAVDSPAASFCRGLLSQPGPSSLMPVLGYDPPQLYLTQLREAFGDLALFFYDQHGGEVIGVLWKPTSFQPQPFKASSTKGRMVMSRGGELVMVPNVEAILEDFAVLGEGLVQTVEARSERWTV

SEQ ID NO: 56299 - protein, 702 aa, Homo sapiens [sequence omitted]

SEQ ID NO: 56300 - protein, 214 aa, Homo sapiens
MNLSSASSTEEKAVTTVLWGCELSQERRTWTFRPQLEGKQSCRLLLHTICLGEKAKEEMHRVEILPPANQEDKKMQPVTIASLQASVLPMVSMVGVQLSPPVTFQLRAGSGPVFLSGQERYEASDLTWEEEEEEEGEEEEEEEEDDEDEDADISLEEQSPVKQVKRLVPQKQASVAKKKKLEKEEEEIRASVRDKSPVKKAKATARAKKPGFKK

SEQ ID NO: 56301 - protein, 136 aa, Homo sapiens
MNLSSASSTEEKAVTTVLWGCELSQERRTWTFRPQLEGKQSCRLLLHTICLGEKAKEEMHRVEILPPANQEDKKMQPVTIASLQASVLPMVSMVGVQLSPPVTFQLRAGSGPVFLSGQERYEKKAGKRRRGNKSQR

SEQ ID NO: 56302 - protein, 214 aa, Homo sapiens; identical to SEQ ID NO: 56300

SEQ ID NO: 56303 - protein, 214 aa, Homo sapiens; identical to SEQ ID NO: 56300

SEQ ID NO: 56304 - protein, 214 aa, Homo sapiens; identical to SEQ ID NO: 56300

SEQ ID NO: 56305 - protein, 178 aa, Homo sapiens
MAAGTAAALAFLSQESRTRAGGVGGLRVPAPVTMDSFFFGCELSGHTRSFTFKVEEEDDAEHVLALTMLCLTEGAKDECNVVEVVARNHDHQEIAVPVANLKLSCQPMLSLDDFQLQPPVTFRLKSGSGPVRITGRHQIVTMSNDVSEEESEEEEEDSDEEEVELCPILPAKKQGGRP

SEQ ID NO: 56306 - protein, 925 aa, Homo sapiens
MDRSGFGEISSPVIREAEVTRTARKQSAQKRVLLQASQDENFGNTTPRNQVIPRTPSSFRQPFTPTSRSLLRQPDISCILGTGGKSPRLTQSSGFFGNLSMVTNLDDSNWAAAFSSQRSGLFTNTEPHSITEDVTISAVMLREDDPGEAASMSMFSDFLQSFLKHSSSTVFDLVEEYENICGSQVNILSKIVSRATPGLQKFSKTASMLWLLQQEMVTWRLLASLYRDRIQSALEEESVFAVTAVNASEKTVVEALFQRDSLVRQSQLVVDWLESIAKDEIGEFSDNIEFYAKSVYWENTLHTLKQRQLTSYVGSVRPLVTELDPDAPIRQKMPLDDLDREDEVRLLKYLFTLIRAGMTEEAQRLCKRCGQAWRAATLEGWKLYHDPNVNGGTELEPVEGNPYRRIWKISCWRMAEDELFNRYERAIYAALSGNLKQLLPVCDTWEDTVWAYFRVMVDSLVEQEIQTSVATLDETEELPREYLGANWTLEKVFEELQATDKKRVLEENQEHYHIVQKFLILGDIDGLMDEFSKWLSKSRNNLPGHLLRFMTHLILFFRTLGLQTKEEVSIEVLKTYIQLLIREKHTNLIAFYTCHLPQDLAVAQYALFLESVTEFEQRHHCLELAKEADLDVATITKTVVENIRKKDNGEFSHHDLAPALDTGTTEEDRLKIDVIDWLVFDPAQRAEALKQGNAIMRKFLASKKHEAAKEVFVKIPQDSIAEIYNQCEEQGMESPLPAEDDNAIREHLCIRAYLEAHETFNEWFKHMNSVPQKPALIPQPTFTEKVAHEHKEKKYEMDFGIWKGHLDALTADVKEKMYNVLLFVDGGWMVDVREDAKEDHERTHQMVLLRKLCLPMLCFLLHTILHSTGQYQECLQLADMVSSERHKLYLVFSKEELRKLLQKLRESSLMLLDQGLDPLGYEIQL

SEQ ID NO: 56307 - protein, 686 aa, Homo sapiens
MSMFSDFLQSFLKHSSSTVFDLVEEYENICGSQVNILSKIVSRATPGLQKFSKTASMLWLLQQEMVTWRLLASLYRDRIQSALEEESVFAVTAVNASEKTVVEALFQRDSLVRQSQLVVDWLESIAKDEIGEFSDNIEFYAKSVYWENTLHTLKQRQLTSYVGSVRPLVTELDPDAPIRQKMPLDDLDREDEVRLLKYLFTLIRAGMTEEAQRLCKRCGQAWRAATLEGWKLYHDPNVNGGTELEPVEGNPYRRIWKISCWRMAEDELFNRYERAIYAALSGNLKQLLPVCDTWEDTVWAYFRVMVDSLVEQEIQTSVATLDETEELPREYLGANWTLEKVFEELQATDKKRVLEENQEHYHIVQKFLILGDIDGLMDEFSKWLSKSRNNLPGHLLRFMTHLILFFRTLGLQTKEEVSIEVLKTYIQEDRLKIDVIDWLVFDPAQRAEALKQGNAIMRKFLASKKHEAAKEVFVKIPQDSIAEIYNQCEEQGMESPLPAEDDNAIREHLCIRAYLEAHETFNEWFKHMNSVPQKPALIPQPTFTEKVAHEHKEKKYEMDFGIWKGHLDALTADVKEKMYNVLLFVDGGWMVDVREDAKEDHERTHQMVLLRKLCLPMLCFLLHTILHSTGQYQECLQLADMVSSERHKLYLVFSKEELRKLLQKLRESSLMLLDQGLDPLGYEIQL

SEQ ID NO: 56308 - protein, 896 aa, Homo sapiens
MKILVILHQETRLSLELLAHFDSLVLSTNLLFIVTPTSRSLLRQPDISCILGTGGKSPRLTQSSGFFGNLSMVTNLDDSNWAAAFSSQRSGLFTNTEPHSITEDVTISAVMLREDDPGEAASMSMFSDFLQSFLKHSSSTVFDLVEEYENICGSQVNILSKIVSRATPGLQKFSKTASMLWLLQQEMVTWRLLASLYRDRIQSALEEESVFAVTAVNASEKTVVEALFQRDSLVRQSQLVVDWLESIAKDEIGEFSDNIEFYAKSVYWENTLHTLKQRQLTSYVGSVRPLVTELDPDAPIRQKMPLDDLDREDEVRLLKYLFTLIRAGMTEEAQRLCKRCGQAWRAATLEGWKLYHDPNVNGGTELEPVEGNPYRRIWKISCWRMAEDELFNRYERAIYAALSGNLKQLLPVCDTWEDTVWAYFRVMVDSLVEQEIQTSVATLDETEELPREYLGANWTLEKVFEELQATDKKRVLEENQEHYHIVQKFLILGDIDGLMDEFSKWLSKSRNNLPGHLLRFMTHLILFFRTLGLQTKEEVSIEVLKTYIQLLIREKHTNLIAFYTCHLPQDLAVAQYALFLESVTEFEQRHHCLELAKEADLDVATITKTVVENIRKKDNGEFSHHDLAPALDTGTTEEDRLKIDVIDWLVFDPAQRAEALKQGNAIMRKFLASKKHEAAKEVFVKIPQDSIAEIYNQCEEQGMESPLPAEDDNAIREHLCIRAYLEAHETFNEWFKHMNSVPQKPALIPQPTFTEKVAHEHKEKKYEMDFGIWKGHLDALTADVKEKMYNVLLFVDGGWMVDVREDAKEDHERTHQMVLLRKLCLPMLCFLLHTILHSTGQYQECLQLADMVSSERHKLYLVFSKEELRKLLQKLRESSLMLLDQGLDPLGYEIQL

SEQ ID NO: 56309 - protein, 1156 aa, Homo sapiens
MFPAAPSPRTPGTGSRRGPLAGLGPGSTPRTASRKGLPLGSAVSSPVLFSPVGRRSSLSSRGTPTRMFPHHSITESVNYDVKTFGSSLPVKVMEALTLAEVDDQLTINIDEGGWACLVCKEKLIIWKIALSPITKLSVCKELQLPPSDFHWSADLVALSYSSPSGEAHSTQAVAVMVATREGSIRYWPSLAGEDTYTEAFVDSGGDKTYSFLTAVQGGSFILSSSGSQLIRLIPESSGKIHQHILPQGQGMLSGIGRKVSSLFGILSPSSDLTLSSVLWDRERSSFYSLTSSNISKWELDDSSEKHAYSWDINRALKENITDAIWGSESNYEAIKEGVNIRYLDLKQNCDGLVILAAAWHSADNPCLIYYSLITIEDNGCQMSDAVTVEVTQYNPPFQSEDLILCQLTVPNFSNQTAYLYNESAVYVCSTGTGKFSLPQEKIVFNAQGDSVLGAGACGGVPIIFSRNSGLVSITSRENVSILAEDLEGSLASSVAGPNSESMIFETTTKNETIAQEDKIKLLKAAFLQYCRKDLGHAQMVVDELFSSHSDLDSDSELDRAVTQISVDLMDDYPASDPRWAESVPEEAPGFSNTSLIILHQLEDKMKAHSFLMDFIHQVGLFGRLGSFPVRGTPMATRLLLCEHAEKLSAAIVLKNHHSRLSDLVNTAILIALNKREYEIPSNLTPADVFFREVSQVDTICECLLEHEEQVLRDAPMDSIEWAEVVINVNNILKDMLQAASHYRQNRNSLYRREESLEKEPEYVPWTATSGPGGIRTVIIRQHEIVLKVAYPQADSNLRNIVTEQLVALIDCFLDGYVSQLKSVDKSSNRERYDNLEMEYLQKRSDLLSPLLSLGQYLWAASLAEKYCDFDILVQMCEQTDNQSRLQRYMTQFADQNFSDFLFRWYLEKGKRGKLLSQPISQHGQLANFLQAHEHLSWLHEINSQELEKAHATLLGLANMETRYFAKKKTLLGLSKLAALASDFSEDMLQEKIEEMAEQERFLLHQETLPEQLLAEKQLNLSAMPVLTAPQLIGLYICEENRRANEYDFKKALDLLEYIDEEEDININDLKLEILCKALQRDNWSSSDGKDDPIEVSKDSIFVKILQKLLKDGIQLSEYLPEVKDLLQADQLGSLKSNPYFEFVLKANYEYYVQGQI

SEQ ID NO: 56310 - protein, 224 aa, Homo sapiens
MFPAAPSPRTPGTGSRRGPLAGLGPGSTPRTASRKGLPLGSAVSSPVLFSPVGRRSSLSSRGTPTRMFPHHSITESVNYDVKTFGSSLPVKVMEALTLAEVDDQLTINIDEGGWACLVCKEKLIIWKIALSPITKLSVCKELQLPPSDFHWSADLVALSYSSPSGEAHSTQAVAVMVATREGSIRYWPSLAGEDTYTEAFVDSGGDKTYSFLTAVQVHKETKSG

SEQ ID NO: 56311 - protein, 1068 aa, Homo sapiens
MFPAAPSPRTPGTGSRRGPLAGLGPGSTPRTASRKGLPLGSAVSSPVLFSPVGRRSSLSSRGTPTRMFPHHSITESVNYDVKTFGSSLPVKVMEALTLAEVDDQLTINIDEGGWACLVCKEKLIIWKIALSPITKLSVCKELQLPPSDFHWSADLVALSYSSPSGEAHSTQAVAVMVATREGSIRYWPSLAGEDTYTEAFVDSGGDKTYSFLTAVQGGSFILSSSGSQLIRLIPESSGKIHQHILPQGQGMLSGIGRKVSSLFGILSPSSDLTLSSVLWDRERSSFYSLTSSNISKWELDDSSEKHAYSWDINRALKENITDAIWGSESNYEAIKEGVNIRYLDLKQNCDGLVILAAAWHSADNPCLIYYSLITIEDNGCQMSDAVTVEVTQYNPPFQSEDLILCQLTVPNFSNQTAYLYNESAVYVCSTGTGKFSLPQEKIVFNAQGDSVLGAGACGGVPIIFSRNSGLVSITSRENVSILAEDLEGSLASSVAGPNSESMIFETTTKNETIAQEDKIKLLKAAFLQYCRKDLGHAQMVVDELFSSHSDLDSDSELDRAVTQISVDLMDDYPASDPRWAESVPEEAPGFSNTSLIILHQLEDKMKAHSFLMDFIHQVGLFGRLGSFPVRGTPMATRLLLCEHAEKLSAAIVLKNHHSRLSDLVNTAILIALNKREYEIPSNLTPADVFFREVSQVDTICECLLEHEEQVLRDAPMDSIEWAEVVINVNNILKDMLQAASHYRQNRNSLYRREESLEKEPEYVPWTATSGPGGIRTVIIRQHEIVLKVAYPQADSNLRNIVTEQLVALIDCFLDGYVSQLKSVDKSSNRERYDNLEKGKRGKLLSQPISQHGQLANFLQAHEHLSWLHEINSQELEKAHATLLGLANMETRYFAKKKTLLGLSKLAALASDFSEDMLQEKIEEMAEQERFLLHQETLPEQLLAEKQLNLSAMPVLTAPQLIGLYICEENRRANEYDFKKALDLLEYIDEEEDININDLKLEILCKALQRDNWSSSDGKDDPIEVSKDSIFVKILQKLLKDGIQLSEYLPEVKDLLQADQLGSINVNFC

SEQ ID NO: 56312 - protein, 1085 aa, Homo sapiens
MFPAAPSPRTPGTGSRRGPLAGLGPGSTPRTASRKGLPLGSAVSSPVLFSPVGRRSSLSSRGTPTRMFPHHSITESVNYDVKTFGSSLPVKVMEALTLAEVDDQLTINIDEGGWACLVCKEKLIIWKIALSPITKLSVCKELQLPPSDFHWSADLVALSYSSPSGEAHSTQAVAVMVATREGSIRYWPSLAGEDTYTEAFVDSGGDKTYSFLTAVQGGSFILSSSGSQLIRLIPESSGKIHQHILPQGQGMLSGIGRKVSSLFGILSPSSDLTLSSVLWDRERSSFYSLTSSNISKWELDDSSEKHAYSWDINRALKENITDAIWGSESNYEAIKEGVNIRYLDLKQNCDGLVILAAAWHSADNPCLIYYSLITIEDNGCQMSDAVTVEVTQYNPPFQSEDLILCQLTVPNFSNQTAYLYNESAVYVCSTGTGKFSLPQEKIVFNAQGDSVLGAGACGGVPIIFSRNSGLVSITSRENVSILAEDLEGSLASSVAGPNSESMIFETTTKNETIAQEDKIKLLKAAFLQYCRKDLGHAQMVVDELFSSHSDLDSDSELDRAVTQISVDLMDDYPASDPRWAESVPEEAPGFSNTSLIILHQLEDKMKAHSFLMDFIHQVGLFGRLGSFPVRGTPMATRLLLCEHAEKLSAAIVLKNHHSRLSDLVNTAILIALNKREYEIPSNLTPADVFFREVSQVDTICECLLEHEEQVLRDAPMDSIEWAEVVINVNNILKDMLQAASHYRQNRNSLYRREESLEKEPEYVPWTATSGPGGIRTVIIRQHEIVLKVAYPQADSNLRNIVTEQLVALIDCFLDGYVSQLKSVDKSSNRERYDNLEKGKRGKLLSQPISQHGQLANFLQAHEHLSWLHEINSQELEKAHATLLGLANMETRYFAKKKTLLGLSKLAALASDFSEDMLQEKIEEMAEQERFLLHQETLPEQLLAEKQLNLSAMPVLTAPQLIGLYICEENRRANEYDFKKALDLLEYIDEEEDININDLKLEILCKALQRDNWSSSDGKDDPIEVSKDSIFVKILQKLLKDGIQLSEYLPEVKDLLQADQLGSLKSNPYFEFVLKANYEYYVQGQI

SEQ ID NO: 56313 - protein, 1140 aa, Homo sapiens
MGPLAGLGPGSTPRTASRKGLPLGSAVSSPVLFSPVGRRSSLSSRGTPTRMFPHHSITESVNYDVKTFGSSLPVKVMEALTLAEVDDQLTINIDEGGWACLVCKEKLIIWKIALSPITKLSVCKELQLPPSDFHWSADLVALSYSSPSGEAHSTQAVAVMVATREGSIRYWPSLAGEDTYTEAFVDSGGDKTYSFLTAVQGGSFILSSSGSQLIRLIPESSGKIHQHILPQGQGMLSGIGRKVSSLFGILSPSSDLTLSSVLWDRERSSFYSLTSSNISKWELDDSSEKHAYSWDINRALKENITDAIWGSESNYEAIKEGVNIRYLDLKQNCDGLVILAAAWHSADNPCLIYYSLITIEDNGCQMSDAVTVEVTQYNPPFQSEDLILCQLTVPNFSNQTAYLYNESAVYVCSTGTGKFSLPQEKIVFNAQGDSVLGAGACGGVPIIFSRNSGLVSITSRENVSILAEDLEGSLASSVAGPNSESMIFETTTKNETIAQEDKIKLLKAAFLQYCRKDLGHAQMVVDELFSSHSDLDSDSELDRAVTQISVDLMDDYPASDPRWAESVPEEAPGFSNTSLIILHQLEDKMKAHSFLMDFIHQVGLFGRLGSFPVRGTPMATRLLLCEHAEKLSAAIVLKNHHSRLSDLVNTAILIALNKREYEIPSNLTPADVFFREVSQVDTICECLLEHEEQVLRDAPMDSIEWAEVVINVNNILKDMLQAASHYRQNRNSLYRREESLEKEPEYVPWTATSGPGGIRTVIIRQHEIVLKVAYPQADSNLRNIVTEQLVALIDCFLDGYVSQLKSVDKSSNRERYDNLEMEYLQKRSDLLSPLLSLGQYLWAASLAEKYCDFDILVQMCEQTDNQSRLQRYMTQFADQNFSDFLFRWYLEKGKRGKLLSQPISQHGQLANFLQAHEHLSWLHEINSQELEKAHATLLGLANMETRYFAKKKTLLGLSKLAALASDFSEDMLQEKIEEMAEQERFLLHQETLPEQLLAEKQLNLSAMPVLTAPQLIGLYICEENRRANEYDFKKALDLLEYIDEEEDININDLKLEILCKALQRDNWSSSDGKDDPIEVSKDSIFVKILQKLLKDGIQLSEYLPEVKDLLQADQLGSLKSNPYFEFVLKANYEYYVQGQI

SEQ ID NO: 56314 - protein, 1475 aa, Homo sapiens
MASGAGGVGGGGGGKIRTRRCHQGPIKPYQQGRQQHQGILSRVTESVKNIVPGWLQRYFNKNEDVCSCSTDTSEVPRWPENKEDHLVYADEESSNITDGRITPEPAVSNTEEPSTTSTASNYPDVLTRPSLHRSHLNFSMLESPALHCQPSTSSAFPIGSSGFSLVKEIKDSTSQHDDDNISTTSGFSSRASDKDITVSKNTSLPPLWSPEAERSHSLSQHTATSSKKPAFNLSAFGTLSPSLGNSSILKTSQLGDSPFYPGKTTYGGAAAAVRQSKLRNTPYQAPVRRQMKAKQLSAQSYGVTSSTARRILQSLEKMSSPLADAKRIPSIVSSPLNSPLDRSGIDITDFQAKREKVDSQYPPVQRLMTPKPVSIATNRSVYFKPSLTPSGEFRKTNQRIDNKCSTGYEKNMTPGQNREQRESGFSYPNFSLPAANGLSSGVGGGGGKMRRERTRFVASKPLEEEEMEVPVLPKISLPITSSSLPTFNFSSPEITTSSPSPINSSQALTNKVQMTSPSSTGSPMFKFSSPIVKSTEANVLPPSSIGFTFSVPVAKTAELSGSSSTLEPIISSSAHHVTTVNSTNCKKTPPEDCEGPFRPAEILKEGSVLDILKSPGFASPKIDSVAAQPTATSPVVYTRPAISSFSSSGIGFGESLKAGSSWQCDTCLLQNKVTDNKCIACQAAKLSPRDTAKQTGIETPNKSGKTTLSASGTGFGDKFKPVIGTWDCDTCLVQNKPEAIKCVACETPKPGTCVKRALTLTVVSESAETMTASSSSCTVTTGTLGFGDKFKRPIGSWECSVCCVSNNAEDNKCVSCMSEKPGSSVPASSSSTVPVSLPSGGSLGLEKFKKPEGSWDCELCLVQNKADSTKCLACESAKPGTKSGFKGFDTSSSSSNSAASSSFKFGVSSSSSGPSQTLTSTGNFKFGDQGGFKIGVSSDSGSINPMSEGFKFSKPIGDFKFGVSSESKPEEVKKDSKNDNFKFGLSSGLSNPVSLTPFQFGVSNLGQEEKKEELPKSSSAGFSFGTGVINSTPAPANTIVTSENKSSFNLGTIETKSASVAPFTCKTSEAKKEEMPATKGGFSFGNVEPASLPSASVFVLGRTEEKQQEPVTSTSLVFGKKADNEEPKCQPVFSFGNSEQTKDENSSKSTFSFSMTKPSEKESEQPAKATFAFGAQTSTTADQGAAKPVFSFLNNSSSSSSTPATSAGGGIFGSSTSSSNPPVATFVFGQSSNPVSSSAFGNTAESSTSQSLLFSQDSKLATTSSTGTAVTPFVFGPGASSNNTTTSGFGFGATTTSSSAGSSFVFGTGPSAPSASPAFGANQTPTFGQSQGASQPNPPGFGSISSSTALFPTGSQPAPPTFGTVSSSSQPPVFGQQPSQSAFGSGTTPNSSSAFQFGSSTTNFNFTNNSPSGVFTFGANSSTPAASAQPSGSGGFPFNQSPAAFTVGSNGKNVFSSSGTSFSGRKIKTAVRRRK

SEQ ID NO: 56315 - protein, 1455 aa, Homo sapiens
GLRLCLSRPLTRPGAGSGGGSAMASGAGGVGGGGGGKIRTRRCHQGPIKPYQQGRQQHQGILSRVTESVKNIVPGWLQRYFNKNEDVCSCSTDTSEVPRWPENKEDHLVYADEESSNITDGRITPEPAVSNTEEPSTTSTASNYPDVLTRPSLHRSHLNFSMLESPALHCQPSTSSAFPIGSSGFSLVKEIKDSTSQHDDDNISTTSGFSSRASDKDITVSKNTSLPPLWSPEAERSHSLSQHTATSSKKPAFNLSAFGTLSPSLGNSSILKTSQLGDSPFYPGKTTYGGAAAAVRQSKLRNTPYQAPVRRQMKAKQLSAQSYGVTSSTARRILQSLEKMSSPLADAKRIPSIVSSPLNSPLDRSGIDITDFQAKREKVDSQYPPVQRLMTPKPVSIATNRSVYFKPSLTPSGEFRKTNQRIDNKCSTGYEKNMTPGQNREQRESGFSYPNFSLPAANGLSSGVGGGGGKMRRERTRFVASKPLEEEEMEVPVLPKISLPITSSSLPTFNFSSPEITTSSPSPINSSQALTNKVQMTSPSSTGSPMFKFSSPIVKSTEANVLPPSSIGFTFSVPVAKTAELSGSSSTLEPIISSSGFASPKIDSVAAQPTATSPVVYTRPAISSFSSSGIGFGESLKAGSSWQCDTCLLQNKVTDNKCIACQAAKLSPRDTAKQTGIETPNKSGKTTLSASGTGFGDKFKPVIGTWDCDTCLVQNKPEAIKCVACETPKPGTCVKRALTLTVVSESAETMTASSSSCTVTTGTLGFGDKFKRPIGSWECSVCCVSNNAEDNKCVSCMSEKPGSSVPASSSSTVPVSLPSGGSLGLEKFKKPEGSWDCELCLVQNKADSTKCLACESAKPGTKSGFKGFDTSSSSSNSAASSSFKFGVSSSSSGPSQTLTSTGNFKFGDQGGFKIGVSSDSGSINPMSEGFKFSKPIGDFKFGVSSESKPEEVKKDSKNDNFKFGLSSGLSNPVSLTPFQFGVSNLGQEEKKEELPKSSSAGFSFGTGVINSTPAPANTIVTSENKSSFNLGTIETKSASVAPFTCKTSEAKKEEMPATKGGFSFGNVEPASLPSASVFVLGRTEEKQQEPVTSTSLVFGKKADNEEPKCQPVFSFGNSEQTKDENSSKSTFSFSMTKPSEKESEQPAKATFAFGAQTSTTADQGAAKPVFSFLNNSSSSSSTPATSAGGGIFGSSTSSSNPPVATFVFGQSSNPVSSSAFGNTAESSTSQSLLFSQDSKLATTSSTGTAVTPFVFGPGASSNNTTTSGFGFGATTTSSSAGSSFVFGTGPSAPSASPAFGANQTPTFGQSQGASQPNPPGFGSISSSTALFPTGSQPAPPTFGTVSSSSQPPVFGQQPSQSAFGSGTTPNSSSAFQFGSSTTNFNFTNNSPSGVFTFGANSSTPAASAQPSGSGGFPFNQSPAAFTVGSNGKNVFSSSGTSFSGRKIKTAVRRRK

SEQ ID NO: 56316 - protein, 1506 aa, Homo sapiens
MASGAGGVGGGGGGKIRTRRCHQGPIKPYQQGRQQHQGILSRVTESVKNIVPGWLQRYFNKNEDVCSCSTDTSEVPRWPENKEDHLVYADEESSNITDGRITPEPAVSNTEEPSTTSTASNYPDVLTRPSLHRSHLNFSMLESPALHCQPSTSSAFPIGSSGFSLVKEIKDSTSQHDDDNISTTSGFSSRASDKDITVSKNTSLPPLWSPEAERSHSLSQHTATSSKKPAFNLSAFGTLSPSLGNSSILKTSQLGDSPFYPGKTTYGGAAAAVRQSKLRNTPYQAPVRRQMKAKQLSAQSYGVTSSTARRILQSLEKMSSPLADAKRIPSIVSSPLNSPLDRSGIDITDFQAKREKVDSQYPPVQRLMTPKPVSIATNRSVYFKPSLTPSGEFRKTNQRIDNKCSTGYEKNMTPGQNREQRESGFSYPNFSLPAANGLSSGVGGGGGKMRRERTRFVASKPLEEERQGLTVLPKLISSSCAQAIIPSWPLKVLRLQEMEVPVLPKISLPITSSSLPTFNFSSPEITTSSPSPINSSQALTNKVQMTSPSSTGSPMFKFSSPIVKSTEANVLPPSSIGFTFSVPVAKTAELSGSSSTLEPIISSSAHHVTTVNSTNCKKTPPEDCEGPFRPAEILKEGSVLDILKSPGFASPKIDSVAAQPTATSPVVYTRPAISSFSSSGIGFGESLKAGSSWQCDTCLLQNKVTDNKCIACQAAKLSPRDTAKQTGIETPNKSGKTTLSASGTGFGDKFKPVIGTWDCDTCLVQNKPEAIKCVACETPKPGTCVKRALTLTVVSESAETMTASSSSCTVTTGTLGFGDKFKRPIGSWECSVCCVSNNAEDNKCVSCMSEKPGSSVPASSSSTVPVSLPSGGSLGLEKFKKPEGSWDCELCLVQNKADSTKCLACESAKPGTKSGFKGFDTSSSSSNSAASSSFKFGVSSSSSGPSQTLTSTGNFKFGDQGGFKIGVSSDSGSINPMSEGFKFSKPIGDFKFGVSSESKPEEVKKDSKNDNFKFGLSSGLSNPVSLTPFQFGVSNLGQEEKKEELPKSSSAGFSFGTGVINSTPAPANTIVTSENKSSFNLGTIETKSASVAPFTCKTSEAKKEEMPATKGGFSFGNVEPASLPSASVFVLGRTEEKQQEPVTSTSLVFGKKADNEEPKCQPVFSFGNSEQTKDENSSKSTFSFSMTKPSEKESEQPAKATFAFGAQTSTTADQGAAKPVFSFLNNSSSSSSTPATSAGGGIFGSSTSSSNPPVATFVFGQSSNPVSSSAFGNTAESSTSQSLLFSQDSKLATTSSTGTAVTPFVFGPGASSNNTTTSGFGFGATTTSSSAGSSFVFGTGPSAPSASPAFGANQTPTFGQSQGASQPNPPGFGSISSSTALFPTGSQPAPPTFGTVSSSSQPPVFGQQPSQSAFGSGTTPNSSSAFQFGSSTTNFNFTNNSPSGVFTFGANSSTPAASAQPSGSGGFPFNQSPAAFTVGSNGKNVFSSSGTSFSGRKIKTAVRRRK

SEQ ID NO: 56317 - protein, 1391 aa, Homo sapiens
MPSSLLGAAMPASTSAAALQEALENAGRLIDRQLQEDRMYPDLSELLMVSAPNNPTVSGMSDMDYPLQGPGLLSVPNLPEISSIRRVPLPPELVEQFGHMQCNCMMGVFPPISRAWLTIDSDIFMWNYEDGGDLAYFDGLSETILAVGLVKPKAGIFQPHVRHLLVLATPVDIVILGLSYANLQTGSGVLNDSLSGGMQLLPDPLYSLPTDNTYLLTITSTDNGRIFLAGKDGCLYEVAYQAEAGWFSQRCRKINHSKSSLSFLVPSLLQFTFSEDDPILQIAIDNSRNILYTRSEKGVIQVYDLGQDGQGMSRVASVSQNAIVSAAGNIARTIDRSVFKPIVQIAVIENSESLDCQLLAVTHAGVRLYFSTCPFRQPLARPNTLTLVHVRLPPGFSASSTVEKPSKVHRALYSKGILLMAASENEDNDILWCVNHDTFPFQKPMMETQMTAGVDGHSWALSAIDELKVDKIITPLNKDHIPITDSPVVVQQHMLPPKKFVLLSAQGSLMFHKLRPVDQLRHLLVSNVGGDGEEIERFFKLHQEDQACATCLILACSTAACDREVSAWATRAFFRYGGEAQMRFPTTLPPPSNVGPILGSPVYSSSPVPSGSPYPNPSFLGTPSHGIQPPAMSTPVCALGNPATQATNMSCVTGPEIVYSGKHNGICIYFSRIMGNIWDASLVVERIFKSGNREITAIESSVPCQLLESVLQELKGLQEFLDRNSQFAGGPLGNPNTTAKVQQRLIGFMRPENGNPQQMQQELQRKFHEAQLSEKISLQAIQQLVRKSYQALALWKLLCEHQFTIIVAELQKELQEQLKITTFKDLVIRDKELTGALIASLINCYIRDNAAVDGISLHLQDICPLLYSTDDAICSKANELLQRSRQVQNKTEKERMLRESLKEYQKISNQVDLSNVCAQYRQVRFYEGVVELSLTAAEKKDPQGLGLHFYKHGEPEEDIVGLQAFQERLNSYKCITDTLQELVNQSKAAPQSPSVPKKPGPPVLSSDPNMLSNEEAGHHFEQMLKLSQRSKDELFSIALYNWLIQVDLADKLLQVASPFLEPHLVRMAKVDQNRVRYMDLLWRYYEKNRSFSNAARVLSRLADMHSTEISLQQRLEYIARAILSAKSSTAISSIAADGEFLHELEEKMEVARIQLQIQETLQRQYSHHSSVQDAVSQLDSELMDITKLYGEFADPFKLAECKLAIIHCAGYSDPILVQTLWQDIIEKELSDSVTLSSSDRMHALSLKIVLLGKIYAGTPRFFPLDFIVQFLEQQVCTLNWDVGFVIQTMNEIGVPLPRLLEVYDQLFKSRDPFWNRMKKPLHLLDCIHVLLIRYVENPSQVLNCERRRFTNLCLDAVCGYLVELQSMSSSVAVQAITGNFKSLQAKLERLH

SEQ ID NO: 56318 - protein, 1332 aa, Homo sapiens
MSDMDYPLQGPGLLSVPNLPEISSIRRVPLPPELVEQFGHMQCNCMMGVFPPISRAWLTIDSDIFMWNYEDGGDLAYFDGLSETILAVGLVKPKAGIFQPHVRHLLVLATPVDIVILGLSYANLQTGSGVLNDSLSGGMQLLPDPLYSLPTDNTYLLTITSTDNGRIFLAGKDGCLYEVAYQAEAGWFSQRCRKINHSKSSLSFLVPSLLQFTFSEDDPILQIAIDNSRNILYTRSEKGVIQVYDLGQDGQGMSRVASVSQNAIVSAAGNIARTIDRSVFKPIVQIAVIENSESLDCQLLAVTHAGVRLYFSTCPFRQPLARPNTLTLVHVRLPPGFSASSTVEKPSKVHRALYSKGILLMAASENEDNDILWCVNHDTFPFQKPMMETQMTAGVDGHSWALSAIDELKVDKIITPLNKDHIPITDSPVVVQQHMLPPKKFVLLSAQGSLMFHKLRPVDQLRHLLVSNVGGDGEEIERFFKLHQEDQACATCLILACSTAACDREVSAWATRAFFRYGGEAQMRFPTTLPPPSNVGPILGSPVYSSSPVPSGSPYPNPSFLGTPSHGIQPPAMSTPVCALGNPATQATNMSCVTGPEIVYSGKHNGICIYFSRIMGNIWDASLVVERIFKSGNREITAIESSVPCQLLESVLQELKGLQEFLDRNSQFAGGPLGNPNTTAKVQQRLIGFMRPENGNPQQMQQELQRKFHEAQLSEKISLQAIQQLVRKSYQALALWKLLCEHQFTIIVAELQKELQEQLKITTFKDLVIRDKELTGALIASLINCYIRDNAAVDGISLHLQDICPLLYSTDDAICSKANELLQRSRQVQNKTEKERMLRESLKEYQKISNQVDLSNVCAQYRQVRFYEGVVELSLTAAEKKDPQGLGLHFYKHGEPEEDIVGLQAFQERLNSYKCITDTLQELVNQSKAAPQSPSVPKKPGPPVLSSDPNMLSNEEAGHHFEQMLKLSQRSKDELFSIALYNWLIQVDLADKLLQVASPFLEPHLVRMAKVDQNRVRYMDLLWRYYEKNRSFSNAARVLSRLADMHSTEISLQQRLEYIARAILSAKSSTAISSIAADGEFLHELEEKMEVARIQLQIQETLQRQYSHHSSVQDAVSQLDSELMDITKLYGEFADPFKLAECKLAIIHCAGYSDPILVQTLWQDIIEKELSDSVTLSSSDRMHALSLKIVLLGKIYAGTPRFFPLDFIVQFLEQQVCTLNWDVGFVIQTMNEIGVPLPRLLEVYDQLFKSRDPFWNRMKKPLHLLDCIHVLLIRYVENPSQVLNCERRRFTNLCLDAVCGYLVELQSMSSSVAVQAITGNFKSLQAKLERLH

SEQ ID NO: 56319 - protein, 1353 aa, Homo sapiens
MYPDLSELLMVSAPNNPTVSGMSDMDYPLQGPGLLSVPNLPEISSIRRVPLPPELVEQFGHMQCNCMMGVFPPISRAWLTIDSDIFMWNYEDGGDLAYFDGLSETILAVGLVKPKAGIFQPHVRHLLVLATPVDIVILGLSYANLQTGSGVLNDSLSGGMQLLPDPLYSLPTDNTYLLTITSTDNGRIFLAGKDGCLYEVAYQAEAGWFSQRCRKINHSKSSLSFLVPSLLQFTFSEDDPILQIAIDNSRNILYTRSEKGVIQVYDLGQDGQGMSRVASVSQNAIVSAAGNIARTIDRSVFKPIVQIAVIENSESLDCQLLAVTHAGVRLYFSTCPFRQPLARPNTLTLVHVRLPPGFSASSTVEKPSKVHRALYSKGILLMAASENEDNDILWCVNHDTFPFQKPMMETQMTAGVDGHSWALSAIDELKVDKIITPLNKDHIPITDSPVVVQQHMLPPKKFVLLSAQGSLMFHKLRPVDQLRHLLVSNVGGDGEEIERFFKLHQEDQACATCLILACSTAACDREVSAWATRAFFRYGGEAQMRFPTTLPPPSNVGPILGSPVYSSSPVPSGSPYPNPSFLGTPSHGIQPPAMSTPVCALGNPATQATNMSCVTGPEIVYSGKHNGICIYFSRIMGNIWDASLVVERIFKSGNREITAIESSVPCQLLESVLQELKGLQEFLDRNSQFAGGPLGNPNTTAKVQQRLIGFMRPENGNPQQMQQELQRKFHEAQLSEKISLQAIQQLVRKSYQALALWKLLCEHQFTIIVAELQKELQEQLKITTFKDLVIRDKELTGALIASLINCYIRDNAAVDGISLHLQDICPLLYSTDDAICSKANELLQRSRQVQNKTEKERMLRESLKEYQKISNQVDLSNVCAQYRQVRFYEGVVELSLTAAEKKDPQGLGLHFYKHGEPEEDIVGLQAFQERLNSYKCITDTLQELVNQSKAAPQSPSVPKKPGPPVLSSDPNMLSNEEAGHHFEQMLKLSQRSKDELFSIALYNWLIQVDLADKLLQVASPFLEPHLVRMAKVDQNRVRYMDLLWRYYEKNRSFSNAARVLSRLADMHSTEISLQQRLEYIARAILSAKSSTAISSIAADGEFLHELEEKMEVARIQLQIQETLQRQYSHHSSVQDAVSQLDSELMDITKLYGEFADPFKLAECKLAIIHCAGYSDPILVQTLWQDIIEKELSDSVTLSSSDRMHALSLKIVLLGKIYAGTPRFFPLDFIVQFLEQQVCTLNWDVGFVIQTMNEIGVPLPRLLEVYDQLFKSRDPFWNRMKKPLHLLDCIHVLLIRYVENPSQVLNCERRRFTNLCLDAVCGYLVELQSMSSSVAVQAITGNFKSLQAKLERLH

SEQ ID NO: 56320 - protein, 1327 aa, Homo sapiens
MPSSLLGAAMPASTSAAALQEALENAGRLIDRQLQEDRMYPDLSELLMVSAPNNPTVSGMSDMDYPLQGPGLLSVPNLPEISSIRRVPLPPELVEQFGHMQCNCMMGVFPPISRAWLTIDSDIFMWNYEDGGDLAYFDGLSETILAVGLVKPKAGIFQPHVRHLLVLATPVDIVILGLSYANLQTGSGVLNDSLSGGMQLLPDPLYSLPTDNTYLLTITSTDNGRIFLAGKDGCLYEVAYQAEAGWFSQRCRKINHSKSSLSFLVPSLLQFTFSEDDPILQIAIDNSRNILYTRSEKGVIQVYDLGQDGQGMSRVASVSQNAIVSAAGNIARTIDRSVFKPIVQIAVIENSESLDCQLLAVTHAGVRLYFSTCPFRQPLARPNTLTLVHVRLPPGFSASSTVEKPSKVHRALYSKGILLMAASENEDNDILWCVNHDTFPFQKPMMETQMTAGVDGHSWALSAIDELKVDKIITPLNKDHIPITDSPVVVQQHMLPPKKFVLLSAQGSLMFHKLRPVDQLRHLLVSNVGGDGEEIERFFKLHQEDQACATCLILACSTAACDREVSAWATRAFFRYGGEAQMRFPTTLPPPSNVGPILGSPVYSSSPVPSGSPYPNPSFLGTPSHGIQPPAMSTPVCALGNPATQATNMSCVTGPEIVYSGKHNGICIYFSRIMGNIWDASLVVERIFKSGNREITAIESSVPCQLLESVLQELKGLQEFLDRNSQFAGGPLGNPNTTAKVQQRLIGFMRPENGNPQQMQQELQRKFHEAQLSEKISLQAIQQLVRKSYQALALWKLLCEHQFTIIVAELQKANELLQRSRQVQNKTEKERMLRESLKEYQKISNQVDLSNVCAQYRQVRFYEGVVELSLTAAEKKDPQGLGLHFYKHGEPEEDIVGLQAFQERLNSYKCITDTLQELVNQSKAAPQSPSVPKKPGPPVLSSDPNMLSNEEAGHHFEQMLKLSQRSKDELFSIALYNWLIQVDLADKLLQVASPFLEPHLVRMAKVDQNRVRYMDLLWRYYEKNRSFSNAARVLSRLADMHSTEISLQQRLEYIARAILSAKSSTAISSIAADGEFLHELEEKMEVARIQLQIQETLQRQYSHHSSVQDAVSQLDSELMDITKLYGEFADPFKLAECKLAIIHCAGYSDPILVQTLWQDIIEKELSDSVTLSSSDRMHALSLKIVLLGKIYAGTPRFFPLDFIVQFLEQQVCTLNWDVGFVIQTMNEIGVPLPRLLEVYDQLFKSRDPFWNRMKKPLHLLDCIHVLLIRYVENPSQVLNCERRRFTNLCLDAVCGYLVELQSMSSSVAVQAITGNFKSLQAKLERLH

SEQ ID NO: 56321 - protein, 1436 aa, Homo sapiens
MLHLSAAPPAPPPEVTATARPCLCSVGRRGDGGKMAAAGALERSFVELSGAERERPRHFREFTVCSIGTANAVAGAVKYSESAGGFYYVESGKLFSVTRNRFIHWKTSGDTLELMEESLDINLLNNAIRLKFQNCSVLPGGVYVSETQNRVIILMLTNQTVHRLLLPHPSRMYRSELVVDSQMQSIFTDIGKVDFTDPCNYQLIPAVPGISPNSTASTAWLSSDGEALFALPCASGGIFVLKLPPYDIPGMVSVVELKQSSVMQRLLTGWMPTAIRGDQSPSDRPLSLAVHCVEHDAFIFALCQDHKLRMWSYKEQMCLMVADMLEYVPVKKDLRLTAGTGHKLRLAYSPTMGLYLGIYMHAPKRGQFCIFQLVSTESNRYSLDHISSLFTSQETLIDFALTSTDIWALWHDAENQTVVKYINFEHNVAGQWNPVFMQPLPEEEIVIRDDQDPREMYLQSLFTPGQFTNEALCKALQIFCRGTERNLDLSWSELKKEVTLAVENELQGSVTEYEFSQEEFRNLQQEFWCKFYACCLQYQEALSHPLALHLNPHTNMVCLLKKGYLSFLIPSSLVDHLYLLPYENLLTEDETTISDDVDIARDVICLIKCLRLIEESVTVDMSVIMEMSCYNLQSPEKAAEQILEDMITIDVENVMEDICSKLQEIRNPIHAIGLLIREMDYETEVEMEKGFNPAQPLNIRMNLTQLYGSNTAGYIVCRGVHKIASTRFLICRDLLILQQLLMRLGDAVIWGTGQLFQAQQDLLHRTAPLLLSYYLIKWGSECLATDVPLDTLESNLQHLSVLELTDSGALMANRFVSSPQTIVELFFQEVARKHIISHLFSQPKAPLSQTGLNWPEMITAITSYLLQLLWPSNPGCLFLECLMGNCQYVQLQDYIQLLHPWCQVNVGSCRFMLGRCYLVTGEGQKALECFCQAASEVGKEEFLDRLIRSEDGEIVSTPRLQYYDKVLRLLDVIGLPELVIQLATSAITEAGDDWKSQATLRTCIFKHHLDLGHNSQAYEALTQIPDSSRQLDCLRQLVVVLCERSQLQDLVEFPYVNLHNEVVGIIESRARAVDLMTHNYYELLYAFHIYRHNYRKAGTVMFEYGMRLGREVRTLRGLEKQGNCYLAALNCLRLIRPEYAWIVQPVSGAVYDRPGASPKRNHDGECTAAPTNRQIEILELEDLEKECSLARIRLTLAQHDPSAVAVAGSSSAEEMVTLLVQAGLFDTAISLCQTFKLPLTPVFEGLAFKCIKLQFGGEAAQAEAWAWLAANQLSSVITTKESSATDEAWRLLSTYLERYKVQNNLYHHCVINKLLSHGVPLPNWLINSYKKVDAAELLRLYLNYDLLEEAVDLVSEYVDAVLGKGHQYFGIEFPLSATAPMVWLPYSSIDQLLQALGENSANSHNIALSQKILDKLEDYQQKVDKATRDLLYRRTL

SEQ ID NO: 56322 - protein, 483 aa, Homo sapiens
MVSVVELKQSSVMQRLLTGWMPTAIRGDQSPSDRPLSLAVHCVEHDAFIFALCQDHKLRMWSYKEQMCLMVADMLEYVPVKKDLRLTAGTGHKLRLAYSPTMGLYLGIYMHAPKRGQRRGFAMLPGLKLLSSSSPPTSASQCAGITSVNHSTQPEFFFCIFQLVSTESNRYSLDHISSLFTSQETLIDFALTSTDIWALWHDAENQTVVKYINFEHNVAGQWNPVFMQPLPEEEIVIRDDQDPREMYLQSLFTPGQFTNEALCKALQIFCRGTERNLDLSWSELKKEVTLAVENELQGSVTEYEFSQEEFRNLQQEFWCKFYACCLQYQEALSHPLALHLNPHTNMVCLLKKGYLSFLIPSSLVDHLYLLPYENLLTEDETTISDDVDIARDVICLIKCLRLIEESVTVDMSVIMEMSCYNLQSPEKAAEQILEDMITIDVENVMEDICSKLQEIRNPIHAIGLLIREMDYETEVEMEKGFNP

SEQ ID NO: 56323 - protein, 224 aa, Homo sapiens
MLHLSAAPPAPPPEVTATARPCLCSVGRRGDGGKMAAAGALERSFVELSGAERERPRHFREFTVCSIGTANAVAGAVKYSESAGGFYYVESGKLFSVTRNRFIHWKTSGDTLELMEESLDINLLNNAIRLKFQNCSVLPGGVYVSETQNRVIILMLTNQTVHRLLLPHPSRMYRSVSWLSAISFISQITLGVTNVVLERCLLELKEIWILVIPHQAYFDSYRLK

SEQ ID NO: 56324 - protein, 2012 aa, Homo sapiens
MATPLAVNSAASLWGPYKDIWHKVGNALWRRQPEAVHLLDKILKKHKPDFISLFKNPPKNVQQHEKVQKASTEGVAIQGQQGTRLLPEQLIKEAFILSDLFDIGELAAVELLLAGEHQQPHFPGLTRGLVAVLLYWDGKRCIANSLKALIQSRRGKTWTLELSPELASMTTRFTDELMEQGLTYKVLTLVSQIDVNNEFEKLQRERGLGSEKHRKEVSDLIKECRQSLAESLFAWACQSPLGKEDTLLLIGHLERVTVEANGSLDAVNLALLMALLYCFDISFIEQSTEERDDMIHQLPLLTEKQYIATIHSRLQDSQLWKLPGLQATVRLAWALALRGISQLPDVTALAEFTEADEAMAELAIADNVFLFLMESVVVSEYFYQEEFYIRRVHNLITDFLALMPMKVKQLRNRADEDARMIHMSMQMGNEPPISLRRDLEHLMLLIGELYKKNPFHLELALEYWCPTEPLQTPTIMGSYLGVAHQRPPQRQVVLSKFVRQMGDLLPPTIYIPYLKMLQGLANGPQCAHYCFSLLKVNGSSHVENIQGAGGSPVSWEHFFHSLMLYHEHLRKDLPSADSVQYRHLPSRGITQKEQDGLIAFLQLTSTIITWSENARLALCEHPQWTPVVVILGLLQCSIPPVLKAELLKTLAAFGKSPEIAASLWQSLEYTQILQTVRIPSQRQAIGIEVELNEIESRCEEYPLTRAFCQLISTLVESSFPSNLGAGLRPPGFDPYLQFLRDSVFLRFRTRAYRRAAEKWEVAEVVLEVFYKLLRDYEPQLEDFVDQFVELQGEEIIAYKPPGFSLMYHLLNESPMLELALSLLEEGVKQLDTYAPFPGKKHLEKAVQHCLALLNLTLQKENLFMDLLRESQLALIVCPLEQLLQGINPRTKKADNVVNIARYLYHGNTNPELAFESAKILCCISCNSNIQIKLVGDFTHDQSISQKLMAGFVECLDCEDAEEFVRLEEGSELEKKLVAIRHETRIHILNLLITSLECNPPNLALYLLGFELKKPVSTTNLQDPGVLGCPRTCLHAILNILEKGTEGRTGPVAVRESPQLAELCYQVIYQLCACSDTSGPTMRYLRTSQDFLFSQLQYLPFSNKEYEISMLNQMSWLMKTASIELRVTSLNRQRSHTQRLLHLLLDDMPVKPYSDGEGGIEDENRSVSGFLHFDTATKVRRKILNILDSIDFSQEIPEPLQLDFFDRAQIEQVIANCEHKNLRGQTVCNVKLLHRVLVAEVNALQGMAAIGQRPLLMEEISTVLQYVVGRNKLLQCLHAKRHALESWRQLVEIILTACPQDLIQAEDRQLIIRDILQDVHDKILDDEAAQELMPVVAGAVFTLTAHLSQAVLTEQKETSVLGPAEAHYAFMLDSCFTSPPPEENPLVGFASIGDSSLYIILKKLLDFILKTGGGFQRVRTHLYGSLLYYLQIAQRPDEPDTLEAAKKTMWERLTAPEDVFSKLQRENIAIIESYGAALMEVVCRDACDGHEIGRMLALALLDRIVSVDKQQQWLLYLSNSGYLKVLVDSLVEDDRTLQSLLTPQPPLLKALYTYESKMAFLTRVAKIQQGALELLRSGVIVRLAQCQVYDMRPETDPQSMFGMRDPPMFIPTPVDRYRQILLPALQLCQVILTSSMAQHLQAAGQVLQFLISHSDTIQAILRCQDVSAGSLQELALLTGIISKAALPGILSELDVDVNEGSLMELQGHIGRFQRQCLGLLSRFGGSDRLRQFKFQDDNVEGDKVSKKDEIELAMQQICANVMEYCQSLMLQSSPTFQHAVCLFTPSLSETVNRDGPRQDTQAPVVPYWRLPGLGIIIYLLKQSANDFFSYYDSHRQSVSKLQNVEQLPPDEIKELCQSVMPAGVDKISTAQKYVLARRRLVKVINNRAKLLSLCSFIIETCLFILWRHLEYYLLHCMPTDSQDSLFASRTLFKSRRLQDSFASETNLDFRSGLAIVSQHDLDQLQADAINAFGESLQKKLLDIEGLYSKVRSRYSFIQALVRRIRGLLRISRN

SEQ ID NO: 56325 - protein, 249 aa, Homo sapiens
MSLRNYSEREVSDLIKECRQSLAESLFAWACQSPLGKEDTLLLIGHLERVTVEANGSLDAVNLALLMALLYCFDISFIEQSTEERDDMIHQLPLLTEKQYIATIHSRLQDSQLWKLPGLQATVRLAWALALRGISQLPDVTALAEFTEADEAMAELAIADNVFLFLMESVVVSEYFYQEEFYIRRVHNLITDFLALMPMKVKQLRNRADEDARMIHMSMQMGNEPPISLRRDLEHLMLLVSKLLVLRLN

SEQ ID NO: 56326 - protein, 1887 aa, Homo sapiens
MAARGRGLLLLTLSVLLAAGPSAAAAKLNIPKVLLPFTRATRVNFTLEASEGCYRWLSTRPEVASIEPLGLDEQQCSQKAVVQARLTQPARLTSIIFAEDITTGQVLRCDAIVDLIHDIQIVSTTRELYLEDSPLELKIQALDSEGNTFSTLAGLVFEWTIVKDSEADRFSDSHNALRILTFLESTYIPPSYISEMEKAAKQGDTILVSGMKTGSSKLKARIQEAVYKNVRPAEVRLLILENILLNPAYDVYLMVGTSIHYKVQKIRQGKITELSMPSDQYELQLQNSIPGPEGDPARPVAVLAQDTSMVTALQLGQSSLVLGHRSIRMQGASRLPNSTIYVVEPGYLGFTVHPGDRWVLETGRLYEITIEVFDKFSNKVYVSDNIRIETVLPAEFFEVLSSSQNGSYHRIRALKRGQTAIDAALTSVVDQDGGVHILQVPVWNQQEVEIHIPITLYPSILTFPWQPKTGAYQYTIRAHGGSGNFSWSSSSHLVATVTVKGVMTTGSDIGFSVIQAHDVQNPLHFGEMKVYVIEPHSMEFAPCQVEARVGQALELPLRISGLMPGGASEVVTLSDCSHFDLAVEVENQGVFQPLPGRLPPGSEHCSGIRVKAEAQGSTTLLVSYRHGHVHLSAKITIAAYLPLKAVDPSSVALVTLGSSKEMLFEGGPRPWILEPSKFFQNVTAEDTDSIGLALFAPHSSRNYQQHWILVTCQALGEQVIALSVGNKPSLTNPFPAVEPAVVKFVCAPPSRLTLAPVYTSPQLDMSCPLLQQNKQVVPVSSHRNPRLDLAAYDQEGRRFDNFSSLSIQWESTRPVLASIEPELPMQLVSQDDESGQKKLHGLQAILVHEASGTTAITATATGYQESHLSSARTKQPHDPLVPLSASIELILVEDVRVSPEEVTIYNHPGIQAELRIREGSGYFFLNTSTADVVKVAYQEARGVAMVHPLLPGSSTIMIHDLCLVFPAPAKAVVYVSDIQELYIRVVDKVEIGKTVKAYVRVLDLHKKPFLAKYFPFMDLKLRAASPIITLVALDEALDNYTITFLIRGVAIGQTSLTASVTNKAGQRINSAPQQIEVFPPFRLMPRKVTLLIGATMQVTSEGGPQPQSNILFSISNESVALVSAAGLVQGLAIGNGTVSGLVQAVDAETGKVVIISQDLVQVEVLLLRAVRIRAPIMRMRTGTQMPIYVTGITNHQNPFSFGNAVPGLTFHWSVTKRDVLDLRGRHHEASIRLPSQYNFAMNVLGRVKGRTGLRVVVKAVDPTSGQLYGLARELSDEIQVQVFEKLQLLNPEIEAEQILMSPNSYIKLQTNRDGAASLSYRVLDGPEKVPVVHVDEKGFLASGSMIGTSTIEVIAQEPFGANQTIIVAVKVSPVSYLRVSMSPVLHTQNKEALVAVPLGMTVTFTVHFHDNSGDVFHAHSSVLNFATNRDDFVQIGKGPTNNTCVVRTVSVGLTLLRVWDAEHPGLSDFMPLPVLQAISPELSGAMVVGDVLCLATVLTSLEGLSGTWSSSANSILHIDPKTGVAVARAVGSVTVYYEVAGHLRTYKEVVVSVPQRIMARHLHPIQTSFQEATASKVIVAVGDRSSNLRGECTPTQREVIQALHPETLISCQSQFKPAVFDFPSQDVFTVEPQFDTALGQYFCSITMHRLTDKQRKHLSMKKTALVVSASLSSSHFSTEQVGAEVPFSPGLFADQAEILLSNHYTSSEIRVFGAPEVLENLEVKSGSPAVLAFAKEKSFGWPSFITYTVGVLDPAAGSQGPLSTTLTFSSPVTNQAIAIPVTVAFVVDRRGPGPYGASLFQHFLDSYQVMFFTLFALLAGTAVMIIAYHTVCTPRDLAVPAALTPRASPGHSPHYFAASSPTSPNALPPARKASPPSGLWSPAYASH

SEQ ID NO: 56327 - protein, 2090 aa, Homo sapiens
MGDEMDAMIPEREMKDFQFRALKKVRIFDSPEELPKERSSLLAVSNKYGLVFAGGASGLQIFPTKNLLIQNKPGDDPNKIVDKVQGLLVPMKFPIHHLALSCDNLTLSACMMSSEYGSIIAFFDVRTFSNEAKQQKRPFAYHKLLKDAGGMVIDMKWNPTVPSMVAVCLADGSIAVLQVTETVKVCATLPSTVAVTSVCWSPKGKQLAVGKQNGTVVQYLPTLQEKKVIPCPPFYESDHPVRVLDVLWIGTYVFAIVYAAADGTLETSPDVVMALLPKKEEKHPEIFVNFMEPCYGSCTERQHHYYLSYIEEWDLVLAASAASTEVSILARQSDQINWESWLLEDSSRAELPVTDKSDDSLPMGVVVDYTNQVEITISDEKTLPPAPVLMLLSTDGVLCPFYMINQNPGVKSLIKTPERLSLEGERQPKSPGSTPTTPTSSQAPQKLDASAAAAPASLPPSSPAAPIATFSLLPAGGAPTVFSFGSSSLKSSATVTGEPPSYSSGSDSSKAAPGPGPSTFSFVPPSKASLAPTPAASPVAPSAASFSFGSSGFKPTLESTPVPSVSAPNIAMKPSFPPSTSAVKVNLSEKFTAAATSTPVSSSQSAPPMSPFSSASKPAASGPLSHPTPLSAPPSSVPLKSSVLPSPSGRSAQGSSSPVPSMVQKSPRITPPAAKPGSPQAKSLQPAVAEKQGHQWKDSDPVMAGIGEEIAHFQKELEELKARTSKACFQVGTSEEMKMLRTESDDLHTFLLEIKETTESLHGDISSLKTTLLEGFAGVEEAREQNERNRDSGYLHLLYKRPLDPKSEAQLQEIRRLHQYVKFAVQDVNDVLDLEWDQHLEQKKKQRHLLVPERETLFNTLANNREIINQQRKRLNHLVDSLQQLRLYKQTSLWSLSSAVPSQSSIHSFDSDLESLCNALLKTTIESHTKSLPKVPAKLSPMKQAQLRNFLAKRKTPPVRSTAPASLSRSAFLSQRYYEDLDEVSSTSSVSQSLESEDARTSCKDDEAVVQAPRHAPVVRTPSIQPSLLPHAAPFAKSHLVHGSSPGVMGTSVATSASKIIPQGADSTMLATKTVKHGAPSPSHPISAPQAAAAAALRRQMASQAPAVNTLTESTLKNVPQVVNVQELKNNPATPSTAMGSSVPYSTAKTPHPVLTPVAANQAKQGSLINSLKPSGPTPASGQLSSGDKASGTAKIETAVTSTPSASGQFSKPFSFSPSGTGFNFGIITPTPSSNFTAAQGATPSTKESSQPDAFSSGGGSKPSYEAIPESSPPSGITSASNTTPGEPAASSSRPVAPSGTALSTTSSKLETPPSKLGELLFPSSLAGETLGSFSGLRVGQADDSTKPTNKASSTSLTSTQPTKTSGVPSGFNFTAPPVLGKHTEPPVTSSATTTSVAPPAATSTSSTAVFGSLPVTSAGSSGVISFGGTSLSAGKTSFSFGSQQTNSTVPPSAPPPTTAATPLPTSFPTLSFGSLLSSATTPSLPMSAGRSTEEATSSALPEKPGDSEVSASAASLLEEQQSAQLPQAPPQTSDSVKKEPVLAQPAVSNSGTAASSTSLVALSAEATPATTGVPDARTEAVPPASSFSVPGQTAVTAAAISSAGPVAVETSSTPIASSTTSIVAPGPSAEAAAFGTVTSGSSVFAQPPAASSSSAFNQLTNNTATAPSATPVFGQVAASTAPSLFGQQTGSTASTAAATPQVSSSGFSSPAFGTTAPGVFGQTTFGQASVFGQSASSAASVFSFSQPGFSSVPAFGQPASSTPTSTSGSVFGAASSTSSSSSFSFGQSSPNTGGGLFGQSNAPAFGQSPGFGQGGSVFGGTSAATTTAATSGFSFCQASGFGSSNTGSVFGQAASTGGIVFGQQSSSSSGSVFGSGNTGRGGGFFSGLGGKPSQDAANKNPFSSASGGFGSTATSNTSNLFGNSGAKTFGGFASSSFGEQKPTGTFSSGGGSVASQGFGFSSPNKTGGFGAAPVFGSPPTFGGSPGFGGVPAFGSAPAFTSPLGSTGGKVFGEGTAAASAGGFGFGSSSNTTSFGTLASQNAPTFGSLSQQTSGFGTQSSGFSGFGSGTGGFSFGSNNSSVQGFGGWRS

SEQ ID NO: 56328 - protein, 2080 aa, Homo sapiens
MGDEMDAMIPEREMKDFQFRALKKVRIFDSPEELPKERSSLLAVSNKYGLVFAGGASGLQIFPTKNLLIQNKPGDDPNKIVDKVQGLLVPMKFPIHHLALSCDNLTLSACMMSSEYGSIIAFFDVRTFSNEAKQQKRPFAYHKLLKDAGGMVIDMKWNPTVPSMVAVCLADGSIAVLQVTETVKVCATLPSTVAVTSVCWSPKGKQLAVGKQNGTVVQYLPTLQEKKVIPCPPFYESDHPVRVLDVLWIGTYVFAIVYAAADGTLETSPDVVMALLPKKEEKHPEIFVNFMEPCYGSCTERQHHYYLSYIEEWDLVLAASAASTEVSILARQSDQINWESWLLEDSSRAELPVTDKSDDSLPMGVVVDYTNQVEITISDEKTLPPAPVLMLLSTDGVLCPFYMINQNPGVKSLIKTPERLSLEGERQPKSPGSTPTTPTSSQAPQKLDASAAAAPASLPPSSPAAPIATFSLLPAGGAPTVFSFGSSSLKSSATVTGEPPSYSSGSDSSKAAPGPGPSTFSFVPPSKASLAPTPAASPVAPSAASFSFGSSGFKPTLESTPVPSVSAPNIAMKPSFPPSTSAVKVNLSENSSQSAPPMSPFSSASKPAASGPLSHPTPLSAPPSSVPLKSSVLPSPSAGRSAQGSSSPVPSMVQKSPRITPPAAKPGSPQAKSLQPAVAEKQGHQWKDSDPVMAGIGEEIAHFQKELEELKARTSKACFQVGTSEEMKMLRTESDDLHTFLLEIKETTESLHGDISSLKTTLLEGFAGVEEAREQNERNRDSGYLHLLYKRPLDPKSEAQLQEIRRLHQYVKFAVQDVNDVLDLEWDQHLEQKKKQRHLLVPERETLFNTLANNREIINQQRKRLNHLVDSLQQLRLYKQTSLWSLSSAVPSQSSIHSFDSDLESLCNALLKTTIESHTKSLPKVPAKLSPMKQAQLRNFLAKRKTPPVRSTAPASLSRSAFLSQRYYEDLDEVSSTSSVSQSLESEDARTSCKDDEAVVQAPRHAPVVRTPSIQPSLLPHAAPFAKSHLVHGSSPGVMGTSVATSASKIIPQGADSTMLATKTVKHGAPSPSHPISAPQAAAAAALRRQMASQAPAVNTLTESTLKNVPQVVNVQELKNNPATPSTAMGSSVPYSTAKTPHPVLTPVAANQAKQGSLINSLKPSGPTPASGQLSSGDKASGTAKIETAVTSTPSASGQFSKPFSFSPSGTGFNFGIITPTPSSNFTAAQGATPSTKESSQPDAFSSGGGSKPSYEAIPESSPPSGITSASNTTPGEPAASSSRPVAPSGTALSTTSSKLETPPSKLGELLFPSSLAGETLGSFSGLRVGQADDSTKPTNKASSTSLTSTQPTKTSGVPSGFNFTAPPVLGKHTEPPVTSSATTTSVAPPAATSTSSTAVFGSLPVTSAGSSGVISFGGTSLSAGKTSFSFGSQQTNSTVPPSAPPPTTAATPLPTSFPTLSFGSLLSSATTPSLPMSAGRSTEEATSSALPEKPGDSEVSASAASLLEEQQSAQLPQAPPQTSDSVKKEPVLAQPAVSNSGTAASSTSLVALSAEATPATTGVPDARTEAVPPASSFSVPGQTAVTAAAISSAGPVAVETSSTPIASSTTSIVAPGPSAEAAAFGTVTSGSSVFAQPPAASSSSAFNQLTNNTATAPSATPVFGQVAASTAPSLFGQQTGSTASTAAATPQVSSSGFSSPAFGTTAPGVFGQTTFGQASVFGQSASSAASVFSFSQPGFSSVPAFGQPASSTPTSTSGSVFGAASSTSSSSSFSFGQSSPNTGGGLFGQSNAPAFGQSPGFGQGGSVFGGTSAATTTAATSGFSFCQASGFGSSNTGSVFGQAASTGGIVFGQQSSSSSGSVFGSGNTGRGGGFFSGLGGKPSQDAANKNPFSSASGGFGSTATSNTSNLFGNSGAKTFGGFASSSFGEQKPTGTFSSGGGSVASQGFGFSSPNKTGGFGAAPVFGSPPTFGGSPGFGGVPAFGSAPAFTSPLGSTGGKVFGEGTAAASAGGFGFGSSSNTTSFGTLASQNAPTFGSLSQQTSGFGTQSSGFSGFGSGTGGFSFGSNNSSVQGFGGWRS

SEQ ID NO: 56329 - protein, 1519 aa, Homo sapiens
MKPSFPPSTSAVKVNLSEKFTAAATSTPVSSSQSAPPMSPFSSASKPAASGPLSHPTPLSAPPSSVPLKSSVLPSPSGRSAQGSSSPVPSMVQKSPRITPPAAKPGSPQAKSLQPAVAEKQGHQWKDSDPVMAGIGEEIAHFQKELEELKARTSKACFQVGTSEEMKMLRTESDDLHTFLLEIKETTESLHGDISSLKTTLLEGFAGVEEAREQNERNRDSGYLHLLYKRPLDPKSEAQLQEIRRLHQYVKFAVQDVNDVLDLEWDQHLEQKKKQRHLLVPERETLFNTLANNREIINQQRKRLNHLVDSLQQLRLYKQTSLWSLSSAVPSQSSIHSFDSDLESLCNALLKTTIESHTKSLPKVPAKLSPMKQAQLRNFLAKRKTPPVRSTAPASLSRSAFLSQRYYEDLDEVSSTSSVSQSLESEDARTSCKDDEAVVQAPRHAPVVRTPSIQPSLLPHAAPFAKSHLVHGSSPGVMGTSVATSASKIIPQGADSTMLATKTVKHGAPSPSHPISAPQAAAAAALRRQMASQAPAVNTLTESTLKNVPQVVNVQELKNNPATPSTAMGSSVPYSTAKTPHPVLTPVAANQAKQGSLINSLKPSGPTPASGQLSSGDKASGTAKIETAVTSTPSASGQFSKPFSFSPSGTGFNFGIITPTPSSNFTAAQGATPSTKESSQPDAFSSGGGSKPSYEAIPESSPPSGITSASNTTPGEPAASSSRPVAPSGTALSTTSSKLETPPSKLGELLFPSSLAGETLGSFSGLRVGQADDSTKPTNKASSTSLTSTQPTKTSGVPSGFNFTAPPVLGKHTEPPVTSSATTTSVAPPAATSTSSTAVFGSLPVTSAGSSGVISFGGTSLSAGKTSFSFGSQQTNSTVPPSAPPPTTAATPLPTSFPTLSFGSLLSSATTPSLPMSAGRSTEEATSSALPEKPGDSEVSASAASLLEEQQSAQLPQAPPQTSDSVKKEPVLAQPAVSNSGTAASSTSLVALSAEATPATTGVPDARTEAVPPASSFSVPGQTAVTAAAISSAGPVAVETSSTPIASSTTSIVAPGPSAEAAAFGTVTSGSSVFAQPPAASSSSAFNQLTNNTATAPSATPVFGQVAASTAPSLFGQQTGSTASTAAATPQVSSSGFSSPAFGTTAPGVFGQTTFGQASVFGQSASSAASVFSFSQPGFSSVPAFGQPASSTPTSTSGSVFGAASSTSSSSSFSFGQSSPNTGGGLFGQSNAPAFGQSPGFGQGGSVFGGTSAATTTAATSGFSFCQASGFGSSNTGSVFGQAASTGGIVFGQQSSSSSGSVFGSGNTGRGGGFFSGLGGKPSQDAANKNPFSSASGGFGSTATSNTSNLFGNSGAKTFGGFASSSFGEQKPTGTFSSGGGSVASQGFGFSSPNKTGGFGAAPVFGSPPTFGGSPGFGGVPAFGSAPAFTSPLGSTGGKVFGEGTAAASAGGFGFGSSSNTTSFGTLASQNAPTFGSLSQQTSGFGTQSSGFSGFGSGTGGFSFGSNNSSVQGFGGWRS

SEQ ID NO: 56330 - protein, 2091 aa, Homo sapiens
MGDEMDAMIPEREMKDFQFRALKKVRIFDSPEELPKERSSLLAVSNKYGLVFAGGASGLQIFPTKNLLIQNKPGDDPNKIVDKVQGLLVPMKFPIHHLALSCDNLTLSACMMSSEYGSIIAFFDVRTFSNEAKQQKRPFAYHKLLKDAGGMVIDMKWNPTVPSMVAVCLADGSIAVLQVTETVKVCATLPSTVAVTSVCWSPKGKQLAVGKQNGTVVQYLPTLQEKKVIPCPPFYESDHPVRVLDVLWIGTYVFAIVYAAADGTLETSPDVVMALLPKKEEKHPEIFVNFMEPCYGSCTERQHHYYLSYIEEWDLVLAASAASTEVSILARQSDQINWESWLLEDSSRAELPVTDKSDDSLPMGVVVDYTNQVEITISDEKTLPPAPVLMLLSTDGVLCPFYMINQNPGVKSLIKTPERLSLEGERQPKSPGSTPTTPTSSQAPQKLDASAAAAPASLPPSSPAAPIATFSLLPAGGAPTVFSFGSSSLKSSATVTGEPPSYSSGSDSSKAAPGPGPSTFSFVPPSKASLAPTPAASPVAPSAASFSFGSSGFKPTLESTPVPSVSAPNIAMKPSFPPSTSAVKVNLSEKFTAAATSTPVSSSQSAPPMSPFSSASKPAASGPLSHPTPLSAPPSSVPLKSSVLPSPSAGRSAQGSSSPVPSMVQKSPRITPPAAKPGSPQAKSLQPAVAEKQGHQWKDSDPVMAGIGEEIAHFQKELEELKARTSKACFQVGTSEEMKMLRTESDDLHTFLLEIKETTESLHGDISSLKTTLLEGFAGVEEAREQNERNRDSGYLHLLYKRPLDPKSEAQLQEIRRLHQYVKFAVQDVNDVLDLEWDQHLEQKKKQRHLLVPERETLFNTLANNREIINQQRKRLNHLVDSLQQLRLYKQTSLWSLSSAVPSQSSIHSFDSDLESLCNALLKTTIESHTKSLPKVPAKLSPMKQAQLRNFLAKRKTPPVRSTAPASLSRSAFLSQRYYEDLDEVSSTSSVSQSLESEDARTSCKDDEAVVQAPRHAPVVRTPSIQPSLLPHAAPFAKSHLVHGSSPGVMGTSVATSASKIIPQGADSTMLATKTVKHGAPSPSHPISAPQAAAAAALRRQMASQAPAVNTLTESTLKNVPQVVNVQELKNNPATPSTAMGSSVPYSTAKTPHPVLTPVAANQAKQGSLINSLKPSGPTPASGQLSSGDKASGTAKIETAVTSTPSASGQFSKPFSFSPSGTGFNFGIITPTPSSNFTAAQGATPSTKESSQPDAFSSGGGSKPSYEAIPESSPPSGITSASNTTPGEPAASSSRPVAPSGTALSTTSSKLETPPSKLGELLFPSSLAGETLGSFSGLRVGQADDSTKPTNKASSTSLTSTQPTKTSGVPSGFNFTAPPVLGKHTEPPVTSSATTTSVAPPAATSTSSTAVFGSLPVTSAGSSGVISFGGTSLSAGKTSFSFGSQQTNSTVPPSAPPPTTAATPLPTSFPTLSFGSLLSSATTPSLPMSAGRSTEEATSSALPEKPGDSEVSASAASLLEEQQSAQLPQAPPQTSDSVKKEPVLAQPAVSNSGTAASSTSLVALSAEATPATTGVPDARTEAVPPASSFSVPGQTAVTAAAISSAGPVAVETSSTPIASSTTSIVAPGPSAEAAAFGTVTSGSSVFAQPPAASSSSAFNQLTNNTATAPSATPVFGQVAASTAPSLFGQQTGSTASTAAATPQVSSSGFSSPAFGTTAPGVFGQTTFGQASVFGQSASSAASVFSFSQPGFSSVPAFGQPASSTPTSTSGSVFGAASSTSSSSSFSFGQSSPNTGGGLFGQSNAPAFGQSPGFGQGGSVFGGTSAATTTAATSGFSFCQASGFGSSNTGSVFGQAASTGGIVFGQQSSSSSGSVFGSGNTGRGGGFFSGLGGKPSQDAANKNPFSSASGGFGSTATSNTSNLFGNSGAKTFGGFASSSFGEQKPTGTFSSGGGSVASQGFGFSSPNKTGGFGAAPVFGSPPTFGGSPGFGGVPAFGSAPAFTSPLGSTGGKVFGEGTAAASAGGFGFGSSSNTTSFGTLASQNAPTFGSLSQQTSGFGTQSSGFSGFGSGTGGFSFGSNNSSVQGFGGWRS

SEQ ID NO: 56331 - protein, 78 aa, Homo sapiens
GEGTAAASAGGFGFGSSSNTTSFGTLASQNAPTFGSLSQQTSGFGTQSSGFSGFGSGTGGFSFGSNNSSVQGFGGWRS

SEQ ID NO: 56332 - protein, 1684 aa, Homo sapiens
GAEGRKFAVERPGFRGQGRGRQRWLLRHTTPTSSQAPQKLDASAAAAPASLPPSSPAAPIATFSLLPAGGAPTVFSFGSSSLKSSATVTGEPPSYSSGSDSSKAAPGPGPSTFSFVPPSKASLAPTPAASPVAPSAASFSFGSSGFKPTLESTPVPSVSAPNIAMKPSFPPSTSAVKVNLSEKFTAAATSTPVSSSQSAPPMSPFSSASKPAASGPLSHPTPLSAPPSSVPLKSSVLPSPSAGRSAQGSSSPVPSMVQKSPRITPPAAKPGSPQAKSLQPAVAEKQGHQWKDSDPVMAGIGEEIAHFQKELEELKARTSKACFQVGTSEEMKMLRTESDDLHTFLLEIKETTESLHGDISSLKTTLLEGFAGVEEAREQNERNRDSGYLHLLYKRPLDPKSEAQLQEIRRLHQYVKFAVQDVNDVLDLEWDQHLEQKKKQRHLLVPERETLFNTLANNREIINQQRKRLNHLVDSLQQLRLYKQTSLWSLSSAVPSQSSIHSFDSDLESLCNALLKTTIESHTKSLPKVPAKLSPMKQAQLRNFLAKRKTPPVRSTAPASLSRSAFLSQRYYEDLDEVSSTSSVSQSLESEDARTSCKDDEAVVQAPRHAPVVRTPSIQPSLLPHAAPFAKSHLVHGSSPGVMGTSVATSASKIIPQGADSTMLATKTVKHGAPSPSHPISAPQAAAAAALRRQMASQAPAVNTLTESTLKNVPQVVNVQELKNNPATPSTAMGSSVPYSTAKTPHPVLTPVAANQAKQGSLINSLKPSGPTPASGQLSSGDKASGTAKIETAVTSTPSASGQFSKPFSFSPSGTGFNFGIITPTPSSNFTAAQGATPSTKESSQPDAFSSGGGSKPSYEAIPESSPPSGITSASNTTPGEPAASSSRPVAPSGTALSTTSSKLETPPSKLGELLFPSSLAGETLGSFSGLRVGQADDSTKPTNKASSTSLTSTQPTKTSGVPSGFNFTAPPVLGKHTEPPVTSSATTTSVAPPAATSTSSTAVFGSLPVTSAGSSGVISFGGTSLSAGKTSFSFGSQQTNSTVPPSAPPPTTAATPLPTSFPTLSFGSLLSSATTPSLPMSAGRSTEEATSSALPEKPGDSEVSASAASLLEEQQSAQLPQAPPQTSDSVKKEPVLAQPAVSNSGTAASSTSLVALSAEATPATTGVPDARTEAVPPASSFSVPGQTAVTAAAISSAGPVAVETSSTPIASSTTSIVAPGPSAEAAAFGTVTSGSSVFAQPPAASSSSAFNQLTNNTATAPSATPVFGQVAASTAPSLFGQQTGSTASTAAATPQVSSSGFSSPAFGTTAPGVFGQTTFGQASVFGQSASSAASVFSFSQPGFSSVPAFGQPASSTPTSTSGSVFGAASSTSSSSSFSFGQSSPNTGGGLFGQSNAPAFGQSPGFGQGGSVFGGTSAATTTAATSGFSFCQASGFGSSNTGSVFGQAASTGGIVFGQQSSSSSGSVFGSGNTGRGGGFFSGLGGKPSQDAANKNPFSSASGGFGSTATSNTSNLFGNSGAKTFGGFASSSFGEQKPTGTFSSGGGSVASQGFGFSSPNKTGGFGAAPVFGSPPTFGGSPGFGGVPAFGSAPAFTSPLGSTGGKVFGEGTAAASAGGFGFGSSSNTTSFGTLASQNAPTFGSLSQQTSGFGTQSSGFSGFGSGTGGFSFGSNNSSVQGFGGWRS

SEQ ID NO: 56333 - protein, 2093 aa, Homo sapiens
MGDEMDAMIPEREMKDFQFRALKKVRIFDSPEELPKERSSLLAVSNKYGLVFAGGASGLQIFPTKNLLIQNKPGDDPNKIVDKVQGLLVPMKFPIHHLALSCDNLTLSACMMSSEYGSIIAFFDVRTFSNEAKQQKRPFAYHKLLKDAGGMVIDMKWNPTVPSMVAVCLADGSIAVLQVTETVKVCATLPSTVAVTSVCWSPKGKQLAVGKQNGTVVQYLPTLQEKKVIPCPPFYESDHPVRVLDVLWIGTYVFAIVYAAADGTLETSPDVVMALLPKKEEKHPEIFVNFMEPCYGSCTERQHHYYLSYIEEWDLVLAASAASTEVSILARQSDQINWESWLLEDSSRAELPVTDKSDDSLPMGVVVDYTNQVEITISDEKTLPPAPVLMLLSTDGVLCPFYMINQNPGVKSLIKTPERLSLEGERQPKSPGSTPTTPTSSQAPQKLDASAAAAPASLPPSSPAAPIATFSLLPAGGAPTVFSFGSSSLKSSATVTGEPPSYSSGSDSSKAAPGPGPSTFSFVPPSKASLAPTPAASPVAPSAASFSFGSSGFKPTLESTPVPSVSAPNIAMKPSFPPSTSAVKVNLSENSSQSAPPMSPFSSASKPAASGPLSHPTPLSAPPSSVPLKSSVLPSPSGRSAQGSSSPVPSMVQKSPRITPPAAKPGSPQAKSLQPAVAEKQGHQWKDSDPVMAGIGEEIAHFQKELEELKARTSKACFQVGTSEEMKMLRTESDDLHTFLLEIKETTESLHGDISSLKTTLLEGFAGVEEAREQNERNRDSGYLHLLYKRPLDPKSEAQLQEIRRLHQYVKFAVQDVNDVLDLEWDQHLEQKKKQRHLLVPERETLFNTLANNREIINQQRKRLNHLVDSLQQLRLYKQTSLWSLSSAVPSQSSIHSFDSDLESLCNALLKTTIESHTKSLPKVPAKLSPMKQAQLRNFLAKRKTPPVRSTAPASLSRSAFLSQRYYEDLDEVSSTSSVSQSLESEDARTSCKDDEAVVQAPRHAPVVRTPSIQPSLLPHAAPFAKSHLVHGSSPGVMGTSVATSASKIIPQGADSTMLATKTVKHGAPSPSHPISAPQAAAAAALRRQMASQAPAVNTLTESTLKNVPQVVNVQELKNNPATPSTAKTPHPVLTPVAANQAKQGSLINSLKPSGPTPASGQLSSGDKASGTAKIETAVTSTPSASGQFSKPFSFSPSGTGFNFGIITPTPSSNFTAAQGATPSTKESSQPDAFSSGGGSKPSYEAIPESSPPSGITSASNTTPGEPAASSSRPVAPSGTALSTTSSKLETPPSKLGELLFPSSLAGETLGSFSGLRVGQADDSTKPTNKASSTSLTSTQPTKTSGVPSGFNFTAPPVLGKHTEPPVTSSATTTSVAPPAATSTSSTAVFGSLPVTSAGSSGVISFGGTSLSAGKTSFSFGSQQTNSTVPPSAPPPTTAATPLPTSFPTLSFGSLLSSATTPSLPMSAGRSTEEATSSALPEKPGDSEVSASAASLLEEQQSAQLPQAPPQTSDSVKKEPVLAQPAVSNSGTAASSTSLVALSAEATPATTGVPDARTEAVPPASSFSVPGQTAVTAAAISSAGPVAVETSSTPIASSTTSIVAPGPSAEAAAFGTVTSGSSVFAQPPAASSSSAFNQLTNNTATAPSATPVFGQVAASTAPSLFGQQTGSTASTAAATPQVSSSGFSSPAFGTTAPGVFGQTTFGQASVFGQSASSAASVFSFSQPGFSSVPAFGQPASSTPTSTSGSVFGAASSTSSSSSFSFGQSSPNTGGGLFGQSNAPAFGQSPGFGQGGSVFGGTSAATTTAATSGFSFCQASGFGSSNTGSVFGQAASTGGIVFGQQSSSSSGSVFGSGNTGRGGGFFSGLGGKPSQDAANKNPFSSASGGFGSTATSNTSNLFGNSGAKTFGGFASSSFGEQKPTGTFSSGGGSVASQGFGFSSPNKTGGFGAAPVFGSPPTFGGSPGFGGVPAFGSAPAFTSPLGSTGGKVFGEGTAAASAGGFGSLAMSLSPTLKGRLLLMRPKAGGGREQAAPGRKSNESRSLGHLCMERALTSPLKVWEQQQHHILRHARESECPHFRITVPTDFWFWDPE

SEQ ID NO: 56334 - protein, 435 aa, Homo sapiens
MKSSLLLRGVHFCFHLPGATPSTKESSQPDAFSSGGGSKPSYEAIPESSPPSGITSASNTTPGEPAASSSRPVAPSGTALSTTSSKLETPPSKLGELLFPSSLAGETLGSFSGLRVGQADDSTKPTNKASSTSLTSTQPTKTSGVPSGFNFTAPPVLGKHTEPPVTSSATTTSVAPPAATSTSSTAVFGSLPVTSAGSSGVISFGGTSLSAGKTSFSFGSQQTNSTVPPSAPPPTTAATPLPTSFPTLSFGSLLSSATTPSLPMSAGRSTEEATSSALPEKPGDSEVSASAASLLEEQQSAQLPQAPPQTSDSVKKEPVLAQPAVSNSGTAASSTSLVALSAEATPATTGVPDARTEAVPPASSFSVPGQTAVTAAAISSAGPVAVETSSTPIASSTTSIVAPGPSAEAAAFGTVTSGSSVFAQPPAASSSSAFN

SEQ ID NO: 56335 - protein, 326 aa, Homo sapiens
MAAFAVEPQGPALGSEPMMLGSPTSPKPGVNAQFLPGFLMGDLPAPVTPQPRSISGPSVGVMEMRSPLLAGGSPPQPVVPAHKDKSGAPPVRSIYDDISSPGLGSTPLTSRRQPNISVMQSPLVGVTSTPGTGQSMFSPASIGQPRKTTLSPAQLDPFYTQGDSLTSEDHLDDSWVTVFGFPQASASYILLQFAQYGNILKHVMSNTGNWMHIRYQSKLQARKALSKDGRIFGESIMIGVKPCIDKSVMESSDRCALSSPSLAFTPPIKTLGTPTQPGSTPRISTMRPLATAYKASTSDYQVISDRQTPKKDESLVSKAMEYMFGW

SEQ ID NO: 56336 - protein, 309 aa, Homo sapiens
MMLGSPTSPKPGVNAQFLPGFLMGDLPAPVTPQPRSISGPSVGVMEMRSPLLAGGSPPQPVVPAHKDKSGAPPVRSIYDDISSPGLGSTPLTSRRQPNISVMQSPLVGVTSTPGTGQSMFSPASIGQPRKTTLSPAQLDPFYTQGDSLTSEDHLDDSWVTVFGFPQASASYILLQFAQYGNILKHVMSNTGNWMHIRYQSKLQARKALSKDGRIFGESIMIGVKPCIDKSVMESSDRCALSSPSLAFTPPIKTLGTPTQPGSTPRISTMRPLATAYKASTSDYQVISDRQTPKKDESLVSKAMEYMFGW

SEQ ID NO: 56337 - protein, 191 aa, Homo sapiens
MFSPASIGQPRKTTLSPAQLDPFYTQGDSLTSEDHLDDSWVTVFGFPQASASYILLQFAQYGNILKHVMSNTGNWMHIRYQSKLQARKALSKDGRIFGESIMIGVKPCIDKSVMESSDRCALSSPSLAFTPPIKTLGTPTQPGSTPRISTMRPLATAYKASTSDYQVISDRQTPKKDESLVSKAMEYMFGW

SEQ ID NO: 56338 - protein, 326 aa, Homo sapiens
MKQDASRNAAYTVDCEDYVHVVEFNPFENGDSGNLIAYGGNNYVVIGTCTFQEEEADVEGIQYKTLRTFHHGVRVDGIAWSPETRLDSLPPVIKFCTSAADMKIRLFTSDLQDKNEYKVLEGHTDFINGLVFDPKEGQEIASVSDDHTCRIWNLEGVQTAHFVLHSPGMSVCWHPEETFKLMVAEKNGTIRFYDLLAQQAILSLESEQVPLMSAHWCLKNTFKVGAVAGNDWLIWDITRSSYPQNKRPVHMDRACLFRWSTISENLFATTGYPGKMASQFQIHHLGHPQPILMGSVAVGSGLSWHRTLPLCVIGGDHKLLFWVTEV

SEQ ID NO: 56339 - protein, 51 aa, Homo sapiens
MKQDASRNAAYTVDCEDYVHVVEFNPFENGDSGNLIAYGGNNYVVIGTCTF

SEQ ID NO: 56340 - protein, 326 aa, Homo sapiens; identical to SEQ ID NO: 56338

SEQ ID NO: 56341 - protein, 380 aa, Homo sapiens
MEEIYAKFVSQKISKTRWRPLPPGSLQTAETFATGSWDNEENYISLWSIGDFGNLDSDGGFEGDHQLLCDIRHHGDVMDLQFFDQERIVAASSTGCVTVFLHHPNNQTLSVNQQWTTAHYHTGPGSPSYSSAPCTGVVCNNPEIVTVGEDGRINLFRADHKEAVRTIDNADSSTLHAVTFLRTPEILTVNSIGQLKIWDFRQQGNEPSQILSLTGDRVPLHCVDRHPNQQHVVATGGQDGMLSIWDVRQGTMPVSLLKAHEAEMWEVHFHPSNPEHLFTCSEDGSLWHWDASTDVPEKSSLFHQGGRSSTFLSHSISNQANVHQSVISSWLSTDPAKDRIEITSLLPSRSLSVNTLDVLGPCLVCGTDAEAIYVTRHLFS

SEQ ID NO: 56342 - protein, 248 aa, Homo sapiens
MGGPLSLGTDCAHTGYRRELTLCSHRLRPKVPSNQGSAGRGGAERRVLCLLFAVPAAAAFGMEEIYAKFVSQKISKTRWRPLPPGSLQTAETFATGSWDNEENYISLWSIGDFGNLDSDGGFEGDHQLLCDIRHHGDVMDLQFFDQERIVAASSTGCVTVFLHHPNNQTLSVNQQWTTAHYHTGPGSPSYSSAPCTGVVCNNPEIVTVGEDGRINLFRADHKEAVRTIGLVTECHSTVLIDIPTNSML

SEQ ID NO: 56343 - protein, 380 aa, Homo sapiens; identical to SEQ ID NO: 56341

SEQ ID NO: 56344 - protein, 468 aa, Homo sapiens
MAKRNAEKELTDRNWDQEDEAEEVGTFSMASEEVLKNRAIKKAKRRNVGFESDTGGAFKGFKGLVVPSGGGRFSGFGSGAGGKPLEGLSNGNNITSAPPFASAKAAADPKVAFGSLAANGPTTLVDKVSNPKTNGDSQQPSSSGLASSKACVGNAYHKQLAALNCSVRDWIVKHVNTNPLCDLTPIFKDYEKYLANIEQQHGNSGRNSESESNKVAAETQSPSLFGSTKLQQESTFLFHGNKTEDTPDKKMEVASEKKTDPSSLGATSASFNFGKKVDSSVLGSLSSVPLTGFSFSPGNSSLFGKDTTQSKPVSSPFPTKPLEGQAEGDSGECKGGDEEENDEPPKVVVTEVKEEDAFYSKKCKLFYKKDNEFKEKGIGTLHLKPTANQKTQLLVRADTNLGNILLNVLIPPNMPCTRTGKNNVLIVCVPNPPIDEKNATMPVTMLIRVKTSEDADELHKILLEKKDA

SEQ ID NO: 56345 - protein, 440 aa, Homo sapiens
MASEEVLKNRAIKKAKRRNVGFESDTGGAFKGFKGLVVPSGGGRFSGFGSGAGGKPLEGLSNGNNITSAPPFASAKAAADPKVAFGSLAANGPTTLVDKVSNPKTNGDSQQPSSSGLASSKACVGNAYHKQLAALNCSVRDWIVKHVNTNPLCDLTPIFKDYEKYLANIEQQHGNSGRNSESESNKVAAETQSPSLFGSTKLQQESTFLFHGNKTEDTPDKKMEVASEKKTDPSSLGATSASFNFGKKVDSSVLGSLSSVPLTGFSFSPGNSSLFGKDTTQSKPVSSPFPTKPLEGQAEGDSGECKGGDEEENDEPPKVVVTEVKEEDAFYSKKCKLFYKKDNEFKEKGIGTLHLKPTANQKTQLLVRADTNLGNILLNVLIPPNMPCTRTGKNNVLIVCVPNPPIDEKNATMPVTMLIRVKTSEDADELHKILLEKKDA

SEQ ID NO: 56346 - protein, 440 aa, Homo sapiens; identical to SEQ ID NO: 56345

SEQ ID NO: 56347 - protein, 8 aa, Homo sapiens
MASEEVLK

SEQ ID NO: 56348 - protein, 178 aa, Homo sapiens
MAKRNAEKELTDRNWDQEDEAEEVGTFSMASEEVLKNRAIKKAKRRNVGFESDTGGAFKGFKGLVVPSGGGRFSGFGSGAGGKPLEGLSNGNNITSAPPFASAKAAADPKVAFGGDEEENDEPPKVVVTEVKEEDAFYSKKCKLFYKKDNEFKEKGIGTLHLKPTANQKTQLLVRADT

SEQ ID NO: 56349 - protein, 45 aa, Homo sapiens
MAKRNAEKELTDRNWDQEDEAEEVGTFSMASEEVLKNRAIKKAKR

SEQ ID NO: 56350 - protein, 218 aa, Homo sapiens
MEVASEKKTDPSSLGATSASFNFGKKVDSSVLGSLSSVPLTGFSFSPGNSSLFGKDTTQSKPVSSPFPTKPLEGQAEGDSGECKGGDEEENDEPPKVVVTEVKEEDAFYSKKCKLFYKKDNEFKEKGIGTLHLKPTANQKTQLLVRADTNLGNILLNVLIPPNMPCTRTGKNNVLIVCVPNPPIDEKNATMPVTMLIRVKTSEDADELHKILLEKKDA

SEQ ID NO: 56351 - protein, 76 aa, Homo sapiens
MAKRNAEKELTDRNWDQEDEAEEVGTFSMASEEVLKNRAIKKAKRRNVGFEVLLLQMALPPWLIKFQIPKLMGTVS

SEQ ID NO: 56352 - protein, 4 aa, Homo sapiens
MAKR

SEQ ID NO: 56353 - protein, 10 aa, Homo sapiens
MAKRNAEKEL

SEQ ID NO: 56354 - protein, 507 aa, Homo sapiens
MAFNFGAPSGTSGTAAATAAPAGGFGGFGTTSTTAGSAFSFSAPTNTGTTGLFGGTQNKGFGFGTGFGTTTGTSTGLGTGLGTGLGFGGFNTQQQQQTTLGGLFSQPTQAPTQSNQLINTASALSAPTLLGDERDAILAKWNQLQAFWGTGKGYFNNNIPPVEFTQENPFCRFKAVGYSCMPSNKDEDGLVVLVFNKKETEIRSQQQQLVESLHKVLGGNQTLTVNVEGTKTLPDDQTEVVIYVVERSPNGTSRRVPATTLYAHFEQANIKTQLQQLGVTLSMTRTELSPAQIKQLLQNPPAGVDPIIWEQAKVDNPDSEKLIPVPMVGFKELLRRLKVQDQMTKQHQTRLDIISEDISELQKNQTTSVAKIAQYKRKLMDLSHRTLQVLIKQEIQRKSGYAIQADEEQLRVQLDTIQGELNAPTQFKGRLNELMSQIRMQNHFGAVRSEERYYIDADLLREIKQHLKQQQEGLSHLISIIKDDLEDIKLVEHGLNETIHIRGGVFS

SEQ ID NO: 56355 - protein, 291 aa, Homo sapiens
MPSNKDEDGLVVLVFNKKETEIRSQQQQLVESLHKVLGGNQTLTVNVEGTKTLPDDQTEVVIYVVERSPNGTSRRVPATTLYAHFEQANIKTQLQQLGVTLSMTRTELSPAQIKQLLQNPPAGVDPIIWEQAKVDNPDSEKLIPVPMVGFKELLRRLKVQDQMTKQHQTRLDVLIKQEIQRKSGYAIQADEEQLRVQLDTIQGELNAPTQFKGRLNELMSQIRMQNHFGAVRSEERYYIDADLLREIKQHLKQQQEGLSHLISIIKDDLEDIKLVEHGLNETIHIRGGVFS

SEQ ID NO: 56356 - protein, 327 aa, Homo sapiens
MPSNKDEDGLVVLVFNKKETEIRSQQQQLVESLHKVLGGNQTLTVNVEGTKTLPDDQTEVVIYVVERSPNGTSRRVPATTLYAHFEQANIKTQLQQLGVTLSMTRTELSPAQIKQLLQNPPAGVDPIIWEQAKVDNPDSEKLIPVPMVGFKELLRRLKVQDQMTKQHQTRLDIISEDISELQKNQTTSVAKIAQYKRKLMDLSHRTLQVLIKQEIQRKSGYAIQADEEQLRVQLDTIQGELNAPTQFKGRLNELMSQIRMQNHFGAVRSEERYYIDADLLREIKQHLKQQQEGLSHLISIIKDDLEDIKLVEHGLNETIHIRGGVFS

SEQ ID NO: 56357 - protein, 459 aa, Homo sapiens
MAFNFGAPSGTSGTAAATAAPAGGFGGFGTTSTTAGSAFSFSAPTNTGTTALGGLFSQPTQAPTQSNQLINTASALSAPTLLGDERDAILAKWNQLQAFWGTGKGYFNNNIPPVEFTQENPFCRFKAVGYSCMPSNKDEDGLVVLVFNKKETEIRSQQQQLVESLHKVLGGNQTLTVNVEGTKTLPDDQTEVVIYVVERSPNGTSRRVPATTLYAHFEQANIKTQLQQLGVTLSMTRTELSPAQIKQLLQNPPAGVDPIIWEQAKVDNPDSEKLIPVPMVGFKELLRRLKVQDQMTKQHQTRLDIISEDISELQKNQTTSVAKIAQYKRKLMDLSHRTLQVLIKQEIQRKSGYAIQADEEQLRVQLDTIQGELNAPTQFKGRLNELMSQIRMQNHFGAVRSEERYYIDADLLREIKQHLKQQQEGLSHLISIIKDDLEDIKLVEHGLNETIHIRGGVFS

SEQ ID NO: 56358 - protein, 193 aa, Homo sapiens
MSGFNFGGTGAPTGGFTFGTAKTATTTPATGFSFSTSGTGGFNFGAPFQPATSTPSTGLFSLATQTPATQTTGFTFGTATLASGGTGFSLGIGASKLNLSNTAATPAMANPSGFGLGSSNLTNAISSTVTSSQGTAPTGFVFGPSTTSVAPATTSGGFSFTGGSTAQPSGFNIGSAGNSAQPTAPATLPFTPA

SEQ ID NO: 56359 - protein, 522 aa, Homo sapiens
MSGFNFGGTGAPTGGFTFGTAKTATTTPATGFSFSTSGTGGFNFGAPFQPATSTPSTGLFSLATQTPATQTTGFTFGTATLASGGTGFSLGIGASKLNLSNTAATPAMANPSGFGLGSSNLTNAISSTVTSSQGTAPTGFVFGPSTTSVAPATTSGGFSFTGGSTAQPSGFNIGSAGNSAQPTAPATLPFTPATPAATTAGATQPAAPTPTATITSTGPSLFASIATAPTSSATTGLSLCTPVTTAGAPTAGTQGFSLKAPGAASGTSTTTSTAATATATTTSSSSTTGFALNLKPLAPAGIPSNTAAAVTAPPGPGAAAGAAASSAMTYAQLESLINKWSLELEDQERHFLQQATQVNAWDRTLIENGEKITSLHREVEKVKLDQKRLDQELDFILSQQKELEDLLSPLEELVKEQSGTIYLQHADEEREKTYKLAENIDAQLKRMAQDLKDIIEHLNTSGAPADTSDPLQQICKILNAHMDSLQWIDQNSALLQRKVEEVTKVCEGRRKEQERSFRITFD

SEQ ID NO: 56360 - protein, 522 aa, Homo sapiens; identical to SEQ ID NO: 56359

SEQ ID NO: 56361 - protein, 522 aa, Homo sapiens; identical to SEQ ID NO: 56359

SEQ ID NO: 56362 - protein, 656 aa, Homo sapiens
MEELDGEPTVTLIPGVNSKKNQMYFDWGPGEMLVCETSFNKKEKSEMVPSCPFIYIIRKDVDVYSQILRKLFNESHGIFLGLQRIDEELTGKSRKSQLVRVSKNYRSVIRACMEEMHQVAIAAKDPANGRQFSSQVSILSAMELIWNLCEILFIEVAPAGPLLLHLLDWVRLHVCEVDSLSADVLGSENPSKHDSFWNLVTILVLQGRLDEARQMLSKEADASPASAGICRIMGDLMRTMPILSPGNTQTLTELELKWQHWHEECERYLQDSTFATSPHLESLLKIMLGDEAALLEQKELLSNWYHFLVTRLLYSNPTVKPIDLHYYAQSSLDLFLGGESSPEPLDNILLAAFEFDIHQVIKECSIALSNWWFVAHLTDLLDHCKLLQSHNLYFGSNMREFLLLEYASGLFAHPSLWQLGVDYFDYCPELGRVSLELHIERIPLNTEQKALKVLRICEQRQMTEQVRSICKILAMKAVRNNRLGSALSWSIRAKDAAFATLVSDRFLRDYCERGCFSDLDLIDNLGPAMMLSDRLTFLGKYREFHRMYGEKRFADAASLLLSLMTSRIAPRSFWMTLLTDALPLLEQKQVIFSAEQTYELMRCLEDLTSRRPVHGESDTEQLQDDDIETTKVEMLRLSLARNLARAIIREGSLEGS

SEQ ID NO: 56363 - protein, 462 aa, Homo sapiens
MAASSAARSPFCQQWSSSGTCVRFFLLKWPQVTILVLQGRLDEARQMLSKEADASPASAGICRIMGDLMRTMPILSPGNTQTLTELELKWQHWHEECERYLQDSTFATSPHLESLLKIMLGDEAALLEQKELLSNWYHFLVTRLLYSNPTVKPIDLHYYAQSSLDLFLGGESSPEPLDNILLAAFEFDIHQVIKECSIALSNWWFVAHLTDLLDHCKLLQSHNLYFGSNMREFLLLEYASGLFAHPSLWQLGVDYFDYCPELGRVSLELHIERIPLNTEQKALKVLRICEQRQMTEQVRSICKILAMKAVRNNRLGSALSWSIRAKDAAFATLVSDRFLRDYCERGCFSDLDLIDNLGPAMMLSDRLTFLGKYREFHRMYGEKRFADAASLLLSLMTSRIAPRSFWMTLLTDALPLLEQKQVKVAAAVVFFACQSLLELSCIAVADVRVSSFVVLPVRVYSP

SEQ ID NO: 56364 - protein, 324 aa, Homo sapiens
MVPSCPFIYIIRKDVDVYSQILRKLFNESHGIFLGLQRIDEELTGKSRKSQLVRVSKNYRSVIRACMEEMHQVAIAAKDPANGRQFSSQVSILSAMELIWNLCEILFIEVAPAGPLLLHLLDWVRLHVCEVDSLSADVLGSENPSKHDSFWNLVTILVLQGRLDEARQMLSKEADASPASAGICRIMGDLMRTMPILSPGNTQTLTELELKWQHWHEECERYLQDSTFATSPHLESLLKIMLGDEAALLEQKELLSNWYHFLVTRLLYSNPTVKPIDLHYYAQSSLDLFLGGESSPEPLDNILLAAFEFDIHQVIKECRDVHLK

SEQ ID NO: 56365 - protein, 259 aa, Homo sapiens
MREFLLLEYASGLFAHPSLWQLGVDYFDYCPELGRVSLELHIERIPLNTEQKALKVLRICEQRQMTEQVRSICKILAMKAVRNNRLGSALSWSIRAKDAAFATLVSDRFLRDYCERGCFSDLDLIDNLGPAMMLSDRLTFLGKYREFHRMYGEKRFADAASLLLSLMTSRIAPRSFWMTLLTDALPLLEQKQVIFSAEQTYELMRCLEDLTSRRPVHGESDTEQLQDDDIETTKVEMLRLSLARNLARAIIREGSLEGS

SEQ ID NO: 56366 - protein, 610 aa, Homo sapiens
MVPSCPFIYIIRKDVDVYSQILRKLFNESHGIFLGLQRIDEELTGKSRKSQLVRVSKNYRSVIRACMEEMHQVAIAAKDPANGRQFSSQVSILSAMELIWNLCEILFIEVAPAGPLLLHLLDWVRLHVCEVDSLSADVLGSENPSKHDSFWNLVTILVLQGRLDEARQMLSKEADASPASAGICRIMGDLMRTMPILSPGNTQTLTELELKWQHWHEECERYLQDSTFATSPHLESLLKIMLGDEAALLEQKELLSNWYHFLVTRLLYSNPTVKPIDLHYYAQSSLDLFLGGESSPEPLDNILLAAFEFDIHQVIKECSIALSNWWFVAHLTDLLDHCKLLQSHNLYFGSNMREFLLLEYASGLFAHPSLWQLGVDYFDYCPELGRVSLELHIERIPLNTEQKALKVLRICEQRQMTEQVRSICKILAMKAVRNNRLGSALSWSIRAKDAAFATLVSDRFLRDYCERGCFSDLDLIDNLGPAMMLSDRLTFLGKYREFHRMYGEKRFADAASLLLSLMTSRIAPRSFWMTLLTDALPLLEQKQVIFSAEQTYELMRCLEDLTSRRPVHGESDTEQLQDDDIETTKVEMLRLSLARNLARAIIREGSLEGS

SEQ ID NO: 56367 - protein, 741 aa, Homo sapiens
MAAAEGPVGDGELWQTWLPNHVVFLRLREGLKNQSPTEAEKPASSSLPSSPPPQLLTRNVVFGLGGELFLWDGEDSSFLVVRLRGPSGGGEEPALSQYQRLLCINPPLFEIYQVLLSPTQHHVALIGIKGLMVLELPKRWGKNSEFEGGKSTVNCSTTPVAERFFTSSTSLTLKHAAWYPSEILDPHVVLLTSDNVIRIYSLREPQTPTNVIILSEAEEESLVLNKGRAYTASLGETAVAFDFGPLAAVPKTLFGQNGKDEVVAYPLYILYENGETFLTYISLLHSPGNIGKLLGPLPMHPAAEDNYGYDACAVLCLPCVPNILVIATESGMLYHCVVLEGEEEDDHTSEKSWDSRIDLIPSLYVFECVELELALKLASGEDDPFDSDFSCPVKLHRDPKCPSRYHCTHEAGVHSVGLTWIHKLHKFLGSDEEDKDSLQELSTEQKCFVEHILCTKPLPCRQPAPIRGFWIVPDILGPTMICITSTYECLIWPLLSTVHPASPPLLCTREDVEVAESPLRVLAETPDSFEKHIRSILQRSVANPAFLKASEKDIAPPPEECLQLLSRATQVFREQYILKQDLAKEEIQRRVKLLCDQKKKQLEDLSYCREERKSLREMAERLADKYEEAKEKQEDIMNRMKKLLHSFHSELPVLSDSERDMKKELQLIPDQLRHLGNAIKQVTMKKDYQQQKMEKVLSLPKPTIILSAYQRKCIQSILKEEGEHIREMVKQINDIRNHVNF

SEQ ID NO: 56368 - protein, 626 aa, Homo sapiens
MVLELPKRWGKNSEFEGGKSTVNCSTTPVAERFFTSSTSLTLKHAAWYPSEILDPHVVLLTSDNVIRIYSLREPQTPTNVIILSEAEEESLVLNKGRAYTASLGETAVAFDFGPLAAVPKTLFGQNGKDEVVAYPLYILYENGETFLTYISLLHSPGNIGKLLGPLPMHPAAEDNYGYDACAVLCLPCVPNILVIATESGMLYHCVVLEGEEEDDHTSEKSWDSRIDLIPSLYVFECVELELALKLASGEDDPFDSDFSCPVKLHRDPKCPSRYHCTHEAGVHSVGLTWIHKLHKFLGSDEEDKDSLQELSTEQKCFVEHILCTKPLPCRQPAPIRGFWIVPDILGPTMICITSTYECLIWPLLSTVHPASPPLLCTREDVEVAESPLRVLAETPDSFEKHIRSILQRSVANPAFLNCFTQLRKIKVETLFLRASEKDIAPPPEECLQLLSRATQVFREQYILKQDLAKEEIQRRVKLLCDQKKKQLEDLSYCREERKSLREMAERLADKYEEAKEKQEDIMNRMKKLLHSFHSELPVLSDSERDMKKELQLIPDQLRHLGNAIKQVTMKKDYQQQKMEKVLSLPKPTIILSAYQRKCIQSILKEEGEHIREMVKQINDIRNHVNF

SEQ ID NO: 56369 - protein, 741 aa, Homo sapiens; identical to SEQ ID NO: 56367

SEQ ID NO: 56370 - protein, 819 aa, Homo sapiens
MDTEGFGELLQQAEQLAAETEGISELPHVERNLQEIQQAGERLRSRTLTRTSQETADVKASVLLGSRGLDISHISQRLESLSAATTFEPLEPVKDTDIQGFLKNEKDNALLSAIEESRKRTFGMAEEYHRESMLVEWEQVKQRILHTLLASGEDALDFTQESEPSYISDVGPPGRSSLDNIEMAYARQIYIYNEKIVNGHLQPNLVDLCASVAELDDKSISDMWTMVKQMTDVLLTPATDALKNRSSVEVRMEFVRQALAYLEQSYKNYTLVTVFGNLHQAQLGGVPGTYQLVRSFLNIKLPAPLPGLQDGEVEGHPVWALIYYCMRCGDLLAASQVVNRAQHQLGEFKTWFQEYMNSKDRRLSPATENKLRLHYRRALRNNTDPYKRAVYCIIGRCDVTDNQSEVADKTEDYLWLKLNQVCFDDDGTSSPQDRLTLSQFQKQLLEDYGESHFTVNQQPFLYFQVLFLTAQFEAAVAFLFRMERLRCHAVHVALVLFELKLLLKSSGQSAQLLSHEPGDPPCLRRLNFVRLLMLYTRKFESTDPREALQYFYFLRDEKDSQGENMFLRCVSELVIESREFDMILGKLENDGSRKPGVIDKFTSDTKPIINKVASVAENKGLFEEAAKLYDLAKNADKVLELMNKLLSPVVPQISAPQSNKERLKNMALSIAERYRAQGISANKFVDSTFYLLLDLITFFDEYHSGHIDRAFDIIERLKLVPLNQESVEERVAAFRNFSDEIRHNLSEVLLATMNILFTQFKRLKGTSPSSSSRPQRVIEDRDSQLRSQARTLITFAGMIPYRTSGDTNARLVQMEVLMN

SEQ ID NO: 56371 - protein, 696 aa, Homo sapiens
MAEEYHRESMLVEWEQVKQRILHTLLASGEDALDFTQESEPSYISDVGPPGRSSLDNIEMAYARQIYIYNEKIVNGHLQPNLVDLCASVAELDDKSISDMWTMVKQMTDVLLTPATDALKNRSSVEVRMEFVRQALAYLEQSYKNYTLVTVFGNLHQAQLGGVPGTYQLVRSFLNIKLPAPLPGLQDGEVEGHPVWALIYYCMRCGDLLAASQVVNRAQHQLGEFKTWFQEYMNSKDRRLSPATENKLRLHYRRALRNNTDPYKRAVYCIIGRCDVTDNQSEVADKTEDYLWLKLNQVCFDDDGTSSPQDRLTLSQFQKQLLEDYGESHFTVNQQPFLYFQVLFLTAQFEAAVAFLFRMERLRCHAVHVALVLFELKLLLKSSGQSAQLLSHEPGDPPCLRRLNFVRLLMLYTRKFESTDPREALQYFYFLRDEKDSQGENMFLRCVSELVIESREFDMILGKLENDGSRKPGVIDKFTSDTKPIINKVASVAENKGLFEEAAKLYDLAKNADKVLELMNKLLSPVVPQISAPQSNKERLKNMALSIAERYRAQGISANKFVDSTFYLLLDLITFFDEYHSGHIDRAFDIIERLKLVPLNQESVEERVAAFRNFSDEIRHNLSEVLLATMNILFTQFKRLKGTSPSSSSRPQRVIEDRDSQLRSQARTLITFAGMIPYRTSGDTNARLVQMEVLMN

SEQ ID NO: 56372 - protein, 696 aa, Homo sapiens; identical to SEQ ID NO: 56371

SEQ ID NO: 56373 - protein, 1800 aa, Homo sapiens
MFNKSFGTPFGGGTGGFGTTSTFGQNTGFGTTSGGAFGTSAFGSSNNTGGLFGNSQTKPGGLFGTSSFSQPATSTSTGFGFGTSTGTANTLFGTASTGTSLFSSQNNAFAQNKPTGFGNFGTSTSSGGLFGTTNTTSNPFGSTSGSLFGPSSFTAAPTGTTIKFNPPTGTDTMVKAGVSTNISTKHQCITAMKEYESKSLEELRLEDYQANRKGPQNQVGAGTTTGLFGSSPATSSATGLFSSSTTNSGFAYGQNKTAFGTSTTGFGTNPGGLFGQQNQQTTSLFSKPFGQATTTQNTGFSFGNTSTIGQPSTNTMGLFGVTQASQPGGLFGTATNTSTGTAFGTGTGLFGQTNTGFGAVGSTLFGNNKLTTFGSSTTSAPSFGTTSGGLFGFGTNTSGNSIFGSKPAPGTLGTGLGAGFGTALGAGQASLFGNNQPKIGGPLGTGAFGAPGFNTTTATLGFGAPQAPVALTDPNASAAQQAVLQQHINSLTYSPFGDSPLFRNPMSDPKKKEERLKPTNPAAQKALTTPTHYKLTPRPATRVRPKALQTTGTAKSHLFDGLDDDEPSLANGAFMPKKSIKKLVLKNLNNSNLFSPVNRDSENLASPSEYPENGERFSFLSKPVDENHQQDGDEDSLVSHFYTNPIAKPIPQTPESAGNKHSNSNSVDDTIVALNMRAALRNGLEGSSEETSFHDESLQDDREEIENNSYHMHPAGIILTKVGYYTIPSMDDLAKITNEKGECIVSDFTIGRKGYGSIYFEGDVNLTNLNLDDIVHIRRKEVVVYLDDNQKPPVGEGLNRKAEVTLDGVWPTDKTSRCLIKSPDRLADINYEGRLEAVSRKQGAQFKEYRPETGSWVFKVSHFSKYGLQDSDEEEEEHPSKTSTKKLKTAPLPPASQTTPLQMALNGKPAPPPQSQSPEVEQLGRVVELDSDMVDITQEPVLDTMLEESMPEDQEPVSASTHIASSLGINPHVLQIMKASLLTDEEDVDMALDQRFSRLPSKADTSQEICSPRLPISASHSSKTRSLVGGLLQSKFTSGAFLSPSVSVQECRTPRAASLMNIPSTSSWSVPPPLTSVFTMPSPAPEVPLKTVGTRRQLGLVPREKSVTYGKGKLLMDMALFMGRSFRVGWGPNWTLANSGEQLNGSHELENHQIADSMEFGFLPNPVAVKPLTESPFKVHLEKLSLRQRKPDEDMKLYQTPLELKLKHSTVHVDELCPLIVPNLGVAVIHDYADWVKEASGDLPEAQIVKHWSLTWTLCEALWGHLKELDSQLNEPREYIQILERRRAFSRWLSCTATPQIEEEVSLTQKNSPVEAVFSYLTGKRISEACSLAQQSGDHRLALLLSQFVGSQSVRELLTMQLVDWHQLQADSFIQDERLRIFALLAGKPVWQLSEKKQINVCSQLDWKRSLAIHLWYLLPPTASISRALSMYEEAFQNTSDSDRYACSPLPSYLEGSGCVIAEEQNSQTPLRDVCFHLLKLYSDRHYDLNQLLEPRSITADPLDYRLSWHLWEVLRALNYTHLSAQCEGVLQASYAGQLESEGLWEWAIFVLLHIDNSGIREKAVRELLTRHCQLLETPESWAKETFLTQKLRVPAKWIHEAKAVRAHMESDKHLEALCLFKAEHWNRCHKLIIRHLASDAIINENYDYLKGFLEDLAPPERSSLIQDWETSGLVYLDYIRVIEMLRHIQQVDCSGNDLEQLHIKVTSLCSRIEQIQCYSAKDRLAQSDMAKRVANLLRVVLSLHHPPDRTSDSTPDPQRVPLRLLAPHIGRLPMPEDYAMDELRSLTQSYLRELAVGSL

SEQ ID NO: 56374 - protein, 1726 aa, Homo sapiens
MFNKSFGTPFGGGTGGFGTTSTFGQNTGFGTTSGGAFGTSAFGSSNNTGGLFGNSQTKPGGLFGTSSFSQPATSTSTGFGFGTSTGTANTLFGTASTGTSLFSSQNNAFAQNKPTGFGNFGTSTSSGGLFGTTNTTSNPFGSTSGSLFGPSSFTAAPTGTTIKFNPPTGTDTMVKAGVSTNISTKHQCITAMKEYESKSLEELRLEDYQANRKGPQNQVGAGTTTGLFGSSPATSSATGLFSSSTTNSGFAYGQNKTAFGTSTTGFGTNPGGLFGQQNQQTTSLFSKPFGQATTTQNTGFSFGNTSTIGQPSTNTMGLFGVTQASQPGGLFGTATNTSTGTAFGTGTGLFGQTNTGFGAVGSTLFGNNKLTTFGSSTTSAPSFGTTSGGLFGFGTNTSGNSIFGSKPAPGTLGTGLGAGFGTALGAGQASLFGNNQPKIGGPLGTGAFGAPGFNTTTATLGFGAPQAPVALTDPNASAAQQAVLQQHINSLTYSPFGDSPLFRNPMSDPKKKEERLKPTNPAAQKALTTPTHYKLTPRPATRVRPKALQTTGTAKSHLFDGLDDDEPSLANGAFMPKKSIKKLVLKNLNNSNLFSPVNRDSENLASPSEYPENGERFSFLSKPVDENHQQDGDEDSLVSHFYTNPIAKPIPQTPESAGNKHSNSNSVDDTIVALNMRAALRNGLEGSSEETSFHDESLQDDREEIENNSYHMHPAGIILTKVGYYTIPSMDDLAKITNEKGECIVSDFTIGRKGYGSIYFEGDVNLTNLNLDDIVHIRRKEVVVYLDDNQKPPVGEGLNRKAEVTLDGVWPTDKTSRCLIKSPDRLADINYEGRLEAVSRKQGAQFKEYRPETGSWVFKVSHFSKYGLQDSDEEEEEHPSKTSTKKLKTAPLPPASQTTPLQMALNGKPAPPPQSQSPEVEQLGRVVELDSDMVDITQEPVLDTMLEESMPEDQEPVSASTHIASSLGINPHVLQIMKASLLTDEEDVDMALDQRFSRLPSKADTSQEICSPRLPISASHSSKTRSLVGGLLQSKFTSGAFLSPSVSVQECRTPRAASLMNIPSTSSWSVPPPLTSVFTMPSPAPEVPLKTVGTRRQLGLVPREKSVTYGKGKLLMDMALFMGRSFRVGWGPNWTLANSGEQLNGSHELENHQIADSMEFGFLPNPVAVKPLTESPFKVHLEKLSLRQRKPDEDMKLYQTPLELKLKHSTVHVDELCPLIVPNLGVAVIHDYADWVKEASGDLPEAQIVKHWSLTWTLCEALWGHLKELDSQLNEPREYIQILERRRAFSRWLSCTATPQIEEEVSLTQKNSPVEAVFSYLTGKRISEACSLAQQSGDHRLALLLSQFVGSQSVRELLTMQLVDWHQLQADSFIQDERLRIFALLAGKPVWQLSEKKQINVCSQLDWKRSLAIHLWYLLPPTASISRALSMYEEAFQNTSDSDRYACSPLPSYLEGSGCVIAEEQNSQTPLRDVCFHLLKLYSDSIREKAVRELLTRHCQLLETPESWAKETFLTQKLRVPAKWIHEAKAVRAHMESDKHLEALCLFKAEHWNRCHKLIIRHLASDAIINENYDYLKGFLEDLAPPERSSLIQDWETSGLVYLDYIRVIEMLRHIQQVDCSGNDLEQLHIKVTSLCSRIEQIQCYSAKDRLAQSDMAKRVANLLRVVLSLHHPPDRTSDSTPDPQRVPLRLLAPHIGRLPMPEDYAMDELRSLTQSYLRELAVGSL

SEQ ID NO: 56375 - protein, 1638 aa, Homo sapiens
MFNKSFGTPFGGGTGGFGTTSTFGQNTGFGTTSGGAFGTSAFGSSNNTGGLFGNSQTKPGGLFGTSSFSQPATSTSTGFGFGTSTGTANTLFGTASTGTSLFSSQNNAFAQNKPTGFGNFGTSTSSGGLFGTTNTTSNPFGSTSGSLFGPSSFTAAPTGTTIKFNPPTGTDTMVKAGVSTNISTKHQCITAMKEYESKSLEELRLEDYQANRKGPQNQVGAGTTTGLFGSSPATSSATGLFSSSTTNSGFAYGQNKTAFGTSTTGFGTNPGGLFGQQNQQTTSLFSKPFGQATTTQNTGFSFGNTSTIGQPSTNTMGLFGVTQASQPGGLFGTATNTSTGTAFGTGTGLFGQTNTGFGAVGSTLFGNNKLTTFGSSTTSAPSFGTTSGGLFGFGTNTSGNSIFGSKPAPGTLGTGLGAGFGTALGAGQASLFGNNQPKIGGPLGTGAFGAPGFNTTTATLGFGAPQAPVALTDPNASAAQQAVLQQHINSLTYSPFGDSPLFRNPMSDPKKKEERLKPTNPAAQKALTTPTHYKLTPRPATRVRPKALQTTGTAKSHLFDGLDDDEPSLANGAFMPKKSIKKLVLKNLNNSNLFSPVNRDSENLASPSEYPENGERFSFLSKPVDENHQQDGDEDSLVSHFYTNPIAKPIPQTPESAGNKHSNSNSVDDTIVALNMRAALRNGLEGSSEETSFHDESLQDDREEIENNSYHMHPAGIILTKVGYYTIPSMDDLAKITNEKGECIVSDFTIGRKGYGSIYFEGDVNLTNLNLDDIVHIRRKEVVVYLDDNQKPPVGEGLNRKAEVTLDGVWPTDKTSRCLIKSPDRLADINYEGRLEAVSRKQGAQFKEYRPETGSWVFKVSHFSKYGLQDSDEEEEEHPSKTSTKKLKTAPLPPASQTTPLQMALNGKPAPPPQSQSPEVEQLGRVVELDSDMVDITQEPVLDTMLEESMPEDQEPVSASTHIASSLGINPHVLQIMKASLLTDEEDVDMALDQRFSRLPSKADTSQEICSPRLPISASHSSKTRSLVGGLLQSKFTSGAFLSPSVSVQECRTPRAASLMNIPSTSSWSVPPPLTSVFTMPSPAPEVPLKTVGTRRQLGLVPREKSVTYGKGKLLMDMALFMGRSFRVGWGPNWTLANSGEQLNGSHELENHQIADSMEFGFLPNPVAVKPLTESPFKVHLEKLSLRQRKPDEDMKLYQTPLELKLKHSTVHVDELCPLIVPNLGVAVIHDYADWVKEASGDLPEAQIVKHWSLTWTLCEALWGHLKELDSQLNEPREYIQILERRRAFSRWLSCTATPQIEEEVSLTQKNSPVEAVFSYLTGKRISEACSLAQQSGDHRLALLLSQFVGSQSVRELLTMQLVDWHQLQADSFIQDERLRIFALLAGKPVWQLSEKKQINVCSQLDWKRSLAIHLWYLLPPTASISRALSMYEEAFQNTSDSDRYACSPLPSYLEGSGCVIAEEQNSQTPLRDVCFHLLKLYSDSIREKAVRELLTRHCQLLETPESWAKETFLTQKLRVPAKWIHEAKAVRAHMESDKHLEALCLFKAEHWNRCHKLIIRHLASDAIINENYDYLKGFLEDLAPPERSSLIQDWETSGLVYLDYIRVIEMLRHIQQIALFCVEWIAQVMTWSSYTSK

SEQ ID NO: 56376 - protein, 920 aa, Homo sapiens
MFNKSFGTPFGGGTGGFGTTSTFGQNTGFGTTSGGAFGTSAFGSSNNTGGLFGNSQTKPGGLFGTSSFSQPATSTSTGFGFGTSTGTANTLFGTASTGTSLFSSQNNAFAQNKPTGFGNFGTSTSSGGLFGTTNTTSNPFGSTSGSLFGPSSFTAAPTGTTIKFNPPTGTDTMVKAGVSTNISTKHQCITAMKEYESKSLEELRLEDYQANRKGPQNQVGAGTTTGLFGSSPATSSATGLFSSSTTNSGFAYGQNKTAFGTSTTGFGTNPGGLFGQQNQQTTSLFSKPFGQATTTQNTGFSFGNTSTIGQPSTNTMGLFGVTQASQPGGLFGTATNTSTGTAFGTGTGLFGQTNTGFGAVGSTLFGNNKLTTFGSSTTSAPSFGTTSGGLFGFGTNTSGNSIFGSKPAPGTLGTGLGAGFGTALGAGQASLFGNNQPKIGGPLGTGAFGAPGFNTTTATLGFGAPQAPVALTDPNASAAQQAVLQQHINSLTYSPFGDSPLFRNPMSDPKKKEERLKPTNPAAQKALTTPTHYKLTPRPATRVRPKALQTTGTAKSHLFDGLDDDEPSLANGAFMPKKSIKKLVLKNLNNSNLFSPVNRDSENLASPSEYPENGERFSFLSKPVDENHQQDGDEDSLVSHFYTNPIAKPIPQTPESAGNKHSNSNSVDDTIVALNMRAALRNGLEGSSEETSFHDESLQDDREEIENNSYHMHPAGIILTKVGYYTIPSMDDLAKITNEKGECIVSDFTIGRKGYGSIYFEGDVNLTNLNLDDIVHIRRKEVVVYLDDNQKPPVGEGLNRKAEVTLDGVWPTDKTSRCLIKSPDRLADINYEGRLEAVSRKQGAQFKEYRPETGSWVFKVSHFSKYGLQDSDEEEEEHPSKTSTKKLKTAPLPPASQTTPLQMALNGKPAPPPQVEKKGQ

SEQ ID NO: 56377 - protein, 937 aa, Homo sapiens
MFNKSFGTPFGGGTGGFGTTSTFGQNTGFGTTSGGAFGTSAFGSSNNTGGLFGNSQTKPGGLFGTSSFSQPATSTSTGFGFGTSTGTANTLFGTASTGTSLFSSQNNAFAQNKPTGFGNFGTSTSSGGLFGTTNTTSNPFGSTSGSLFGPSSFTAAPTGTTIKFNPPTGTDTMVKAGVSTNISTKHQCITAMKEYESKSLEELRLEDYQANRKGPQNQVGAGTTTGLFGSSPATSSATGLFSSSTTNSGFAYGQNKTAFGTSTTGFGTNPGGLFGQQNQQTTSLFSKPFGQATTTQNTGFSFGNTSTIGQPSTNTMGLFGVTQASQPGGLFGTATNTSTGTAFGTGTGLFGQTNTGFGAVGSTLFGNNKLTTFGSSTTSAPSFGTTSGGLFGNKPTLTLGTNTNTSNFGFGTNTSGNSIFGSKPAPGTLGTGLGAGFGTALGAGQASLFGNNQPKIGGPLGTGAFGAPGFNTTTATLGFGAPQAPVALTDPNASAAQQAVLQQHINSLTYSPFGDSPLFRNPMSDPKKKEERLKPTNPAAQKALTTPTHYKLTPRPATRVRPKALQTTGTAKSHLFDGLDDDEPSLANGAFMPKKSIKKLVLKNLNNSNLFSPVNRDSENLASPSEYPENGERFSFLSKPVDENHQQDGDEDSLVSHFYTNPIAKPIPQTPESAGNKHSNSNSVDDTIVALNMRAALRNGLEGSSEETSFHDESLQDDREEIENNSYHMHPAGIILTKVGYYTIPSMDDLAKITNEKGECIVSDFTIGRKGYGSIYFEGDVNLTNLNLDDIVHIRRKEVVVYLDDNQKPPVGEGLNRKAEVTLDGVWPTDKTSRCLIKSPDRLADINYEGRLEAVSRKQGAQFKEYRPETGSWVFKVSHFSKYGLQDSDEEEEEHPSKTSTKKLKTAPLPPASQTTPLQMALNGKPAPPPQVEKKGQ

SEQ ID NO: 56378 - protein, 576 aa, Homo sapiens
MSTGFSFGTGASSNPSVGLNFGNLGSTSTPATTSAPSSGFGTGLFGSKPATGFTLGGTNTGIATTITTGLTLGTPATTSAATTGFSLGFNKPAASATPFALPITSTSASGLTLSSALTSTPAASTGFTLNNLGGTTATTTTASTGLSLGGALAGLGGSLFQSTNTGTSGLGQNALGLTLGTTAATSTAGNEGLGGIDFSSSSDKKSDKTGTRPEDSKALKDENLPPVICQDVENLQKFVKEQKQVQEEISRMSSKAMLKVQEDIKALKQLLSLAANGIQRNTLNIDKLKIETAQELKNAEIALRTQKTPPGLQHEYAAPADYFRILVQQFEVQLQQYRQQIEELENHLATQANNSHITPQDLSMAMQKIYQTFVALAAQLQSIHENVKVLKEQYLGYRKMFLGDAVDVFETRRAEAKKWQNTPRVTTGPTPFSTMPNAAAVAMAATLTQQQQPATGPQPSLGVSFGTPFGSGIGTGLQSSGLGSSNLGGFGTSSGFGCSTTGASTFGFGTTNKPSGSLSAGFGSSSTSGFNFSNPGITASAGLTFGVSNPASAGFGTGGQLLQLKKPPAGNKRGKR

SEQ ID NO: 56379 - protein, 587 aa, Homo sapiens
MSTGFSFGSGTLGSTTVAAGGTSTGGVFSFGTGASSNPSVGLNFGNLGSTSTPATTSAPSSGFGTGLFGSKPATGFTLGGTNTGTPATTSAATTGFSLGFNKPAASATPFALPITSTSASGLTLSSALTSTPAASTGFTLNNLGGTTATTTTASTGLSLGGALAGLGGSLFQSTNTGTSGLGQNALGLTLGTTAATSTAGNEGLGGIDFSSSSDKKSDKTGTRPEDSKALKDENLPPVICQDVENLQKFVKEQKQVQEEISRMSSKAMLKVQEDIKALKQLLSLAANGIQRNTLNIDKLKIETAQELKNAEIALRTQKTPPGLQHEYAAPADYFRILVQQFEVQLQQYRQQIEELENHLATQANNSHITPQDLSMAMQKIYQTFVALAAQLQSIHENVKVLKEQYLGYRKMFLGDAVDVFETRRAEAKKWQNTPRVTTGPTPFSTMPNAAAVAMAATLTQQQQPATGPQPSLGVSFGTPFGSGIGTGLQSSGLGSSNLGGFGTSSGFGCSTTGASTFGFGTTNKPSGSLSAGFGSSSTSGFNFSNPGITASAGLTFGVSNPASAGFGTGGQLLQLKKPPAGNKRGKR

SEQ ID NO: 56380 - protein, 599 aa, Homo sapiens
MSTGFSFGSGTLGSTTVAAGGTSTGGVFSFGTGASSNPSVGLNFGNLGSTSTPATTSAPSSGFGTGLFGSKPATGFTLGGTNTGIATTITTGLTLGTPATTSAATTGFSLGFNKPAASATPFALPITSTSASGLTLSSALTSTPAASTGFTLNNLGGTTATTTTASTGLSLGGALAGLGGSLFQSTNTGTSGLGQNALGLTLGTTAATSTAGNEGLGGIDFSSSSDKKSDKTGTRPEDSKALKDENLPPVICQDVENLQKFVKEQKQVQEEISRMSSKAMLKVQEDIKALKQLLSLAANGIQRNTLNIDKLKIETAQELKNAEIALRTQKTPPGLQHEYAAPADYFRILVQQFEVQLQQYRQQIEELENHLATQANNSHITPQDLSMAMQKIYQTFVALAAQLQSIHENVKVLKEQYLGYRKMFLGDAVDVFETRRAEAKKWQNTPRVTTGPTPFSTMPNAAAVAMAATLTQQQQPATGPQPSLGVSFGTPFGSGIGTGLQSSGLGSSNLGGFGTSSGFGCSTTGASTFGFGTTNKPSGSLSAGFGSSSTSGFNFSNPGITASAGLTFGVSNPASAGFGTGGQLLQLKKPPAGNKRGKR

SEQ ID NO: 56381 - protein, 504 aa, Homo sapiens
MSTGFSFGSGTLGSTTVAAGGTSTGGVFSFGTGASSNPSVGLNFGNLGSTSTPATTSAPSSGFGTGLFGSKPATGFTLGGTNTGTPATTSAATTGFSLGFNKPAASATPFALPITSTSASGLTLSSALTSTPAASTGFTLNNLGGTTATTTTASTGLSLGGALAGLGGSLFQSTNTGTSGLGQNALGLTLGTTAATSTAGNEGLGGIDFSSSSDKKSDKTGTRPEDSKALKDENLPPVICQDVENLQKFVKEQKQVQEEISRMSSKAMLKVQEDIKALKQLLSLAANGIQRNTLNIDKLKIETAQELKNAEIALRTQKTPPGLQHEYAAPADYFRILVQQFEVQLQQYRQQIEELENHLATQANNSHITPQDLSMAMQKIYQTFVALAAQLQSIHENVKVLKEQYLGYRKMFLGDAVDVFETRRAEAKKWQNTPRVTTGPTPFSTMPNAAAVAMAATLTQQQQPATGDKWCNVAELKNRTQLSLFVNKLELSCYCVIDLLYNEQ

SEQ ID NO: 56382 - protein, 485 aa, Homo sapiens
MSTGFSFGSGTLGSTTVAAGGTSTGGVFSFGTGASSNPSVGLNFGNLGSTSTPATTSAPSSGFGTGLFGSKPATGFTLGGTNTGIATTITTGLTLGTPATTSAATTGFSLGFNKPAASATPFALPITSTSASGLTLSSALTSTPAASTGFTLNNLGGTTATTTTASTGLSLGGALAGLGGSLFQSTNTGTSGLGQNALGLTLGTTAATSTAGNEGLGGIDFSSSSDKKSDKTGTRPEDSKALKDENLPPVICQDVENLQKFVKEQKQVQEEISRMSSKAMLKVQEDIKALKQLLSLAANGIQRNTLNIDKLKIETAQELKNAEIALRTQKTPPGLQHEYAAPADYFRILVQQFEVQLQQYRQQIEELENHLATQANNSHITPQDLSMAMQKIYQTFVALAAQLQSIHENVKVLKEQYLGYRKMFLGDAVDVFETRRAEAKKWQNTPRVTTGPTPFSTMPNAAAVAMAATLTQQQQPATGLNAFKL

SEQ ID NO: 56383 - protein, 435 aa, Homo sapiens
MSGFLEELLGEKLVTGGGEEVDVHSLGARGISLLGLYFGCSLSAPCAQLSASLAAFYGRLRGDAAAGPGPGAGAGAAAEPEPRRRLEIVFVSSDQDQRQWQDFVRDMPWLALPYKEKHRKLKLWNKYRISNIPSLIFLDATTGKVVCRNGLLVIRDDPEGLEFPWGPKPFREVIAGPLLRNNGQSLESSSLEGSHVGVYFSAHWCPPCRSLTRVLVESYRKIKEAGQNFEIIFVSADRSEESFKQYFSEMPWLAVPYTDEARRSRLNRLYGIQGIPTLIMLDPQGEVITRQGRVEVLNDEDCREFPWHPKPVLELSDSNAAQLNEGPCLVLFVDSEDDGESEAAKQLIQPIAEKIIAKYKAKEEEAPLLFFVAGEDDMTDSLRDYTNLPEAAPLLTILDMSARAKYVMDVEEITPAIVEAFVNDFLAEKLKPEPI

SEQ ID NO: 56384 - protein, 327 aa, Homo sapiens
MADVSLHRNPATLKLWNKYRISNIPSLIFLDATTGKVVCRNGLLVIRDDPEGLEFPWGPKPFREVIAGPLLRNNGQSLESSSLEGSHVGVYFSAHWCPPCRSLTRVLVESYRKIKEAGQNFEIIFVSADRSEESFKQYFSEMPWLAVPYTDEARRSRLNRLYGIQGIPTLIMLDPQGEVITRQGRVEVLNDEDCREFPWHPKPVLELSDSNAAQLNEGPCLVLFVDSEDDGESEAAKQLIQPIAEKIIAKYKAKEEEAPLLFFVAGEDDMTDSLRDYTNLPEAAPLLTILDMSARAKYVMDVEEITPAIVEAFVNDFLAEKLKPEPI

SEQ ID NO: 56385 - protein, 126 aa, Homo sapiens
MPWLAVPYTDEARRSRLNRLYGIQDSEDDGESEAAKQLIQPIAEKIIAKYKAKEEEAPLLFFVAGEDDMTDSLRDYTNLPEAAPLLTILDMSARAKYVMDVEEITPAIVEAFVNDFLAEKLKPEPI

SEQ ID NO: 56386 - protein, 327 aa, Homo sapiens; identical to SEQ ID NO: 56384

SEQ ID NO: 56387 - protein, 391 aa, Homo sapiens
MADIDNKEQSELDQDLDDVEEVEEEETGEETKLKARQLTVQMMQNPQILAALQERLDGLVETPTGYIESLPRVVKRRVNALKNLQVKCAQIEAKFYEEVHDLERKYAVLYQPLFDKRFEIINAIYEPTEEECEWKPDEEDEISEELKEKAKIEDEKKDEEKEDPKGIPEFWLTVFKNVDLLSDMVQEHDEPILKHLKDIKVKFSDAGQPMSFVLEFHFEPNEYFTNEVLTKTYRMRSEPDDSDPFSFDGPEIMGCTGCQIDWKKGKNVTLKTIKKKQKHKGRGTVRTVTKTVSNDSFFNFFAPPEVPESGDLDDDAEAILAADFEIGHFLRERIIPRSVLYFTGEAIEDDDDDYDEEGEEADEEGEEEGDEENDPDYDPKKDQNPAECKQQ

SEQ ID NO: 56388 - protein, 391 aa, Homo sapiens; identical to SEQ ID NO: 56387

SEQ ID NO: 56389 - protein, 323 aa, Homo sapiens
MMQNPQILAALQERLDGLVETPTGYIESLPRVVKRRVNALKNLQVKCAQIEAKFYEEVHDLERKYAVLYQPLFDKEELKEKAKIEDEKKDEEKEDPKGIPEFWLTVFKNVDLLSDMVQEHDEPILKHLKDIKVKFSDAGQPMSFVLEFHFEPNEYFTNEVLTKTYRMRSEPDDSDPFSFDGPEIMGCTGCQIDWKKGKNVTLKTIKKKQKHKGRGTVRTVTKTVSNDSFFNFFAPPEVPESGDLDDDAEAILAADFEIGHFLRERIIPRSVLYFTGEAIEDDDDDYDEEGEEADEEGEEEGDEENDPDYDPKKDQNPAECKQQ

SEQ ID NO: 56390 - protein, 349 aa, Homo sapiens
MMQNPQILAALQERLDGLVETPTGYIESLPRVVKRRVNALKNLQVKCAQIEAKFYEEVHDLERKYAVLYQPLFDKRFEIINAIYEPTEEECEWKPDEEDEISELKEKAKIEDEKKDEEKEDPKGIPEFWLTVFKNVDLLSDMVQEHDEPILKHLKDIKVKFSDAGQPMSFVLEFHFEPNEYFTNEVLTKTYRMRSEPDDSDPFSFDGPEIMGCTGCQIDWKKGKNVTLKTIKKKQKHKGRGTVRTVTKTVSNDSFFNFFAPPEVPESGDLDDDAEAILAADFEIGHFLRERIIPRSVLYFTGEAIEDDDDDYDEEGEEADEEGEEEGDEENDPDYDPKKDQNPAECKQQ

SEQ ID NO: 56391 - protein, 208 aa, Homo sapiens
MVQEHDEPILKHLKDIKVKFSDAGQPMSFVLEFHFEPNEYFTNEVLTKTYRMRSEPDDSDPFSFDGPEIMGCTGCQIDWKKGKNVTLKTIKKKQKHKGRGTVRTVTKTVSNDSFFNFFAPPEVPESGDLDDDAEAILAADFEIGHFLRERIIPRSVLYFTGEAIEDDDDDYDEEGEEADEEGEEEGDEENDPDYDPKKDQNPAECKQQ

SEQ ID NO: 56392 - protein, 328 aa, Homo sapiens
MADIDNLPRVVKRRVNALKNLQVKCAQIEAKFYEEVHDLERKYAVLYQPLFDKRFEIINAIYEPTEEECEWKPDEEDEISEELKEKAKIEDEKKDEEKEDPKGIPEFWLTVFKNVDLLSDMVQEHDEPILKHLKDIKVKFSDAGQPMSFVLEFHFEPNEYFTNEVLTKTYRMRSEPDDSDPFSFDGPEIMGCTGCQIDWKKGKNVTLKTIKKKQKHKGRGTVRTVTKTVSNDSFFNFFAPPEVPESGDLDDDAEAILAADFEIGHFLRERIIPRSVLYFTGEAIEDDDDDYDEEGEEADEEGEEEGDEENDPDYDPKKDQNPAECKQQ

SEQ ID NO: 56393 - protein, 368 aa, Homo sapiens
MADIDNKEQSELDQDLDDVEEVEEEETGEETKLKARQLTVQMMQNPQILAALQERLDGLVETPTGYIESLPRVVKRRVNALKNLQVKCAQIEAKFYEEVHDLERKYAVLYQPLFDKRFEIINAIYEPTEEECEWKPDEEDEISEELKEKAKIEDEKKDEEKEDPKGIPEFWLTVFKNVDLLSDMVQEHDEPILKHLKDIKVKFSDAGQPMSFVLEFHFEPNEYFTNEVLTKTYRMRSEPDDSDPFSFDGPEIMGCTGCQIDWKKGKNVTLKTIKKKQKHKGRGTVRTVTKTVSNDSFFNFFAPPEVPESGDLDDDAEAILAADFEIGHFLRERIIPRSVLYFTGEAIEDDDDDYDEEGEEADEVMFTK

SEQ ID NO: 56394 - protein, 264 aa, Homo sapiens
MADIDNKEQSELDQDLDDVEEVEEEETGEETKLKARQLTVQMMQNPQILAALQERLDGLVETPTGYIESLPRVVKRRVNALKNLQVKCAQIEAKFYEEVHDLERKYAVLYQPLFDKRFEIINAIYEPTEEECEWKPDEEDEISEELKEKAKIEDEKKDEEKEDPKGIPEFWLTVFKNVDLLSDMVQEHDEPILKHLKDIKVKFSDAGQPMSFVLEFHFEPNEYFTNEVLTKTYRMRSEPDDSDPFSFDGPEIMGCTGCQIDWKK

SEQ ID NO: 56395 - protein, 385 aa, Homo sapiens
KEQSELDQDLDDVEEVEEEETGEETKLKARQLTVQMMQNPQILAALQERLDGLVETPTGYIESLPRVVKRRVNALKNLQVKCAQIEAKFYEEVHDLERKYAVLYQPLFDKRFEIINAIYEPTEEECEWKPDEEDEISEELKEKAKIEDEKKDEEKEDPKGIPEFWLTVFKNVDLLSDMVQEHDEPILKHLKDIKVKFSDAGQPMSFVLEFHFEPNEYFTNEVLTKTYRMRSEPDDSDPFSFDGPEIMGCTGCQIDWKKGKNVTLKTIKKKQKHKGRGTVRTVTKTVSNDSFFNFFAPPEVPESGDLDDDAEAILAADFEIGHFLRERIIPRSVLYFTGEAIEDDDDDYDEEGEEADEEGEEEGDEENDPDYDPKKDQNPAECKQQ

SEQ ID NO: 56396 - protein, 506 aa, Homo sapiens
MAEADFKMVSEPVAHGVAEEEMASSTSDSGEESDSSSSSSSTSDSSSSSSTSGSSSGSGSSSSSSGSTSSRSRLYRKKRVPEPSRRARRAPLGTNFVDRLPQAVRNRVQALRNIQDECDKVDTLFLKAIHDLERKYAELNKPLYDRRFQIINAEYEPTEEECEWNSEDEEFSSDEEVQDNTPSEMPPLEGEEEENPKENPEVKAEEKEVPKEIPEVKDEEKEVPKEIPEVKAEEKADSKDCMEATPEVKEDPKEVPQVKADDKEQPKATEAKARAAVRETHKRVPEERLQDSVDLKRARKGKPKREDPKGIPDYWLIVLKNVDKLGPMIQKYDEPILKFLSDVSLKFSKPGQPVSYTFEFHFLPNPYFRNEVLVKTYIIKAKPDHNDPFFSWGWEIEDCKGCKIDWRRGKDVTVTTTQSRTTATGEIEIQPRVVPNASFFNFFSPPEIPMIGKLEPREDAILDEDFEIGQILHDNVILKSIYYYTGEVNGTYYQFGKHYGNKKYRK

SEQ ID NO: 56397 - protein, 499 aa, Homo sapiens
MVSEPVAHGVAEEEMASSTSDSGEESDSSSSSSSTSDSSSSSSTSGSSSGSGSSSSSSGSTSSRSRLYRKKRVPEPSRRARRAPLGTNFVDRLPQAVRNRVQALRNIQDECDKVDTLFLKAIHDLERKYAELNKPLYDRRFQIINAEYEPTEEECEWNSEDEEFSSDEEVQDNTPSEMPPLEGEEEENPKENPEVKAEEKEVPKEIPEVKDEEKEVPKEIPEVKAEEKADSKDCMEATPEVKEDPKEVPQVKADDKEQPKATEAKARAAVRETHKRVPEERLQDSVDLKRARKGKPKREDPKGIPDYWLIVLKNVDKLGPMIQKYDEPILKFLSDVSLKFSKPGQPVSYTFEFHFLPNPYFRNEVLVKTYIIKAKPDHNDPFFSWGWEIEDCKGCKIDWRRGKDVTVTTTQSRTTATGEIEIQPRVVPNASFFNFFSPPEIPMIGKLEPREDAILDEDFEIGQILHDNVILKSIYYYTGEVNGTYYQFGKHYGNKKYRK

SEQ ID NO: 56398 - protein, 375 aa, Homo sapiens
MADHSFSDGVPSDSVEAAKNASNTEKLTDQVMQNPRVLAALQERLDNVPHTPSSYIETLPKAVKRRINALKQLQVRCAHIEAKFYEEVHDLERKYAALYQPLFDKRREFITGDVEPTDAESEWHSENEEEEKLAGDMKSKVVVTEKAAATAEEPDPKGIPEFWFTIFRNVDMLSELVQEYDEPILKHLQDIKVKFSDPGQPMSFVLEFHFEPNDYFTNSVLTKTYKMKSEPDKADPFSFEGPEIVDCDGCTIDWKKGKNVTVKTIKKKQKHKGRGTVRTITKQVPNESFFNFFNPLKASGDGESLDEDSEFTLASDFEIGHFFRERIVPRAVLYFTGEAIEDDDNFEEGEEGEEEELEGDEEGEDEDDAEINPKV

SEQ ID NO: 56399 - protein, 386 aa, Homo sapiens
MADHSFSDGVPSDSVEAAKNASNTEKLTDQVMQNPRVLAALQERLDNVPHTPSSYIETLPKAVKRRINALKQLQVRCAHIEAKFYEEVHDLERKYAALYQPLFDKRREFITGDVEPTDAESEWHSENEEEEKLAGDMKSKVVVTEKAAATAEEPDPKGIPEFWFTIFRNVDMLSELVQEYDEPILKHLQDIKVKFSDPGQPMSFVLEFHFEPNDYFTNSVLTKTYKMKSEPDKADPFSFEGPEIVDCDGCTIDWKKGKNVTVKTIKKKQKHKGRGTVRTITKQVPNESFFNFFNPLKGKGQSKSKDEDSEFTLASDFEIGHFFRERIVPRAVLYFTGEAIEDDDNFEEGEEGEEEELEGDEEGEDEDDAEINPKKEPSQPAECKQQ

SEQ ID NO: 56400 - protein, 178 aa, Homo sapiens
MADHSFSDGVPSDSVEAAKNASNTEKLTDQVMQNPRVLAALQERLDNVPHTPSSYIETLPKAVKRRINALKQLQVRCAHIEAKFYEEVHDLERKYAALYQPLFDKRREFITGDVEPTDAESEWHSENEEEEKLAGDMKSKVVVTEKAAATAEEPDPKGIPEFWFTIFRNVDMLSELVQ

SEQ ID NO: 56401 - protein, 386 aa, Homo sapiens
MADHSFSDGVPSDSVEAAKNASNTEKLTDQVMQNPRVLAALQERLDNVPHTPSSYIETLPKAVKRRINALKQLQVRCAHIEAKFYEEVHDLERKYAALYQPLFDKRREFITGDVEPTDAESEWHSENEEEEKLAGDMKSKVVVTEKAAATAEEPDPKGIPEFWFTIFRNVDMLSELVQEYDEPILKHLQDIKVKFSDPGQPMSFVLEFHFEPNDYFTNSVLTKTYKMKSEPDKADPFSFEGPEIVDCDGCTIDWKKGKNVTVKTIKKKQKHKGRGTVRTITKQVPNESFFNFFNPLKASGDGESLDEDSEFTLASDFEIGHFFRERIVPRAVLYFTGEAIEDDDNFEEGEEGEEEELEGDEEGEDEDDAEINPKKEPSQPAECKQQ

SEQ ID NO: 56402 - protein, 128 aa, Homo sapiens
MADHSFSDGVPSDSVEAAKNASNTEKLTDQVMQNPRVLAALQERLDNVPHTPSSYIETLPKAVKRRINALKQLQVRCAHIEAKFYEEVHDLERKYAALYQPLFDKRREFITGDVEPTDAESEWHSENE

SEQ ID NO: 56403 - protein, 140 aa, Homo sapiens
MADHSFSDGVPSDSVEAAKNASNTEKLTDQVMQNPRVLAALQERLDNVPHTPSSYIETLPKAVKRRINALKQLQVRCAHIEAKFYEEVHDLERKYAALYQPLFDKRREFITGDVEPTDAESEWHSENEEEEKLAGDMKSK

SEQ ID NO: 56404 - protein, 133 aa, Homo sapiens
MADHSFSDGVPSDSVEAAKNASNTEKLTDQVMQNPRVLAALQERLDNVPHTPSSYIETLPKAVKRRINALKQLQVRCAHIEAKFYEEVHDLERKYAALYQPLFDKRREFITGDVEPTDAESEWHSENEEEEKL

SEQ ID NO: 56405 - protein, 107 aa, Homo sapiens
MADHSFSDGVPSDSVEAAKNASNTEKLTDQVMQNPRVLAALQERLDNVPHTPSSYIETLPKAVKRRINALKQLQVRCAHIEAKFYEEVHDLERKYAALYQPLFDKRR

SEQ ID NO: 56406 - protein, 78 aa, Homo sapiens
MADHSFSDGVPSDSVEAAKNASNTEKLTDQVMQNPRVLAALQERLDNVPHTPSSYIETLPKAVKRRINALKQLQVRCA

SEQ ID NO: 56407 - protein, 182 aa, Homo sapiens
MADSENQGPAEPSQAAAAAEAAAEEVMAEGGAQGGDCDSAAGDPDSAAGQMAEEPQTPAENAPKPKNDFIESLPNSVKCRVLALKKLQKRCDKIEAKFDKEFQALEKKYNDIYKPLLAKIQELTGEMEGCAWTLEGEEEEEEEYEDDEEEGEDEEEEEAAAEAAAGAKHDDAHAEMPDDAKK

SEQ ID NO: 56408 - protein, 145 aa, Homo sapiens
MADSENQGPAEPSQAAAAAEAAAEEVMAEGGAQGGDCDSAAGDPDSAAGQMAEEPQTPAENAPKPKNDFIESLPNSVKCRVLALKKLQKRCDKIEAKFDKEFQALEKKYNDIYKPLLAKIQELTGEMEGCAWTLEGEERRKRVRG

SEQ ID NO: 56409 - protein, 320 aa, Homo sapiens
MEEVPHDCPGADSAQAGRGASCQGCPNQRLCASGAGATPDTAIEEIKEKMKTVKHKILVLSGKGGVGKSTFSAHLAHGLAEDENTQIALLDIDICGPSIPKIMGLEGEQVHQSGSGWSPVYVEDNLGVMSVGFLLSSPDDAVIWRGPKKNGMIKQFLRDVDWGEVDYLIVDTPPGTSDEHLSVVRYLATAHIDGAVIITTPQEVSLQDVRKEINFCRKVKLPIIGVVENMSGFICPKCKKESQIFPPTTGGAELMCQDLEVPLLGRVPLDPLIGKNCDKGQSFFIDAPDSPATLAYRSIIQRIQEFCNLHQSKEENLISS

SEQ ID NO: 56410 - protein, 309 aa, Homo sapiens
MEEVPHDCPGADSAQAGRGASCQGCPNQRLCASGAGATPDTAIEEIKEKMKTVKHKILVLSGKGGVGKSTFSAHLAHGLAEDENTQIALLDIDICGPSIPKIMGLEGEQYVEDNLGVMSVGFLLSSPDDAVIWRGPKKNGMIKQFLRDVDWGEVDYLIVDTPPGTSDEHLSVVRYLATAHIDGAVIITTPQEVSLQDVRKEINFCRKVKLPIIGVVENMSGFICPKCKKESQIFPPTTGGAELMCQDLEVPLLGRVPLDPLIGKNCDKGQSFFIDAPDSPATLAYRSIIQRIQEFCNLHQSKEENLISS

SEQ ID NO: 56411 - protein, 271 aa, Homo sapiens
MEAAAEPGNLAGVRHIILVLSGKGGVGKSTISTELALALRHAGKKVGILDVDLCGPSIPRMLGAQGRAVHQCDRGWAPVFLDREQSISLMSVGFLLEKPDEAVVWRGPKKNALIKQFVSDVAWGELDYLVVDTPPGTSDEHMATIEALRPYQPLGALVVTTPQAVSVGDVRRELTFCRKTGLRVMGIVENMSGFTCPHCTECTSVFSRGGGEELAQLAGVPFLGSVPLDPALMRTLEEGHDFIQEFPGSPAFAALTSIAQKILDATPACLP

SEQ ID NO: 56412 - protein, 130 aa, Homo sapiens
MATIEALRPYQPLGALVVTTPQAVSVGDVRRELTFCRKTGLRVMGIVENMSGFTCPHCTECTSVFSRGGGEELAQLAGVPFLGSVPLDPALMRTLEEGHDFIQEFPGSPAFAALTSIAQKILDATPACLP

SEQ ID NO: 56413 - protein, 319 aa, Homo sapiens
MGIWQRLLLFGGVSLRAGGGATAPLGGSRAMVCGRQLSGAGSETLKQRRTQIMSRGLPKQKPIEGVKQVIVVASGKGGVGKSTTAVNLALALAANDSSKAIGLLDVDVYGPSVPKMMNLKGNPELSQSNLMRPLLNYGIACMSMGFLVEESEPVVWRGLMVMSAIEKLLRQVDWGQLDYLVVDMPPGTGDVQLSVSQNIPITGAVIVSTPQDIALMDAHKGAEMFRRVHVPVLGLVQNMSVFQCPKCKHKTHIFGADGARKLAQTLGLEVLGDIPLHLNIREASDTGQPIVFSQPESDEAKAYLRIAVEVVRRLPSPSE

SEQ ID NO: 56414 - protein, 223 aa, Homo sapiens
MSKAIGLLDVDVYGPSVPKMMNLKGNPELSQSNLMRPLLNYGIACMSMGFLVEESEPVVWRGLMVMSAIEKLLRQVDWGQLDYLVVDMPPGTGDVQLSVSQNIPITGAVIVSTPQDIALMDAHKGAEMFRRVHVPVLGLVQNMSVFQCPKCKHKTHIFGADGARKLAQTLGLEVLGDIPLHLNIREASDTGQPIVFSQPESDEAKAYLRIAVEVVRRLPSPSE

SEQ ID NO: 56415 - protein, 1040 aa, Homo sapiens
MGEEGGSASHDEEERASVLLGHSPGCEMCSQEAFQAQRSQLVELLVSGSLEGFESVLDWLLSWEVLSWEDYEGFHLLGQPLSHLARRLLDTVWNKGTWACQKLIAAAQEAQADSQSPKLHGCWDPHSLHPARDLQSHRPAIVRRLHSHVENMLDLAWERGFVSQYECDEIRLPIFTPSQRARRLLDLATVKANGLAAFLLQHVQELPVPLALPLEAATCKKYMAKLRTTVSAQSRFLSTYDGAETLCLEDIYTENVLEVWADVGMAGPPQKSPATLGLEELFSTPGHLNDDADTVLVVGEAGSGKSTLLQRLHLLWAAGQDFQEFLFVFPFSCRQLQCMAKPLSVRTLLFEHCCWPDVGQEDIFQLLLDHPDRVLLTFDGFDEFKFRFTDRERHCSPTDPTSVQTLLFNLLQGNLLKNARKVVTSRPAAVSAFLRKYIRTEFNLKGFSEQGIELYLRKRHHEPGVADRLIRLLQETSALHGLCHLPVFSWMVSKCHQELLLQEGGSPKTTTDMYLLILQHFLLHATPPDSASQGLGPSLLRGRLPTLLHLGRLALWGLGMCCYVFSAQQLQAAQVSPDDISLGFLVRAKGVVPGSTAPLEFLHITFQCFFAAFYLALSADVPPALLRHLFNCGRPGNSPMARLLPTMCIQASEGKDSSVAALLQKAEPHNLQITAAFLAGLLSREHWGLLAECQTSEKALLRRQACARWCLARSLRKHFHSIPPAAPGEAKSVHAMPGFIWLIRSLYEMQEERLARKAARGLNVGHLKLTFCSVGPTECAALAFVLQHLRRPVALQLDYNSVGDIGVEQLLPCLGVCKALYLRDNNISDRGICKLIECALHCEQLQKLALFNNKLTDGCAHSMAKLLACRQNFLALRLGNNYITAAGAQVLAEGLRGNTSLQFLGFWGNRVGDEGAQALAEALGDHQSLRWLSLVGNNIGSVGAQALALMLAKNVMLEELCLEENHLQDEGVCSLAEGLKKNSSLKILKLSNNCITYLGAEALLQALERNDTILEVWLRGNTFSLEEVDKLGCRDTRLLL

SEQ ID NO: 56416 - protein, 180 aa, Homo sapiens
MWLLPPGQVFNAFFPSRLGNNYITAAGAQVLAEGLRGNTSLQFLGFWGNRVGDEGAQALAEALGDHQSLRWLSLVGNNIGSVGAQALALMLAKNVMLEELCLEENHLQDEGVCSLAEGLKKNSSLKILKLSNNCITYLGAEALLQALERNDTILEVWLRGNTFSLEEVDKLGCRDTRLLL

SEQ ID NO: 56417 - protein, 335 aa, Homo sapiens
MEDSGKTFSSEEEEANYWKDLAMTYKQRAENTQEELREFQEGSREYEAELETQLQQIETRNRDLLSENNRLRMELETIKEKFEVQHSEGYRQISALEDDLAQTKAIKDQLQKYIRELEQANDDLERAKRATIMSLEDFEQRLNQAIERNAFLESELDEKENLLESVQRLKDEARDLRQELAVQQKQEKPRTPMPSSVEAERTDTAVQATGSVPSTPIAHRGPSSSLNTPGSFRRGLDDSTGGTPLTPAARISALNIVGDLLRKVGALESKLASCRNLVYDQSPNRTGGPASGRSSKNRDGGERRPSSTSVPLGDKGLDTSCRWLSKSTTRSSSSC

SEQ ID NO: 56418 - protein, 346 aa, Homo sapiens
MEDSGKTFSSEEEEANYWKDLAMTYKQRAENTQEELREFQEGSREYEAELETQLQQIETRNRDLLSENNRLRMELETIKEKFEVQHSEGYRQISALEDDLAQTKAIKDQLQKYIRELEQANDDLERAKRATIMSLEDFEQRLNQAIERNAFLESELDEKENLLESVQRLKDEARDLRQELAVQQKQEKPRTPMPSSVEAERTDTAVQATGSVPSTPIAHRGPSSSLNTPGSFRRGLDDSTGGTPLTPAARISALNIVGDLLRKVGALESKLASCRNLVYDQSPNRTGGPASGRSSKNRDGGERRPSSTSVPLGDKGLGKRLEFGKPPSHMSSSPLPSAQGVVKMLL

SEQ ID NO: 56419 - protein, 335 aa, Homo sapiens; identical to SEQ ID NO: 56417

SEQ ID NO: 56420 - protein, 335 aa, Homo sapiens; identical to SEQ ID NO: 56417

SEQ ID NO: 56421 - protein, 156 aa, Homo sapiens
MGASRLYTLVLVLQPQRVLLGMKKRGFGAGRWNGFGGKVQEGETIEDGARRELQEESGLTVDALHKVGQIVFEFVGEPELMDVHVFCTDSIQGTPVESDEMRPCWFQLDQIPFKDMWPDDSYWFPLLLQKKKFHGYFKFQGQDTILDYTLREVDTV

SEQ ID NO: 56422 - protein, 179 aa, Homo sapiens
MSGISPQQMGEPEGSWSGKNPGTMGASRLYTLVLVLQPQRVLLGMKKRGFGAGRWNGFGGKVQEGETIEDGARRELQEESGLTVDALHKVGQIVFEFVGEPELMDVHVFCTDSIQGTPVESDEMRPCWFQLDQIPFKDMWPDDSYWFPLLLQKKKFHGYFKFQGQDTILDYTLREVDTV

SEQ ID NO: 56423 - protein, 156 aa, Homo sapiens; identical to SEQ ID NO: 56421

SEQ ID NO: 56424 - protein, 156 aa, Homo sapiens; identical to SEQ ID NO: 56421

SEQ ID NO: 56425 - protein, 179 aa, Homo sapiens; identical to SEQ ID NO: 56422

SEQ ID NO: 56426 - protein, 179 aa, Homo sapiens; identical to SEQ ID NO: 56422

SEQ ID NO: 56427 - protein, 37 aa, Homo sapiens
MGASRLYTLVLVLQPQRVLLGMKKRGFGAGRWNGFGG

SEQ ID NO: 56428 - protein, 164 aa, Homo sapiens
MKCKPNQTRTYDPEGFKKRAACLCFRSEREDEVLLVSSSRYPDRWIVPGGGMEPEEEPGGAAVREVYEEAGVKGKLGRLLGVFEQNQDPKHRTYVYVLTVTELLEDWEDSVSIGRKREWFKVEDAIKVLQCHKPVHAEYLEKLKLGGSPTNGNSMAPSSPDSDP

SEQ ID NO: 56429 - protein, 164 aa, Homo sapiens; identical to SEQ ID NO: 56428

SEQ ID NO: 56430 - protein, 147 aa, Homo sapiens
MALRACGLIIFRRCLIPKVDNNAIEFLLLQASDGIHHWTPPKGHVEPGEDDLETALRETQEEAGIEAGQLTIIEGFKRELNYVARNKPKTVIYWLAEVKDYDVEIRLSHEHQAYRWLGLEEACQLAQFKEMKAALQEGHQFLCSIEA

SEQ ID NO: 56431 - protein, 147 aa, Homo sapiens; identical to SEQ ID NO: 56430

SEQ ID NO: 56432 - protein, 147 aa, Homo sapiens; identical to SEQ ID NO: 56430

SEQ ID NO: 56433 - protein, 147 aa, Homo sapiens; identical to SEQ ID NO: 56430

SEQ ID NO: 56434 - protein, 147 aa, Homo sapiens; identical to SEQ ID NO: 56430

SEQ ID NO: 56435 - protein, 464 aa, Homo sapiens
METLSFPRYNVAEIVIHIRNKILTGADGKNLTKNDLYPNPKPEVLHMIYMRALQIVYGIRLEHFYMMPVNSEVMYPHLMEGFLPFSNLVTHLDSFLPICRVNDFETADILCPKAKRTSRFLSGIINFIHFREACRETYMEFLWQYKSSADKMQQLNAAHQEALMKLERLDSVPVEEQEEFKQLSDGIQELQQSLNQDFHQKTIVLQEGNSQKKSNISEKTKRLNELKLSVVSLKEIQESLKTKIVDSPEKLKNYKEKMKDTVQKLKNARQEVVEKYEIYGDSVDCLPSCQLEVQLYQKKIQDLSDNREKLASILKESLNLEDQIESDESELKKLKTEENSFKRLMIVKKEKLATAQFKINKKHEDVKQYKRTVIEDCNKVQEKRGAVYERVTTINQEIQKIKLGIQQLKDAAEREKLKSQEIFLNLKTALEKYHDGIEKAAEDSYAKIDEKTAELKRKMFKMST

SEQ ID NO: 56436 - protein, 464 aa, Homo sapiens; identical to SEQ ID NO: 56435

SEQ ID NO: 56437 - protein, 202 aa, Homo sapiens
METLSFPRYNVAEIVIHIRNKILTGADGKNLTKNDLYPNPKPEVLHMIYMRALQIVYGIRLEHFYMMPVNSEVMYPHLMEGFLPFSNLVTHLDSFLPICRVNDFETADILCPKAKRTSRFLSGIINFIHFREACRETYMEFLWQYKSSADKMQQLNAAHQEALMKLERLDSVPVEEQEEFKQLSDGIQELQQSLNQDFHQKT

SEQ ID NO: 56438 - protein, 145 aa, Homo sapiens
METLSFPRYNVAEIVIHIRNKILTGADGKNLTKNDLYPNPKPEVLHMIYMRALQIVYGIRLEHFYMMPVNSEVMYPHLMEGFLPFSNLVTHLDSFLPICRVNDFETADILCPKAKRTSRFLSGIINFIHFREACRETYMEFLWQY

SEQ ID NO: 56439 - protein, 221 aa, Homo sapiens
METLSFPRYNVAEIVIHIRNKILTGADGKNLTKNDLYPNPKPEVLHMIYMRALQIVYGIRLEHFYMMPVNSEVMYPHLMEGFLPFSNLVTHLDSFLPICRVNDFETADILCPKAKRTSRFLSGIINFIHFREACRETYMEFLWQYKSSADKMQQLNAAHQEALMKLERLDSVPVEEQEEFKQLSDGIQELQQSLNQDFHQKTCCKREIPKRSQIFQRKPSV

SEQ ID NO: 56440 - protein, 417 aa, Homo sapiens
METLSFPRYNVAEIVIHIRNKILTGADGKNLTKNDLYPNPKPEVLHMIYMRALQIVYGIRLEHFYMMPVNSEVMYPHLMEGFLPFSNLVTHLDSFLPICRVNDFETADILCPKAKRTSRFLSGIINFIHFREACRETYMEFLWQYKSSADKMQQLNAAHQEALMKLERLDSVPVEEQEEFKQLSDGIQELQQSLNQDFHQKTIVLQEGNSQKKSNISEKTKRLNELKLSVVSLKEIQESLKTKIVDSPEKLKNYKEKMKDTVQKLKNARSLNLEDQIESDESELKKLKTEENSFKRLMIVKKEKLATAQFKINKKHEDVKQYKRTVIEDCNKVQEKRGAVYERVTTINQEIQKIKLGIQQLKDAAEREKLKSQEIFLNLKTALEKYHDGIEKAAEDSYAKIDEKTAELKRKMFKMST

SEQ ID NO: 56441 - protein, 124 aa, Homo sapiens
METLSFPRYNVAEIVIHIRNKILTGADGKNLTKNDLYPNPKPEVLHMIYMRALQIVYGIRLEHFYMMPVNSEVMYPHLMEGFLPFSNLVTHLDSFLPICRVNDFETADILCPKAKRTSRFLSGI

SEQ ID NO: 56442 - protein, 233 aa, Homo sapiens
MNKLRQSFRRKKDVYVPEASRPHQWQTDEEGVRTGKCSFPVKTGKKAVKAVLWVSADGLRVVDEKTKDLIVDQTIEKVSFCAPDRNFDRAFSYICRDGTTRRWICHCFMAVKDTGERLSHAVGCAFAACLERKQKREKECGVTATFDASRTTFTREGSFRVTTATEQAEREEIMKQMQDAKKAETDKIVVGSSVAPGNTAPSPSSPTSPTSDATTSLEMNNPHAIPRRHAPIE

SEQ ID NO: 56443 - protein, 651 aa, Homo sapiens
MNKLRQSFRRKKDVYVPEASRPHQWQTDEEGVRTGKCSFPVKYLGHVEVDESRGMHICEDAVKRLKAERKFFKGFFGKTGKKAVKAVLWVSADGLRVVDEKTKDLIVDQTIEKVSFCAPDRNFDRAFSYICRDGTTRRWICHCFMAVKDTGERLSHAVGCAFAACLERKQKREKECGVTATFDASRTTFTREGSFRVTTATEQAEREEIMKQMQDAKKAETDKIVVGSSVAPGNTAPSPSSPTSPTSDATTSLEMNNPHAIPRRHAPIEQLARQGSFRGFPALSQKMSPFKRQLSLRINELPSTMQRKTDFPIKNAVPEVEGEAESISSLCSQITNAFSTPEDPFSSAPMTKPVTVVAPQSPTFQANGTDSAFHVLAKPAHTALAPVAMPVRETNPWAHAPDAANKEIAATCSGTEWGQSSGAASPGLFQAGHRRTPSEADRWLEEVSKSVRAQQPQASAAPLQPVLQPPPPTAISQPASPFQGNAFLTSQPVPVGVVPALQPAFVPAQSYPVANGMPYPAPNVPVVGITPSQMVANVFGTAGHPQAAHPHQSPSLVRQQTFPHYEASSATTSPFFKPPAQHLNGSAAFNGVDDGRLASADRHTEVPTGTCPVDPFEAQWAALENKSKQRTNPSPTNPFSSDLQKTFEIEL

SEQ ID NO: 56444 - protein, 603 aa, Homo sapiens
MNKLRQSFRRKKDVYVPEASRPHQWQTDEEGVRTGKCSFPVKYLGHVEVDESRGMHICEDAVKRLKAERKFFKGFFGKTGKKAVKAVLWVSADGLRVVDEKTKDLIVDQTIEKVSFCAPDRNFDRAFSYICRDGTTRRWICHCFMAVKDTGERLSHAVGCAFAACLERKQKREKECGVTATFDASRTTFTREGSFRVTTATEQAEREEIMKQMQDAKKAETDKIVVGSSVAPGNTAPSPSSPTSPTSDATTSLEMNNPHAIPRRHAPIEQLARQGSFRGFPALSQKMSPFKRQLSLRINELPSTMQRKTDFPIKNAVPEVEGEAESISSLCSQITNAFSTPEDPFSSAPMTKPVTVVAPQSPTFQGTEWGQSSGAASPGLFQAGHRRTPSEADRWLEEVSKSVRAQQPQASAAPLQPVLQPPPPTAISQPASPFQGNAFLTSQPVPVGVVPALQPAFVPAQSYPVANGMPYPAPNVPVVGITPSQMVANVFGTAGHPQAAHPHQSPSLVRQQTFPHYEASSATTSPFFKPPAQHLNGSAAFNGVDDGRLASADRHTEVPTGTCPVDPFEAQWAALENKSKQRTNPSPTNPFSSDLQKTFEIEL

SEQ ID NO: 56445 - protein, 640 aa, Homo sapiens
MNKLRQSFRRKKDVYVPEASRPHQWQTDEEGVRTGKCSFPVKYLGHVEVDESRGMHICEDAVKRLKATGKKAVKAVLWVSADGLRVVDEKTKDLIVDQTIEKVSFCAPDRNFDRAFSYICRDGTTRRWICHCFMAVKDTGERLSHAVGCAFAACLERKQKREKECGVTATFDASRTTFTREGSFRVTTATEQAEREEIMKQMQDAKKAETDKIVVGSSVAPGNTAPSPSSPTSPTSDATTSLEMNNPHAIPRRHAPIEQLARQGSFRGFPALSQKMSPFKRQLSLRINELPSTMQRKTDFPIKNAVPEVEGEAESISSLCSQITNAFSTPEDPFSSAPMTKPVTVVAPQSPTFQANGTDSAFHVLAKPAHTALAPVAMPVRETNPWAHAPDAANKEIAATCSGTEWGQSSGAASPGLFQAGHRRTPSEADRWLEEVSKSVRAQQPQASAAPLQPVLQPPPPTAISQPASPFQGNAFLTSQPVPVGVVPALQPAFVPAQSYPVANGMPYPAPNVPVVGITPSQMVANVFGTAGHPQAAHPHQSPSLVRQQTFPHYEASSATTSPFFKPPAQHLNGSAAFNGVDDGRLASADRHTEVPTGTCPVDPFEAQWAALENKSKQRTNPSPTNPFSSDLQKTFEIEL

SEQ ID NO: 56446 - protein, 505 aa, Homo sapiens
MNKLRQSFRRKKDVYVPEASRPHQWQTDEEGVRTGKCSFPVKYLGHVEVDESRGMHICEDAVKRLKAERKFFKGFFGKTGKKAVKAVLWVSADGLRVVDEKTKDLIVDQTIEKVSFCAPDRNFDRAFSYICRDGTTRRWICHCFMAVKDTGERLSHAVGCAFAACLERKQKREKECGVTATFDASRTTFTREGSFRVTTATEQAEREEIMKQMQDAKKVPEVEGEAESISSLCSQITNAFSTPEDPFSSAPMTKPVTVVAPQSPTFQGTEWGQSSGAASPGLFQAGHRRTPSEADRWLEEVSKSVRAQQPQASAAPLQPVLQPPPPTAISQPASPFQGNAFLTSQPVPVGVVPALQPAFVPAQSYPVANGMPYPAPNVPVVGITPSQMVANVFGTAGHPQAAHPHQSPSLVRQQTFPHYEASSATTSPFFKPPAQHLNGSAAFNGVDDGRLASADRHTEVPTGTCPVDPFEAQWAALENKSKQRTNPSPTNPFSSDLQKTFEIEL

SEQ ID NO: 56447 - protein, 640 aa, Homo sapiens; identical to SEQ ID NO: 56445

SEQ ID NO: 56448 - protein, 456 aa, Homo sapiens
MNKLRQSFRRKKDVYVPEASRPHQWQTDEEGVRTGKCSFPVKYLGHVEVDESRGMHICEDAVKRLKAERKFFKGFFGKTGKKAVKAVLWVSADGLRVVDEKTKDLIVDQTIEKVSFCAPDRNFDRAFSYICRDGTTRRWICHCFMAVKDTGERLSHAVGCAFAACLERKQKREKECGVTATFDASRTTFTREGSFRVTTATEQAEREEIMKQMQDAKKGTEWGQSSGAASPGLFQAGHRRTPSEADRWLEEVSKSVRAQQPQASAAPLQPVLQPPPPTAISQPASPFQGNAFLTSQPVPVGVVPALQPAFVPAQSYPVANGMPYPAPNVPVVGITPSQMVANVFGTAGHPQAAHPHQSPSLVRQQTFPHYEASSATTSPFFKPPAQHLNGSAAFNGVDDGRLASADRHTEVPTGTCPVDPFEAQWAALENKSKQRTNPSPTNPFSSDLQKTFEIEL

SEQ ID NO: 56449 - protein, 258 aa, Homo sapiens
MNKLRQSFRRKKDVYVPEASRPHQWQTDEEGVRTGKCSFPVKYLGHVEVDESRGMHICEDAVKRLKAERKFFKGFFGKTGKKAVKAVLWVSADGLRVVDEKTKDLIVDQTIEKVSFCAPDRNFDRAFSYICRDGTTRRWICHCFMAVKDTGERLSHAVGCAFAACLERKQKREKECGVTATFDASRTTFTREGSFRVTTATEQAEREEIMKQMQDAKKAETDKIVVGSSVAPGNTAPSPSSPTSPTSDATTSLEMNNP

SEQ ID NO: 56450 - protein, 592 aa, Homo sapiens
MNKLRQSFRRKKDVYVPEASRPHQWQTDEEGVRTGKCSFPVKYLGHVEVDESRGMHICEDAVKRLKATGKKAVKAVLWVSADGLRVVDEKTKDLIVDQTIEKVSFCAPDRNFDRAFSYICRDGTTRRWICHCFMAVKDTGERLSHAVGCAFAACLERKQKREKECGVTATFDASRTTFTREGSFRVTTATEQAEREEIMKQMQDAKKAETDKIVVGSSVAPGNTAPSPSSPTSPTSDATTSLEMNNPHAIPRRHAPIEQLARQGSFRGFPALSQKMSPFKRQLSLRINELPSTMQRKTDFPIKNAVPEVEGEAESISSLCSQITNAFSTPEDPFSSAPMTKPVTVVAPQSPTFQGTEWGQSSGAASPGLFQAGHRRTPSEADRWLEEVSKSVRAQQPQASAAPLQPVLQPPPPTAISQPASPFQGNAFLTSQPVPVGVVPALQPAFVPAQSYPVANGMPYPAPNVPVVGITPSQMVANVFGTAGHPQAAHPHQSPSLVRQQTFPHYEASSATTSPFFKPPAQHLNGSAAFNGVDDGRLASADRHTEVPTGTCPVDPFEAQWAALENKSKQRTNPSPTNPFSSDLQKTFEIEL

SEQ ID NO: 56451 - protein, 67 aa, Homo sapiens
MNKLRQSFRRKKDVYVPEASRPHQWQTDEEGVRTGKCSFPVKYLGHVEVDESRGMHICEDAVKRLKA

SEQ ID NO: 56452 - protein, 651 aa, Homo sapiens; identical to SEQ ID NO: 56443

SEQ ID NO: 56453 - protein, 258 aa, Homo sapiens; identical to SEQ ID NO: 56449

SEQ ID NO: 56454 - protein, 603 aa, Homo sapiens; identical to SEQ ID NO: 56444

SEQ ID NO: 56455 - protein, 640 aa, Homo sapiens; identical to SEQ ID NO: 56445

SEQ ID NO: 56456 - protein, 609 aa, Homo sapiens
MSRSAAASGGPRRPERHLPPAPCGAPGPPETCRTEPDGAGTMNKLRQSLRRRKPAYVPEASRPHQWQADEDAVRKGTCSFPVRYLGHVEVEESRGMHVCEDAVKKLKAMGRKSVKSVLWVSADGLRVVDDKTKDLLVDQTIEKVSFCAPDRNLDKAFSYICRDGTTRRWICHCFLALKDSGERLSHAVGCAFAACLERKQRREKECGVTAAFDASRTSFAREGSFRLSGGGRPAEREAPDKKKAEAAAAPTVAPGPAQPGHVSPTPATTSPGEKGEAGTPVAAGTTAAAIPRRHAPLEQLVRQGSFRGFPALSQKNSPFKRQLSLRLNELPSTLQRRTDFQVKGTVPEMEPPGAGDSDSINALCTQISSSFASAGAPAPGPPPATTGTSAWGEPSVPPAAAFQPGHKRTPSEAERWLEEVSQVAKAQQQQQQQQQQQQQQQQQQQQAASVAPVPTMPPALQPFPAPVGPFDAAPAQVAVFLPPPHMQPPFVPAYPGLGYPPMPRVPVVGITPSQMVANAFCSAAQLQPQPATLLGKAGAFPPPAIPSAPGSQARPRPNGAPWPPEPAPAPAPELDPFEAQWAALEGKATVEKPSNPFSGDLQKTFEIEL

SEQ ID NO: 56457 - protein, 568 aa, Homo sapiens
MNKLRQSLRRRKPAYVPEASRPHQWQADEDAVRKGTCSFPVRYLGHVEVEESRGMHVCEDAVKKLKAMGRKSVKSVLWVSADGLRVVDDKTKDLLVDQTIEKVSFCAPDRNLDKAFSYICRDGTTRRWICHCFLALKDSGERLSHAVGCAFAACLERKQRREKECGVTAAFDASRTSFAREGSFRLSGGGRPAEREAPDKKKAEAAAAPTVAPGPAQPGHVSPTPATTSPGEKGEAGTPVAAGTTAAAIPRRHAPLEQLVRQGSFRGFPALSQKNSPFKRQLSLRLNELPSTLQRRTDFQVKGTVPEMEPPGAGDSDSINALCTQISSSFASAGAPAPGPPPATTGTSAWGEPSVPPAAAFQPGHKRTPSEAERWLEEVSQVAKAQQQQQQQQQQQQQQQQQQQQAASVAPVPTMPPALQPFPAPVGPFDAAPAQVAVFLPPPHMQPPFVPAYPGLGYPPMPRVPVVGITPSQMVANAFCSAAQLQPQPATLLGKAGAFPPPAIPSAPGSQARPRPNGAPWPPEPAPAPAPELDPFEAQWAALEGKATVEKPSNPFSGDLQKTFEIEL

SEQ ID NO: 56458 - protein, 481 aa, Homo sapiens
MKGRGMLVLLLHAVVLGLPSAWAVGACARACPAACACSTVERGCSVRCDRAGLLRVPAELPCEAVSIDLDRNGLRFLGERAFGTLPSLRRLSLRHNNLSFITPGAFKGLPRLAELRLAHNGDLRYLHARTFAALSRLRRLDLAACRLFSVPERLLAELPALRELAAFDNLFRRVPGALRGLANLTHAHLERGRIEAVASSSLQGLRRLRSLSLQANRVRAVHAGAFGDCGVLEHLLLNDNLLAELPADAFRGLRRLRTLNLGGNALDRVARAWFADLAELELLYLDRNSIAFVEEGAFQNLSGLLALHLNGNRLTVLAWVAFQPGFFLGRLFLFRNPWCCDCRLEWLRDWMEGSGRVTDVPCASPGSVAGLDLSQVTFGRSSDGLCVDPEELNLTTSSPGPSPEPAATTVSRFSSLLSKLLAPRVPVEEAANTTGGLANASLSDSLSSRGVGGAGRQPWFLLASCLLPSVAQHVVFGLQMD

SEQ ID NO: 56459 - protein, 481 aa, Homo sapiens; identical to SEQ ID NO: 56458

SEQ ID NO: 56460 - protein, 396 aa, Homo sapiens
MPPKKGGDGIKPPPIIGRFGTSLKIGIVGLPNVGKSTFFNVLTNSQASAENFPFCTIDPNESRVPVPDERFDFLCQYHKPASKIPAFLNVVDIAGLVKGAHNGQGLGNAFLSHISACDGIFHLTRAFEDDDITHVEGSVDPIRDIEIIHEELQLKDEEMIGPIIDKLEKVAVRGGDKKLKPEYDIMCKVKSWVIDQKKPVRFYHDWNDKEIEVLNKHLFLTSKPMVYLVNLSEKDYIRKKNKWLIKIKEWVDKYDPGALVIPFSGALELKLQELSAEERQKYLEANMTQSALPKIIKAGFAALQLEYFFTAGPDEVRAWTIRKGTKAPQAAGKIHTDFEKGFIMAEVMKYEDFKEEGSENAVKAAGKYRQQGRNYIVEDGDIIFFKFNTPQQPKKK

SEQ ID NO: 56461 - protein, 238 aa, Homo sapiens
MIGPIIDKLEKVAVRGGDKKLKPEYDIMCKVKSWVIDQKKPVRFYHDWNDKEIEVLNKHLFLTSKPMVYLVNLSEKDYIRKKNKWLIKIKEWVDKYDPGALVIPFSGALELKLQELSAEERQKYLEANMTQSALPKIIKAGFAALQLEYFFTAGPDEVRAWTIRKGTKAPQAAGKIHTDFEKGFIMAEVMKYEDFKEEGSENAVKAAGKYRQQGRNYIVEDGDIIFFKFNTPQQPKKK

SEQ ID NO: 56462 - protein, 416 aa, Homo sapiens
MSRTFSAKGGRDLVEGPQYLMPPKKGGDGIKPPPIIGRFGTSLKIGIVGLPNVGKSTFFNVLTNSQASAENFPFCTIDPNESRVPVPDERFDFLCQYHKPASKIPAFLNVVDIAGLVKGAHNGQGLGNAFLSHISACDGIFHLTRAFEDDDITHVEGSVDPIRDIEIIHEELQLKDEEMIGPIIDKLEKVAVRGGDKKLKPEYDIMCKVKSWVIDQKKPVRFYHDWNDKEIEVLNKHLFLTSKPMVYLVNLSEKDYIRKKNKWLIKIKEWVDKYDPGALVIPFSGALELKLQELSAEERQKYLEANMTQSALPKIIKAGFAALQLEYFFTAGPDEVRAWTIRKGTKAPQAAGKIHTDFEKGFIMAEVMKYEDFKEEGSENAVKAAGKYRQQGRNYIVEDGDIIFFKFNTPQQPKKK

SEQ ID NO: 56463 - protein, 116 aa, Homo sapiens
MPPKKGGDGIKPPPIIGRFGTSLKIGIVGLPNVGKSTFFNVLTNSQASAENFPFCTIDPNESRVPVPDERFDFLCQYHKPASKIPAFLNVVDIAGLVKGAHNGQGLGNAFLSHISA

SEQ ID NO: 56464 - protein, 278 aa, Homo sapiens
MPPKKGGDGIKPPPIIGRFGTSLKIGIVGLPNVGKSTFFNVLTNSQASAENFPFCTIDPNESRVPVPDERFDFLCQYHKPASKIPAFLNVVDIAGLVKGAHNGQGLGNAFLSHISACDGIFHLTRAFEDDDITHVEGSVDPIRDIEIIHEELQLKDEEMIGPIIDKLEKVAVRGGDKKLKPEYDIMCKVKSWVIDQKKPVRFYHDWNDKEIEVLNKHLFLTSKPMVYLVNLSEKDYIRKKNKWLLESTDNKAEIILLKMEILSSSNLTHLNNRRRNKI

SEQ ID NO: 56465 - protein, 103 aa, Homo sapiens
MIGPIIDKLEKVAVRGGDKKLKPEYDIMCKVKSWVIDQKKPVRFYHDWNDKEIEVLNKHLFLTSKPMVYLVNLSEKDYIRKKNKWLIKIKEWVDKYDPGALVI

SEQ ID NO: 56466 - protein, 442 aa, Homo sapiens
MCELSREDAPVRWYKDGLEVEESEALVLERDGPRCRLVLPAAQPEDGGEFVCDAGDDSAFFTVTVTAPPERIVHPAARSLDLHFGAPGRVELRCEVAPAGSQVRWYKDGLEVEASDALQLGAEGPTRTLTLPHAQPEDAGEYVCETRHEAITFNVILAEPPVQFLALETTPSPLCVAPGEPVVLSCELSRAGAPVVWSHNGRPVQEGEGLELHAEGPRRVLCIQAAGPAHAGLYTCQSGAAPGAPSLSFTVQVAEPLLVKLVSELTPLTVHEGDDATFRCEVSPPDADVTWLRNGAVVTPGPQVEMAQNGSSRILTLRGCQLGDAGTVTLRAGSTATSARLHVRETELLFLRRLQDVRAEEGQDVCLEVETGRVGAAGAVRWVRGGQPLPHDSRLSMAQDGHIHRLFIHGVILADQGTYGCESHHDRTLARLSVRRECPVLS

SEQ ID NO: 56467 - protein, 1401 aa, Homo sapiens
MKASSGDQGSPPCFLRFPRPVRVVSGAEAELKCVVLGEPPPVVVWEKGGQQLAASERLSFPADGAEHGLLLTAALPTDAGVYVCRARNAAGEAYAAAAVTVLEPPASDPELQPAERPLPSPGSGEGAPVFLTGPRSQWVLRGAEVVLTCRAGGLPEPTLYWEKDGMALDEVWDSSHFALQPGRAEDGPGASLALRILAARLPDSGVYVCHARNAHGHAQAGALLQVHQPPESPPADPDEAPAPVVEPLKCAPKTFWVNEGKHAKFRCYVMGKPEPEIEWHWEGRPLLPDRRRLMYRDRDGGFVLKVLYCQAKDRGLYVCAARNSAGQTLSAVQLHVKEPRLRFTRPLQDVEGREHGIAVLECKVPNSRIPTAWFREDQRLLPCRKYEQIEEGTVRRLIIHRLKADDDGIYLCEMRGRVRTVANVTVKGPILKRLPRKLDVLEGENAVLLVETLEAGVEGRWSRDGEELPVICQSSSGHMHALVLPGVTREDAGEVTFSLGNSRTTTLLRVKCVKHSPPGPPILAEMFKGHKNTVLLTWKPPEPAPETPFIYRLERQEVGSEDWIQCFSIEKAGAVEVPGDCVPSEGDYRFRICTVSGHGRSPHVVFHGSAHLVPTARLVAGLEDVQVYDGEDAVFSLDLSTIIQGTWFLNGEELKSNEPEGQVEPGALRYRIEQKGLQHRLILHAVKHQDSGALVGFSCPGVQDSAALTIQESPVHILSPQDRVSLTFTTSERVVLTCELSRVDFPATWYKDGQKVEESELLVVKMDGRKHRLILPEAKVQDSGEFECRTEGVSAFFGVTVQDPPVHIVDPREHVFVHAITSECVMLACEVDREDAPVRWYKDGQEVEESDFVVLENEGPHRRLVLPATQPSDGGEFQCVAGDECAYFTVTITDVSSWIVYPSGKVYVAAVRLERVVLTCELCRPWAEVRWTKDGEEVVESPALLLQKEDTVRRLVLPAVQLEDSGEYLCEIDDESASFTVTVTEPPVRIIYPRDEVTLIAVTLECVVLMCELSREDAPVRWYKDGLEVEESEALVLERDGPRCRLVLPAAQPEDGGEFVCDAGDDSAFFTVTVTEPPVQFLALETTPSPLCVAPGEPVVLSCELSRAGAPVVWSHNGRPVQEGEGLELHAEGPRRVLCIQAAGPAHAGLYTCQSGAAPGAPSLSFTVQVAEPPVRVVAPEAAQTRVRSTPGGDLELVVHLSGPGGPVRWYKDGERLASQGRVQLEQAGARQVLRVQGARSGDAGEYLCDAPQDSRIFLVSVEEPLLVKLVSELTPLTVHEGDDATFRCEVSPPDADVTWLRNGAVVTPGPQRQSCCSYGGCRMCGQRKARMCVSKWRQAEWVQRGPCAGCEVGSPCPTTLACPWPRMGTSTASSSMVSYWPTRAPTAARATTIAPWPGSA

SEQ ID NO: 56468 - protein, 1025 aa, Homo sapiens
MKASSGDQGSPPCFLRFPRPVRVVSGAEAELKCVVLGEPPPVVVWEKGGQQLAASERLSFPADGAEHGLLLTAALPTDAGVYVCRARNAAGEAYAAAAVTVLEPPASDPELQPAERPLPSPGSGEGAPVFLTGPRSQWVLRGAEVVLTCRAGGLPEPTLYWEKDGMALDEVWDSSHFALQPGRAEDGPGASLALRILAARLPDSGVYVCHARNAHGHAQAGALLQVHQPPESPPADPDEAPAPVVEPLKCAPKTFWVNEGKHAKFRCYVMGKPEPEIEWHWEGRPLLPDRRRLMYRDRDGGFVLKVLYCQAKDRGLYVCAARNSAGQTLSAVQLHVKEPRLRFTRPLQDVEGREHGIAVLECKVPNSRIPTAWFREDQRLLPCRKYEQIEEGTVRRLIIHRLKADDDGIYLCEMRGRVRTVANVTVKGPILKRLPRKLDVLEGENAVLLVETLEAGVEGRWSRDGEELPVICQSSSGHMHALVLPGVTREDAGEVTFSLGNSRTTTLLRVKCVKHSPPGPPILAEMFKGHKNTVLLTWKPPEPAPETPFIYRLERQEVGSEDWIQCFSIEKAGAVEVPGDCVPSEGDYRFRICTVSGHGRSPHVVFHGSAHLVPTARLVAGLEDVQVYDGEDAVFSLDLSTIIQGTWFLNGEELKSNEPEGQVEPGALRYRIEQKGLQHRLILHAVKHQDSGALVGFSCPGVQDSAALTIQESPVHILSPQDRVSLTFTTSERVVLTCELSRVDFPATWYKDGQKVEESELLVVKMDGRKHRLILPEAKVQDSGEFECRTEGVSAFFGVTVQDPPVHIVDPREHVFVHAITSECVMLACEVDREDAPVRWYKDGQEVEESDFVVLENEGPHRRLVLPATQPSDGGEFQCVAGDECAYFTVTITDVSSWIVYPSGKVYVAAVRLERVVLTCELCRPWAEVRWTKDGEEVVESPALLLQKEDTVRRLVLPAVQLEDSGEYLCEIDDESASFTVTVTESYQSQDSSNNNPELCVLLKKPKTRRLWSRFPPWRRTAGTE

SEQ ID NO: 56469 - protein, 1896 aa, Homo sapiens
MKASSGDQGSPPCFLRFPRPVRVVSGAEAELKCVVLGEPPPVVVWEKGGQQLAASERLSFPADGAEHGLLLTAALPTDAGVYVCRARNAAGEAYAAAAVTVLEPPASDPELQPAERPLPSPGSGEGAPVFLTGPRSQWVLRGAEVVLTCRAGGLPEPTLYWEKDGMALDEVWDSSHFALQPGRAEDGPGASLALRILAARLPDSGVYVCHARNAHGHAQAGALLQVHQPPESPPADPDEAPAPVVEPLKCAPKTFWVNEGKHAKFRCYVMGKPEPEIEWHWEGRPLLPDRRRLMYRDRDGGFVLKVLYCQAKDRGLYVCAARNSAGQTLSAVQLHVKEPRLRFTRPLQDVEGREHGIAVLECKVPNSRIPTAWFREDQRLLPCRKYEQIEEGTVRRLIIHRLKADDDGIYLCEMRGRVRTVANVTVKGPILKRLPRKLDVLEGENAVLLVETLEAGVEGRWSRDGEELPVICQSSSGHMHALVLPGVTREDAGEVTFSLGNSRTTTLLRVKCVKHSPPGPPILAEMFKGHKNTVLLTWKPPEPAPETPFIYRLERQEVGSEDWIQCFSIEKAGAVEVPGDCVPSEGDYRFRICTVSGHGRSPHVVFHGSAHLVPTARLVAGLEDVQVYDGEDAVFSLDLSTIIQGTWFLNGEELKSNEPEGQVEPGALRYRIEQKGLQHRLILHAVKHQDSGALVGFSCPGVQDSAALTIQESPVHILSPQDRVSLTFTTSERVVLTCELSRVDFPATWYKDGQKVEESELLVVKMDGRKHRLILPEAKVQDSGEFECRTEGVSAFFGVTVQDPPVHIVDPREHVFVHAITSECVMLACEVDREDAPVRWYKDGQEVEESDFVVLENEGPHRRLVLPATQPSDGGEFQCVAGDECAYFTVTITDVSSWIVYPSGKVYVAAVRLERVVLTCELCRPWAEVRWTKDGEEVVESPALLLQKEDTVRRLVLPAVQLEDSGEYLCEIDDESASFTVTVTEPPVRIIYPRDEVTLIAVTLECVVLMCELSREDAPVRWYKDGLEVEESEALVLERDGPRCRLVLPAAQPEDGGEFVCDAGDDSAFFTVTVTAPPERIVHPAARSLDLHFGAPGRVELRCEVAPAGSQVRWYKDGLEVEASDALQLGAEGPTRTLTLPHAQPEDAGEYVCETRHEAITFNVILAEPPVQFLALETTPSPLCVAPGEPVVLSCELSRAGAPVVWSHNGRPVQEGEGLELHAEGPRRVLCIQAAGPAHAGLYTCQSGAAPGAPSLSFTVQVAEPPVRVVAPEAAQTRVRSTPGGDLELVVHLSGPGGPVRWYKDGERLASQGRVQLEQAGARQVLRVQGARSGDAGEYLCDAPQDSRIFLVSVEEPLLVKLVSELTPLTVHEGDDATFRCEVSPPDADVTWLRNGAVVTPGPQVEMAQNGSSRILTLRGCQLGDAGTVTLRAGSTATSARLHVRETELLFLRRLQDVRAEEGQDVCLEVETGRVGAAGAVRWVRGGQPLPHDSRLSMAQDGHIHRLFIHGVILADQGTYGCESHHDRTLARLSVRPRQLRVLRPLEDVTISEGGSATFQLELSQEGVTGEWARGGVQLYPGPKCHIHSDGHRHRLVLNGLGLADSGCVSFTADSLRCAARLIVREVPVTIVRGPHDLEVTEGDTATFECELSQALADVTWEKDGNALTPSPRLRLQALGTRRLLQLRRCGPSDAGTYSCAVGTARAGPVRLTVRERTVAVLSELRSVSAREGDGATFECTVSEVETTGRWELGGRPLRPGARVRIRQEGKKHILVLSELRAEDAGEVRFQAGPAQSLALLEVEALPLQMCRHPPREKTVLVGRRAVLEVTVSRSGGHVCWLREGAELCPGDKYEMRSHGPTHSLVIHDVRPEDQGTYCCQAGQDSTHTRLLVEGN

SEQ ID NO: 56470 - protein, 893 aa, Homo sapiens
MEPPLPVGAQPLATVEGMEMKGPLREPCALTLAQRNGQYELIIQLHEKEQHVQDIIPINSHFRCVQEAEETLLIDIASNSGCKIRVQGDWIRERRFEIPDEEHCLKFLSAVLAAQKAQSQLLVPEQKDSSSWYQKLDTKDKPSVFSGLLGFEDNFSSMNLDKKINSQNQPTGIHREPPPPPFSVNKMLPREKEASNKEQPKVTNTMRKLFVPNTQSGQREGLIKHILAKREKEYVNIQTFRFFVGTWNVNGQSPDSGLEPWLNCDPNPPDIYCIGFQELDLSTEAFFYFESVKEQEWSMAVERGLHSKAKYKKVQLVRLVGMMLLIFARKDQCRYIRDIATETVGTGIMGKMGNKGGVAVRFVFHNTTFCIVNSHLAAHVEDFERRNQDYKDICARMSFVVPNQTLPQLNIMKHEVVIWLGDLNYRLCMPDANEVKSLINKKDLQRLLKFDQLNIQRTQKKAFVDFNEGEIKFIPTYKYDSKTDRWDSSGKCRVPAWCDRILWRGTNVNQLNYRSHMELKTSDHKPVSALFHIGVKVVDERRYRKVFEDSVRIMDRMENDFLPSLELSRREFVFENVKFRQLQKEKFQISNNGQVPCHFSFIPKLNDSQYCKPWLRAEPFEGYLEPNETVDISLDVYVSKDSVTILNSGEDKIEDILVLHLDRGKDYFLTISGNYLPSCFGTSLEALCRMKRPIREVPVTKLIDLEKSLLQMVPLDEGASERPLQVPKEIWLLVDHLFKYACHQEDLFQTPGMQEELQQIIDCLDTSIPETIPGSNHSVAEALLIFLEALPEPVICYELYQRCLDSAYDPRICRQVISQLPRCHRNVFRYLMAFLRELLKFSEYNSVNANMIATLFTSLLLRPPPNLMARQTPSDRQRAIQFLLGFLLGSEED

SEQ ID NO: 56471 - protein, 901 aa, Homo sapiens
MEPPLPVGAQPLATVEGMEMKGPLREPCALTLAQRNGQYELIIQLHEKEQHVQDIIPINSHFRCVQEAEETLLIDIASNSGCKIRVQGDWIRERRFEIPDEEHCLKFLSAVLAAQKAQSQLLVPEQKDSSSWYQKLDTKDKPSVFSGLLGFEDNFSSMNLDKKINSQNQPTGIHREPPPPPFSVNKMLPREKEASNKEQPKVTNTMRKLFVPNTQSGQREGLIKHILAKREKEYVNIQTFRFFVGTWNVNGQSPDSGLEPWLNCDPNPPDIYCIGFQELDLSTEAFFYFESVKEQEWSMAVERGLHSKAKYKKVQLVRLVGMMLLIFARKDQCRYIRDIATETVGTGIMGKMGNKGGVAVRFVFHNTTFCIVNSHLAAHVEDFERRNQDYKDICARMSFVVPNQTLPQLNIMKHEVVIWLGDLNYRLCMPDANEVKSLINKKDLQRLLKFDQLNIQRTQKKAFVDFNEGEIKFIPTYKYDSKTDRWDSSGKCRVPAWCDRILWRGTNVNQLNYRSHMELKTSDHKPVSALFHIGVKVVDERRYRKVFEDSVRIMDRMENDFLPSLELSRREFVFENVKFRQLQKEKFQISNNGQVPCHFSFIPKLNDSQYCKPWLRAEPFEGYLEPNETVDISLDVYVSKDSVTILNSGEDKIEDILVLHLDRGKDYFLTISGNYLPSCFGTSLEALCRMKRPIREVPVTKLIDLEEDSFLEKEKSLLQMVPLDEGASERPLQVPKEIWLLVDHLFKYACHQEDLFQTPGMQEELQQIIDCLDTSIPETIPGSNHSVAEALLIFLEALPEPVICYELYQRCLDSAYDPRICRQVISQLPRCHRNVFRYLMAFLRELLKFSEYNSVNANMIATLFTSLLLRPPPNLMARQTPSDRQRAIQFLLGFLLGSEED

SEQ ID NO: 56472 - protein, 814 aa, Homo sapiens
MHLEGRDGRRYPGAPAVELLQTSVPSGLAELVAGKRRLPRGAGGADPSHSCPRGAAGQSSWAPAGQEFASFLTKGRSHSSLPQMSSSRSKDSCFTENTPLLRNSLQEKGSRCIPVYHPEFITAEESWEDSSADWERRYLLSREVSGLSASASSEKGDLLDSPHIRLRLSKLRRCVQWLKVMGLFAFVVLCSILFSLYPDQGKLWQLLALSPLENYSVNLSSHVDSTLLQVDLAGALVASGPSRPGREEHIVVELTQADALGSRWRRPQQVTHNWTVYLNPRRSEHSVMSRTFEVLTRETVSISIRASLQQTQAVPLLMAHQYLRGSVETQVTIATAILAGVYALIIFERPSLTHVVEWIDFETLALLFGMMILVAIFSETGFFDYCAVKAYRLSRGRVWAMIIMLCLIAAVLSAFLDNVTTMLLFTPVTIRLCEVLNLDPRQVLIAEVIFTNIGGAATAIGDPPNVIIVSNQELRKMGLDFAGFTAHMFIGICLVLLVCFPLLRLLYWNRKLYNKEPSEIVELKHEIHVWRLTAQRISPASREETAVRRLLLGKVLALEHLLARRLHTFHRQISQEDKNWETNIQELQKKHRISDGILLAKCLTVLGFVIFMFFLNSFVPGIHLDLGWIAILGAIWLLILADIHDFEIILHRVEWATLLFFAALFVLMEALAHLHLIEYVGEQTALLIKMVPEEQRLIAAIVLVVWVSALASSLIDNIPFTATMIPVLLNLSHDPEVGLPAPPLMYALAFGACLGGNGTLIGASANVVCAGIAEQHGYGFSFMEFFRLGFPMMVVSCTVGMCYLLVAHVVVGWN

SEQ ID NO: 56473 - protein, 838 aa, Homo sapiens
MHLEGRDGRRYPGAPAVELLQTSVPSGLAELVAGKRRLPRGAGGADPSHSCPRGAAGQSSWAPAGQEFASFLTKGRSHSSLPQMSSSRSKDSCFTENTPLLRNSLQEKGSRCIPVYHPEFITAEESWEDSSADWERRYLLSREVSGLSASASSEKGDLLDSPHIRLRLSKLRRCVQWLKVMGLFAFVVLCSILFSLYPDQGKLWQLLALSPLENYSVNLSSHVDSTLLQVDLAGALVASGPSRPGREEHIVVELTQADALGSRWRRPQQVTHNWTVYLNPRRSEHSVMSRTFEVLTRETVSISIRASLQQTQAVPLLMAHQYLRGSVETQVTIATAILAGVYALIIFEIVHRTLAAMLGSLAALAALAVIGDRPSLTHVVEWIDFETLALLFGMMILVAIFSETGFFDYCAVKAYRLSRGRVWAMIIMLCLIAAVLSAFLDNVTTMLLFTPVTIRLCEVLNLDPRQVLIAEVIFTNIGGAATAIGDPPNVIIVSNQELRKMGLDFAGFTAHMFIGICLVLLVCFPLLRLLYWNRKLYNKEPSEIVELKHEIHVWRLTAQRISPASREETAVRRLLLGKVLALEHLLARRLHTFHRQISQEDKNWETNIQELQKKHRISDGILLAKCLTVLGFVIFMFFLNSFVPGIHLDLGWIAILGAIWLLILADIHDFEIILHRVEWATLLFFAALFVLMEALAHLHLIEYVGEQTALLIKMVPEEQRLIAAIVLVVWVSALASSLIDNIPFTATMIPVLLNLSHDPEVGLPAPPLMYALAFGACLGGNGTLIGASANVVCAGIAEQHGYGFSFMEFFRLGFPMMVVSCTVGMCYLLVAHVVVGWN

SEQ ID NO: 56474 - protein, 668 aa, Homo sapiens
MHLEGRDGRRYPGAPAVELLQTSVPSGLAELVAGKRRLPRGAGGADPSHSCPRGAAGQSSWAPAGQEFASFLTKGRSHSSLPQMSSSRSKDSCFTENTPLLRNSLQEKGSRCIPVYHPEFITAEESWEDSSADWERRYLLSREVSGLSASASSEKGDLLDSPHIRLRLSKLRRCVQWLKVMGLFAFVVLCSILFSLYPDQGKLWQLLALSPLENYSVNLSSHVDSTLLQVDLAGALVASGPSRPGREEHIVVELTQADALGSRWRRPQQVTHNWTVYLNPRRSEHSVMSRTFEVLTRETVSISIRASLQQTQAVPLLMAHQYLRGSVETQVTIATAILAGVYALIIFEIVHRTLAAMLGSLAALAALAVIGDRPSLTHVVEWIDFETLALLFGMMILVAIFSETGFFDYCAVKAYRLSRGRVWAMIIMLCLIAAVLSAFLDNVTTMLLFTPVTIRLCEVLNLDPRQVLIAEVIFTNIGGAATAIGDPPNVIIVSNQELRKMGLDFAGFTAHMFIGICLVLLVCFPLLRLLYWNRKLYNKEPSEIVELKHEIHVWRLTAQRISPASREETAVRRLLLGKVLALEHLLARRLHTFHRQISQEDKNWETNIQELQKKHRISDGILLAKCLTVLGFVIFMFFLNSFVPGIHLDLGGLGLVQAGRYYLSTPES

SEQ ID NO: 56475 - protein, 264 aa, Homo sapiens
MHLEGRDGRRYPGAPAVELLQTSVPSGLAELVAGKRRLPRGAGGADPSHSCPRGAAGQSSWAPAGQEFASFLTKGRSHSSLPQMSSSRSKDSCFTENTPLLRNSLQEKGSRCIPVYHPEFITAEESWEDSSADWERRYLLSREVSGLSASASSEKGDLLDSPHIRLRLSKLRRCVQWLKVMGLFAFVVLCSILFSLYPDQGKLWQLLALSPLENYSVNLSSHVDSTLLQVDLAGALVASGPSRPGREEHIVVELTQADALGSRW

SEQ ID NO: 56476 - protein, 218 aa, Homo sapiens
MHLEGRDGRRYPGAPAVELLQTSVPSGLAELVAGKRRLPRGAGGADPSHSCPRGAAGQSSWAPAGQEFASFLTKGRSHSSLPQMSSSRSKDSCFTENTPLLRNSLQEKGSRCIPVYHPEFITAEESWEDSSADWERRYLLSREVSGLSASASSEKGDLLDSPHIRLRLSKLRRCVQWLKVMGLFAFVVLCSVTHNWTVYLNPRRSEHSVMSRTFEVLT

SEQ ID NO: 56477 - protein, 266 aa, Homo sapiens
MGSKTLPAPVPIHPSLQLTNYSFLQAVNGLPTVPSDHLPNLYGFSALHAVHLHQWTLGYPAMHLPRSSFSKVPGTVSSLVDARFQLPAFPWFPHVIQPKPEITAGGSVPALKTKPRFDFANLALAATQEDPAKLGRGEGPGSPAGGLGALLDVTKLSPEKKPTRGRLPSKTKKEFVCKFCGRHFTKSYNLLIHERTHTDERPYTCDICHKAFRRQDHLRDHRYIHSKEKPFKCQECGKGFCQSRTLAVHKTLHSQVKELKTSKIKC

SEQ ID NO: 56478 - protein, 266 aa, Homo sapiens; identical to SEQ ID NO: 56477

SEQ ID NO: 56479 - protein, 312 aa, Homo sapiens
MGSKALPAPIPLHPSLQLTNYSFLQAVNTFPATVDHLQGLYGLSAVQTMHMNHWTLGYPNVHEITRSTITEMAAAQGLVDARFPFPALPFTTHLFHPKQGAIAHVLPALHKDRPRFDFANLAVAATQEDPPKMGDLSKLSPGLGSPISGLSKLTPDRKPSRGRLPSKTKKEFICKFCGRHFTKSYNLLIHERTHTDERPYTCDICHKAFRRQDHLRDHRYIHSKEKPFKCQECGKGFCQSRTLAVHKTLHMQESPHKCPTCGRTFNQRSNLKTHLLTHTDIKPYSCEQCGKVFRRNCDLRRHSLTHTPRQDF

SEQ ID NO: 56480 - protein, 276 aa, Homo sapiens
MGSKALPAPIPLHPSLQLTNYSFLQAVNTFPATVDHLQGLYGLSAVQTMHMNHWTLGYPNVHEITRSTITEMAAAQGLVDARFPFPALPFTTHLFHPKQGAIAHVLPALHKDRPRFDFANLAVAATQEDPPKMGDLSKLSPGLGSPISGLSKLTPDRKPSRGRLPSKTKKEFICKFCGRHFTKSYNLLIHERTHTDERPYTCDICHKAFRRQDHLRDHRYIHSKEKPFKCQECGKGFCQSRTLAVHKTLHMQTSSPTAASSAAKCSGETVICGGTA

SEQ ID NO: 56481 - protein, 433 aa, Homo sapiens
MGLRAEEGKRKPPRSVRGEVSPSQGPLAQEDEARRLRSCTPACHPGKRGKGGHRARRQRSAWDLTTHPLTHRSQELRGAAATEGFLYVLLSHWVFVGAPRPPASDSWKKGLVPSAPPASRKMGSKALPAPIPLHPSLQLTNYSFLQAVNTFPATVDHLQGLYGLSAVQTMHMNHWTLGYPNVHEITRSTITEMAAAQGLVDARFPFPALPFTTHLFHPKQGAIAHVLPALHKDRPRFDFANLAVAATQEDPPKMGDLSKLSPGLGSPISGLSKLTPDRKPSRGRLPSKTKKEFICKFCGRHFTKSYNLLIHERTHTDERPYTCDICHKAFRRQDHLRDHRYIHSKEKPFKCQECGKGFCQSRTLAVHKTLHMQESPHKCPTCGRTFNQRSNLKTHLLTHTDIKPYSCEQCGKVFRRNCDLRRHSLTHTPRQDF

SEQ ID NO: 56482 - protein, 213 aa, Homo sapiens
MGSKALPAPIPLHPSLQLTNYSFLQAVNTFPATVDHLQGLYGLSAVQTMHMNHWTLGYPNVHEITRSTITEMAAAQGLVDARFPFPALPFTTHLFHPKQGAIAHVLPALHKDRPRFDFANLAVAATQEDPPKMGDLSKLSPGLGSPISGLSKLTPDRKPSRGRLPSKTKKEFICKFCGRHFTKSYNLLIHERTHTDERPYTCDICHKAFRRQD

SEQ ID NO: 56483 - protein, 312 aa, Homo sapiens; identical to SEQ ID NO: 56479

SEQ ID NO: 56484 - protein, 228 aa, Homo sapiens
MKTLFLGVTLGLAAALSFTLEEEDITGTWYVKAMVVDKDFPEDRRPRKVSPVKVTALGGGNLEATFTFMREDRCIQKKILMRKTEEPGKFSAYGGRKLIYLQELPGTDDYVFYCKDQRRGGLRYMGKLVASAPCRAVPLSPPWLTWPPHLQVGILIPTWRPWKNLRNWCSTRDSRRRTFSCPCRREAAFSNTRQPPGLHLQSPPYHQTQSPDHLDLPSSHDPSLLPPT

SEQ ID NO: 56485 - protein, 147 aa, Homo sapiens
MKTLFLGVTLGLAAALSFTLEEEDEGGSVHPEENPDAEDGGAWQIQRLWGQEAHIPAGAARDGRLRLLLQRPAPWGPALHGKACGICSLQGRAAVPTLAHLATSPAGRNPNTNLEALEEFKKLVQHKGLSEEDIFMPLQTGSCVLEH

SEQ ID NO: 56486 - protein, 170 aa, Homo sapiens
MKTLFLGVTLGLAAALSFTLEEEDITGTWYVKAMVVDKDFPEDRRPRKVSPVKVTALGGGNLEATFTFMREDRCIQKKILMRKTEEPGKFSAYGGRKLIYLQELPGTDDYVFYCKDQRRGGLRYMGKLVGRNPNTNLEALEEFKKLVQHKGLSEEDIFMPLQTGSCVLEH

SEQ ID NO: 56487 - protein, 170 aa, Homo sapiens; identical to SEQ ID NO: 56486

SEQ ID NO: 56488 - protein, 85 aa, Homo sapiens
MKTLFLGVTLGLAAALSFTLEEEDDGPWVHPEENPDAEDGGAWQIQRLWGQEAHVPAGAAQEGPLHLLLQRPAPWGPAPHGKACG

SEQ ID NO: 56489 - protein, 170 aa, Homo sapiens
MKTLFLGVTLGLAAALSFTLEEEDITGTWYVKAMVVDKDFPEDRRPRKVSPVKVTALGGGKLEATFTFMREDRCIQKKILMRKTEEPGKYSAYGGRKLMYLQELPRRDHYIFYCKDQHHGGLLHMGKLVGRNSDTNREALEEFKKLVQRKGLSEEDIFTPLQTGSCVPEH

SEQ ID NO: 56490 - protein, 2769 aa, Homo sapiens
MDVKERKPYRSLTRRRDAERRYTSSSADSEEGKAPQKSYSSSETLKAYDQDARLAYGSRVKDIVPQEAEEFCRTGANFTLRELGLEEVTPPHGTLYRTDIGLPHCGYSMGAGSDADMEADTVLSPEHPVRLWGRSTRSGRSSCLSSRANSNLTLTDTEHENTETDHPGGLQNHARLRTPPPPLSHAHTPNQHHAASINSLNRGNFTPRSNPSPAPTDHSLSGEPPAGGAQEPAHAQENWLLNSNIPLETRNLGKQPFLGTLQDNLIEMDILGASRHDGAYSDGHFLFKPGGTSPLFCTTSPGYPLTSSTVYSPPPRPLPRSTFARPAFNLKKPSKYCNWKCAALSAIVISATLVILLAYFVAMHLFGLNWHLQPMEGQMYEITEDTASSWPVPTDVSLYPSGGTGLETPDRKGKGTTEGKPSSFFPEDSFIDSGEIDVGRRASQKIPPGTFWRSQVFIDHPVHLKFNVSLGKAALVGIYGRKGLPPSHTQFDFVELLDGRRLLTQEARSLEGTPRQSRGTVPPSSHETGFIQYLDSGIWHLAFYNDGKESEVVSFLTTAIESVDNCPSNCYGNGDCISGTCHCFLGFLGPDCGRASCPVLCSGNGQYMKGRCLCHSGWKGAECDVPTNQCIDVACSNHGTCITGTCICNPGYKGESCEEVDCMDPTCSGRGVCVRGECHCSVGWGGTNCETPRATCLDQCSGHGTFLPDTGLCSCDPSWTGHDCSIEICAADCGGHGVCVGGTCRCEDGWMGAACDQRACHPRCAEHGTCRDGKCECSPGWNGEHCTIAHYLDRVVKEGCPGLCNGNGRCTLDLNGWHCVCQLGWRGAGCDTSMETACGDSKDNDGDGLVDCMDPDCCLQPLCHINPLCLGSPNPLDIIQETQVPVSQQNLHSFYDRIKFLVGRDSTHIIPGENPFDGGHACVIRGQVMTSDGTPLVGVNISFVNNPLFGYTISRQDGSFDLVTNGGISIILRFERAPFITQEHTLWLPWDRFFVMETIIMRHEENEIPSCDLSNFARPNPVVSPSPLTSFASSCAEKGPIVPEIQALQEEISISGCKMRLSYLSSRTPGYKSVLRISLTHPTIPFNLMKVHLMVAVEGRLFRKWFAAAPDLSYYFIWDKTDVYNQKVFGLSEAFVSVGYEYESCPDLILWEKRTTVLQGYEIDASKLGGWSLDKHHALNIQSGILHKGNGENQFVSQQPPVIGSIMGNGRRRSISCPSCNGLADGNKLLAPVALTCGSDGSLYVGDFNYIRRIFPSGNVTNILELRNKDFRHSHSPAHKYYLATDPMSGAVFLSDSNSRRVFKIKSTVVVKDLVKNSEVVAGTGDQCLPFDDTRCGDGGKATEATLTNPRGITVDKFGLIYFVDGTMIRRIDQNGIISTLLGSNDLTSARPLSCDSVMDISQVHLEWPTDLAINPMDNSLYVLDNNVVLQISENHQVRIVAGRPMHCQVPGIDHFLLSKVAIHATLESATALAVSHNGVLYIAETDEKKINRIRQVTTSGEISLVAGAPSGCDCKNDANCDCFSGDDGYAKDAKLNTPSSLAVCADGELYVADLGNIRIRFIRKNKPFLNTQNMYELSSPIDQELYLFDTTGKHLYTQSLPTGDYLYNFTYTGDGDITLITDNNGNMVNVRRDSTGMPLWLVVPDGQVYWVTMGTNSALKSVTTQGHELAMMTYHGNSGLLATKSNENGWTTFYEYDSFGRLTNVTFPTGQVSSFRSDTDSSVHVQVETSSKDDVTITTNLSASGAFYTLLQDQVRNSYYIGADGSLRLLLANGMEVALQTEPHLLAGTVNPTVGKRNVTLPIDNGLNLVEWRQRKEQARGQVTVFGRRLRVHNRNLLSLDFDRVTRTEKIYDDHRKFTLRILYDQAGRPSLWSPSSRLNGVNVTYSPGGYIAGIQRGIMSERMEYDQAGRITSRIFADGKTWSYTYLEKSMVLLLHSQRQYIFEFDKNDRLSSVTMPNVARQTLETIRSVGYYRNIYQPPEGNASVIQDFTEDGHLLHTFYLGTGRRVIYKYGKLSKLAETLYDTTKVSFTYDETAGMLKTINLQNEGFTCTIRYRQIGPLIDRQIFRFTEEGMVNARFDYNYDNSFRVTSMQAVINETPLPIDLYRYDDVSGKTEQFGKFGVIYYDINQIITTAVMTHTKHFDAYGRMKEVQYEIFRSLMYWMTVQYDNMGRVVKKELKVGPYANTTRYSYEYDADGQLQTVSINDKPLWRYSYDLNGNLHLLSPGNSARLTPLRYDIRDRITRLGDVQYKMDEDGFLRQRGGDIFEYNSAGLLIKAYNRAGSWSVRYRYDGLGRRVSSKSSHSHHLQFFYADLTNPTKVTHLYNHSSSEITSLYYDLQGHLFAMELSSGDEFYIACDNIGTPLAVFSGTGLMIKQILYTAYGEIYMDTNPNFQIIIGYHGGLYDPLTKLVHMGRRDYDVLAGRWTSPDHELWKHLSSSNVMPFNLYMFKNNNPISNSQDIKCFMTDVNSWLLTFGFQLHNVIPGYPKPDMDAMEPSYELIHTQMKTQEWDNSKSILGVQCEVQKQLKAFVTLERFDQLYGSTITSCQQAPKTKKFASSGSVFGKGVKFALKDGRVTTDIISVANEDGRRVAAILNHAHYLENLHFTIDGVDTHYFVKPGPSEGDLAILGLSGGRRTLENGVNVTVSQINTVLNGRTRRYTDIQLQYGALCLNTRYGTTLDEEKARVLELARQRAVRQAWAREQQRLREGEEGLRAWTEGEKQQVLSTGRVQGYDGFFVISVEQYPELSDSANNIHFMRQSEMGRR

SEQ ID NO: 56491 - skipped

SEQ ID NO: 56492 - protein, 467 aa, Homo sapiens
MPGRWRWQRDMHPARKLLSLLFLILMGTELTQVLPTNPEESWQVYSSAQDSEGRCICTVVAPQQTMCSRDARTKQLRQLLEKVQNMSQSIEVLDRRTQRDLQYVEKMENQMKGLESKFKQVEESHKQHLARQFKAIKAKMDELRPLIPVLEEYKADAKLVLQFKEEVQNLTSVLNELQEEIGAYDYDELQSRVSNLEERLRACMQKLACGKLTGISDPVTVKTSGSRFGSWMTDPLAPEGDNRVWYMDGYHNNRFVREYKSMVDFMNTDNFTSHRLPHPWSGTGQVVYNGSIYFNKFQSHIIIRFDLKTETILKTRSLDYAGYNNMYHYAWGGHSDIDLMVDESGLWAVYATNQNAGNIVVSRLDPVSLQTLQTWNTSYPKRSAGEAFIICGTLYVTNGYSGGTKVHYAYQTNASTYEYIDIPFQNKYSHISMLDYNPKDRALYAWNNGHQILYNVTLFHVIRSDEL

SEQ ID NO: 56493 - protein, 135 aa, Homo sapiens
MPGRWRWQRDMHPARKLLSLLFLILMGTELTQVLPTNPEESWQVYSSAQDSEGRCICTVVAPQQTMCSRDARTKQLRQLLEKVQNMSQSIEVLDRRTQRDLQYVEKMENQMKGLESKFKQVEESHKQHLARQFKG

SEQ ID NO: 56494 - protein, 485 aa, Homo sapiens
MSVPLLKIGVVLSTMAMITNWMSQTLPSLVGLNTTKLSAAGGGTLDRSTGVLPTNPEESWQVYSSAQDSEGRCICTVVAPQQTMCSRDARTKQLRQLLEKVQNMSQSIEVLDRRTQRDLQYVEKMENQMKGLESKFKQVEESHKQHLARQFKAIKAKMDELRPLIPVLEEYKADAKLVLQFKEEVQNLTSVLNELQEEIGAYDYDELQSRVSNLEERLRACMQKLACGKLTGISDPVTVKTSGSRFGSWMTDPLAPEGDNRVWYMDGYHNNRFVREYKSMVDFMNTDNFTSHRLPHPWSGTGQVVYNGSIYFNKFQSHIIIRFDLKTETILKTRSLDYAGYNNMYHYAWGGHSDIDLMVDESGLWAVYATNQNAGNIVVSRLDPVSLQTLQTWNTSYPKRSAGEAFIICGTLYVTNGYSGGTKVHYAYQTNASTYEYIDIPFQNKYSHISMLDYNPKDRALYAWNNGHQILYNVTLFHVIRSDEL

SEQ ID NO: 56495 - protein, 458 aa, Homo sapiens
MGEAPGREGRGPCPQLESPRRRRVLPTNPEESWQVYSSAQDSEGRCICTVVAPQQTMCSRDARTKQLRQLLEKVQNMSQSIEVLDRRTQRDLQYVEKMENQMKGLESKFKQVEESHKQHLARQFKAIKAKMDELRPLIPVLEEYKADAKLVLQFKEEVQNLTSVLNELQEEIGAYDYDELQSRVSNLEERLRACMQKLACGKLTGISDPVTVKTSGSRFGSWMTDPLAPEGDNRVWYMDGYHNNRFVREYKSMVDFMNTDNFTSHRLPHPWSGTGQVVYNGSIYFNKFQSHIIIRFDLKTETILKTRSLDYAGYNNMYHYAWGGHSDIDLMVDESGLWAVYATNQNAGNIVVSRLDPVSLQTLQTWNTSYPKRSAGEAFIICGTLYVTNGYSGGTKVHYAYQTNASTYEYIDIPFQNKYSHISMLDYNPKDRALYAWNNGHQILYNVTLFHVIRSDEL

SEQ ID NO: 56496 - protein, 153 aa, Homo sapiens
MSVPLLKIGVVLSTMAMITNWMSQTLPSLVGLNTTKLSAAGGGTLDRSTGVLPTNPEESWQVYSSAQDSEGRCICTVVAPQQTMCSRDARTKQLRQLLEKVQNMSQSIEVLDRRTQRDLQYVEKMENQMKGLESKFKQVEESHKQHLARQFKG

SEQ ID NO: 56497 - protein, 510 aa, Homo sapiens
MRPGLSFLLALLFFLGQAAGDLGDVGPPIPSPGFSSFPGVDSSSSFSSSSRSGSSSSRSLGSGGSVSQLFSNFTGSVDDRGTCQCSVSLPDTTFPVDRVERLEFTAHVLSQKFEKELSKVREYVQLISVYEKKLLNLTVRIDIMEKDTISYTELDFELIKVEVKEMEKLVIQLKESFGGSSEIVDQLEVEIRNMTLLVEKLETLDKNNVLAIRREIVALKTKLKECEASKDQNTPVVHPPPTPGSCGHGGVVNISKPSVVQLNWRGFSYLYGAWGRDYSPQHPNKGLYWVAPLNTDGRLLEYYRLYNTLDDLLLYINARELRITYGQGSGTAVYNNNMYVNMYNTGNIARVNLTTNTIAVTQTLPNAAYNNRFSYANVAWQDIDFAVDENGLWVIYSTEASTGNMVISKLNDTTLQVLNTWYTKQYKPSASNAFMVCGVLYATRTMNTRTEEIFYYYDTNTGKEGKLDIVMHKMQEKVQSINYNPFDQKLYVYNDGYLLNYDLSVLQKPQ

SEQ ID NO: 56498 - protein, 163 aa, Homo sapiens
MAEDRPQQPQLDMPLVLDQGLTRQMRLRVESLKQRGEKRQDGEKLLQPAESVYRLNFTQQQRLQFERWNVVLDKPGKVTITGTSQNWTPDLTNLMTRQLLDPTAIFWRKEDSDAIDWNEADALEFGERLSDLAKIRKVMYFLVTFGEGVEPANLKASVVFNQL

SEQ ID NO: 56499 - protein, 312 aa, Homo sapiens
MDGGNQSEGSEFLLLGMSESPEQQRILFWMFLSMYLVTVVGNVLIILAISSDSRLHTPVYFFLANLSFTDLFFVTNTIPKMLVNLQSHNKAISYAGCLTQLYFLVSLVALDNLILAVMAYDRYVAICCPLHYTTAMSPKLCILLLSLCWVLSVLYGLIHTLLMTRVTFCGSRKIHYIFCEMYVLLRMACSNIQINHTVLIATGCFIFLIPFGFVIISYVLIIRAILRIPSVSKKYKAFSTCASHLGAVSLFYGTLCMVYLKPLHTYSVKDSVATVMYAVVTPMMNPFIYSLRNKDMHGALGRLLDKHFKRLT

SEQ ID NO: 56500 - protein, 312 aa, Homo sapiens
MSGTNQSSVSEFLLLGLSRQPQQQHLLFVFFLSMYLATVLGNLLIILSVSIDSCLHTPMYFFLSNLSFVDICFSFTTVPKMLANHILETQTISFCGCLTQMYFVFMFVDMDNFLLAVMAYDHFVAVCHPLHYTAKMTHQLCALLVAGLWVVANLNVLLHTLLMAPLSFCADNAITHFFCDVTPLLKLSCSDTHLNEVIILSEGALVMITPFLCILASYMHITCTVLKVPSTKGRWKAFSTCGSHLAVVLLFYSTIIAVYFNPLSSHSAEKDTMATVLYTVVTPMLNPFIYSLRNRYLKGALKKVVGRVVFSV

SEQ ID NO: 56501 - protein, 307 aa, Homo sapiens
MNHSVVTEFIILGLTKKPELQGIIFLFFLIVYLVAFLGNMLIIIAKIYNNTLHTPMYVFLLTLAVVDIICTTSIIPKMLGTMLTSENTISYAGCMSQLFLFTWSLGAEMVLFTTMAYDRYVAICFPLHYSTIMNHHMCVALLSMVMAIAVTNSWVHTALIMRLTFCGPNTIDHFFCEIPPLLALSCSPVRINEVMVYVADITLAIGDFILTCISYGFIIVAILRIRTVEGKRKAFSTCSSHLTVVTLYYSPVIYTYIRPASSYTFERDKVVAALYTLVTPTLNPMVYSFQNREMQAGIRKVFAFLKH

SEQ ID NO: 56502 - protein, 309 aa, Homo sapiens
MENRNNMTEFVLLGLTENPKMQKIIFVVFFVIYIITVVGYVLIVVTITASPSLGSPMYLSLAYLSFIDACYSSVNTPNLITHSLYGKKAILFNGCMTQVFGEHFFGGAEGILLTVMAYDHYVAICKPLHYMTIMNQCVCALLMGVVWMGGFLHATIQILFIFQLPFCGPNVIDHFMCDLNPLLNLACTDTHMLELFIAANSGFICLLNFALLLVSYVVILCSLRTHSLEARHKALSTCVSHITVVILFFVPCIFVYMRPAATLPIDKAVAIFYTMITPMLNPLIYTLKNAQMKNAIRKLCSRKDISGDK

SEQ ID NO: 56503 - protein, 325 aa, Homo sapiens
MFLYLCFIFQRTCSEEMEEENATLLTEFVLTGFLHQPDCKIPLFLAFLVIYLITIMGNLGLIVLIWKDPHLHIPMYLFLGSLAFVDASLSSTVTPKMLINFLAKSKMISLSECMVQFFSLVTTVTTECFLLATMAYDRYVAICKALLYPVIMTNELCIQLLVLSFIGGLLHALIHEAFSFRLTFCNSNIIQHFYCDIIPLLKISCTDSSINFLMVFIFAGSVQVFTIGTILISYTIILFTILEKKSIKGIRKAVSTCGAHLLSVSLYYGPLTFKYLGSASPQADDQDMMESLFYTVIVPLLNPMIYSLRNKQVIASFTKMFKSNV

SEQ ID NO: 56504 - protein, 320 aa, Homo sapiens
METGNQTHAQEFLLLGFSATSEIQFILFGLFLSMYLVTFTGNLLIILAICSDSHLHTPMYFFLSNLSFADLCFTSTTVPKMLLNILTQNKFITYAGCLSQIFFFTSFGCLDNLLLTVMAYDRFVAVCHPLHYTVIMNPQLCGLLVLGSWCISVMGSLLETLTVLRLSFCTEMEIPHFFCDLLEVLKLACSDTFINNVVIYFATGVLGVISFTGIFFSYYKIVFSILRISSAGRKHKAFSTCGSHLSVVTLFYGTGFGVYLSSAATPSSRTSLVASVMYTMVTPMLNPFIYSLRNTDMKRALGRLLSRATFFNGDITAGLS

SEQ ID NO: 56505 - protein, 319 aa, Homo sapiens
MERGNQTEVGNFLLLGFAEDSDMQLLLHGLFLSMYLVTIIGNLLIILTISSDSHLHTPMYFFLSNLSFADICFTSTTVPKMLVNIQTQSKMITFAGCLTQIFFFIAFGCLDNLLLTMTAYDRFVAICYPLHYTVIMNPRLCGLLVLGSWCISVMGSLLETLTILRLSFCTNMEIPHFFCDPSEVLKLACSDTFINNIVMYFVTIVLGVFPLCGILFSYSQIFSSVLRVSARGQHKAFSTCGSHLSVVSLFYGTGLGVYLSSAVTPPSRTSLAASVMYTMVTPMLNPFIYSLRNKDMKGSLGRLLLRATSLKEGTIAKLS

SEQ ID NO: 56506 - protein, 312 aa, Homo sapiens
MEAENLTELSKFLLLGLSDDPELQPVLFGLFLSMYLVTVLGNLLIILAVSSDSHLHTPMYFFLSNLSFVDICFISTTVPKMLVSIQARSKDISYMGCLTQVYFLMMFAGMDTFLLAVMAYDRFVAICHPLHYTVIMNPCLCGLLVLASWFIIFWFSLVHILLMKRLTFSTGTEIPHFFCEPAQVLKVACSNTLLNNIVLYVATALLGVFPVAGILFSYSQIVSSLMGMSSTKGKYKAFSTCGSHLCVVSLFYGTGLGVYLSSAVTHSSQSSSTASVMYAMVTPMLNPFIYSLRNKDVKGALERLLSRADSCP

SEQ ID NO: 56507 - protein, 323 aa, Homo sapiens
MDSDASLVSSRPSSPEPDDLFLPARSKGSSGSAFTGGTVSSSTPSDCPPELSAELRGAMGSAGAHPGDKLGGSGFKSSSSSTSSSTSSAAASSTKKDKKQMTEPELQQLRLKINSRERKRMHDLNIAMDGLREVMPYAHGPSVRKLSKIATLLLARNYILMLTNSLEEMKRLVSEIYGGHHAGFHPSACGGLAHSAPLPAATAHPAAAAHAAHHPAVHHPILPPAAAAAAAAAAAAAVSSASLPGSGLPSVGSIRPPHGLLKSPSAAAAAPLGGGGGGSGASGGFQHWGGMPCPCSMCQVPPPHHHVSAMGAGSLPRLTSDAK

SEQ ID NO: 56508 - protein, 323 aa, Homo sapiens; identical to SEQ ID NO: 56507

SEQ ID NO: 56509 - protein, 62 aa, Homo sapiens
MDSDASLVSSRPSSPEPDDLFLPARSKGSSGSAFTGGTVSSSTPSDCPPELSAELRGAMGSA

SEQ ID NO: 56510 - protein, 440 aa, Homo sapiens
MEYQILKMSLCLFILLFLTPGILCICPLQCICTERHRHVDCSGRNLSTLPSGLQENIIHLNLSYNHFTDLHNQLTQYTNLRTLDISNNRLESLPAHLPRSLWNMSAANNNIKLLDKSDTAYQWNLKYLDVSKNMLEKVVLIKNTLRSLEVLNLSSNKLWTVPTNMPSKLHIVDLSNNSLTQILPGTLINLTNLTHLYLHNNKFTFIPDQSFDQLFQLQEITLYNNRWSCDHKQNITYLLKWMMETKAHVIGTPCSTQISSLKEHNMYPTPSGFTSSLFTVSGMQTVDTINSLSVVTQPKVTKIPKQYRTKETTFGATLSKDTTFTSTDKAFVPYPEDTSTETINSHEAAAATLTIHLQDGMVTNTSLTSSTKSSPTPMTLSITSGMPNNFSEMPQQSTTLNLWREETTTNVKTPLPSVANAWKVNASFLLLLNVVVMLAV

SEQ ID NO: 56511 - protein, 272 aa, Homo sapiens
MNSDSSSVSSRASSPDMDEMYLRDHHHRHHHHQESRLNSVSSTQGDMMQKMPGESLSRAGAKAAGESSKYKIKKQLSEQDLQQLRLKINGRERKRMHDLNLAMDGLREVMPYAHGPSVRKLSKIATLLLARNYILMLTSSLEEMKRLVGEIYGGHHSAFHCGTVGHSAGHPAHAANSVHPVHPILGGALSSGNASSPLSAASLPAIGTIRPPHSLLKAPSTPPALQLGSGFQHWAGLPCPCTICQMPPPPHLSALSTANMARLSAESKDLLK

SEQ ID NO: 56512 - protein, 124 aa, Homo sapiens
MWKGCLTLYTGRGGELQKIGEFCMVYSEVPNFSEPNPDYRGQQNKGAQSEQKNNSMNSNMGTGTFGPVGNGVHTGPESREHQFSHAGRSNGRGLINPQLQGTASNQTVMTTISNGRDPRRAFKR

SEQ ID NO: 56513 - protein, 124 aa, Homo sapiens; identical to SEQ ID NO: 56512

SEQ ID NO: 56514 - protein, 204 aa, Homo sapiens
MNRVNDPLIFIRDIKPGLKNLNVVFIVLEIGRVTKTKDGHEVRSCKVADKTGSITISVWDEIGGLIQPGDIIRLTRGYASMWKGCLTLYTGRGGELQKIGEFCMVYSEVPNFSEPNPDYRGQQNKGAQSEQKNNSMNSNMGTGTFGPVGNGVHTGPESREHQFSHAGRSNGRGLINPQLQGTASNQTVMTTISNGRDPRRAFKR

SEQ ID NO: 56515 - protein, 211 aa, Homo sapiens
MTTETFVKDIKPGLKNLNLIFIVLETGRVTKTKDGHEVRTCKVADKTGSINISVWDDVGNLIQPGDIIRLTKGYASVFKGCLTLYTGRGGDLQKIGEFCMVYSEVPNFSEPNPEYSTQQAPNKAVQNDSNPSASQPTTGPSAASPASENQNGNGLSAPPGPGGGPHPPHTPSHPPSTRITRSQPNHTPAGPPGPSSNPVSNGKETRRSSKR

SEQ ID NO: 56516 - protein, 211 aa, Homo sapiens; identical to SEQ ID NO: 56515

SEQ ID NO: 56517 - protein, 211 aa, Homo sapiens; identical to SEQ ID NO: 56515

SEQ ID NO: 56518 - protein, 152 aa, Homo sapiens
MTTETFVKDIKPGLKNLNLIFIVLETGRVTKTKDGHEVRTCKVADKTGSINISVWDDVGNLIQPGDIIRLTKGYASVFKGCLTLYTGRGGDLQKIGEFCMVYSEVPNFSEPNPEYSTQQAPNKAVQNDSNPSASQPTTGPSAASPASENQNG

SEQ ID NO: 56519 - protein, 144 aa, Homo sapiens
MTTETFVKDIKPGLKNLNLIFIVLETGRVTKTKDGHEVRTCKVADKTGSINISVWDDVGNLIQPGDIIRLTKGYASVFKGCLTLYTGRGGDLQKIGEFCMVYSEVPNFSEPNPEYSTQQAPNKAVQNDSNPSASQPTTGPSAAS

SEQ ID NO: 56520 - protein, 802 aa, Homo sapiens
MGHPPLEFSDCYLDSPDFRERLKCYEQELERTNKFIKDVIKDGNALISAMRNYSSAVQKFSQTLQSFQFDFIGDTLTDDEINIAESFKEFAELLNEVENERMMMVHNASDLLIKPLENFRKEQIGFTKERKKKFEKDGERFYSLLDRHLHLSSKKKESQLQEADLQVDKERHNFFESSLDYVYQIQEVQESKKFNIVEPVLAFLHSLFISNSLTVELTQDFLPYKQQLQLSLQNTRNHFSSTREEMEELKKRMKEAPQTCKLPGQPTIEGYLYTQEKWALGISWVKYYCQYEKETKTLTMTPMEQKPGAKQGPLDLTLKYCVRRKTESIDKRFCFDIETNERPGTITLQALSEANRRLWMEAMDGKEPIYHSPITKQQEMELNEVGFKFVRKCINIIETKGIKTEGLYRTVGSNIQVQKLLNAFFDPKCPGDVDFHNSDWDIKTITSSLKFYLRNLSEPVMTYRLHKELVSAAKSDNLDYRLGAIHSLVYKLPEKNREMLELLIRHLVNVCEHSKENLMTPSNMGVIFGPTLMRAQEDTVAAMMNIKFQNIVVEILIEHFGKIYLGPPEESAAPPVPPPRVTARRHKPITISKRLLRERTVFYTSSLDESEDEIQHQTPNGTITSSIEPPKPPQHPKLPIQRSGETDPGRKSPSRPILDGKLEPCPEVDVGKLVSRLQDGGTKITPKATNGPMPGSGPTKTPSFHIKRPAPRPLAHHKEGDADSFSKVRPPGEKPTIIRPPVRPPDPPCRAATPQKPEPKPDIVAGNAGEITSSVVASRTRFFETASRKTGSSQGRLPGDES

SEQ ID NO: 56521 - protein, 694 aa, Homo sapiens
MGHPPLEFSDCYLDSPDFRERLKCYEQELERTNKFIKDVIKDGNALISAMRNYSSAVQKFSQTLQSFQFDFIGDTLTDDEINIAESFKEFAELLNEVENERMMMVHNASDLLIKPLENFRKEQIGFTKERKKKFEKDGERFYSLLDRHLHLSSKKKESQLQEADLQVDKERHNFFESSLDYVYQIQEVQESKKFNIVEPVLAFLHSLFISNSLTVELTQDFLPYKQQLQLSLQNTRNHFSSTREEMEELKKRMKEAPQTCKLPGQPTIEGYLYTQEKWALGISWVKYYCQYEKETKTLTMTPMEQKPGAKQGPLDLTLKYCVRRKTESIDKRFCFDIETNERPGTITLQALSEANRRLWMEAMDGKEPIYHSPITKQQEMELNEVGFKFVRKCINIIETKGIKTEGLYRTVGSNIQVQKLLNAFFDPKCPGDVDFHNSDWDIKTITSSLKFYLRNLSEPVMTYRLHKELVSAAKSDNLDYRLGAIHSLVYKLPEKNREMLELLIRHLVNVCEHSKENLMTPSNMGVIFGPTLMRAQEDTVAAMMNIKFQNIVVEILIEHFGKIYLGPPEESAAPPVPPPRVTARRHKPITISKRLLRERTVFYTSSLDESEGDADSFSKVRPPGEKPTIIRPPVRPPDPPCRAATPQKPEPKPDIVAGNAGEITSSVVASRTRFFETASRKTGSSQGRLPGDES

SEQ ID NO: 56522 - protein, 74 aa, Homo sapiens
MLELLIRHLVNVCEHSKENLMTPSNMGVIFGPTLMRAQEDTVAAMMNIKFQNIVVEILIEHFGKISSFFLHRSI

SEQ ID NO: 56523 - protein, 1036 aa, Homo sapiens
MASSVGNVADSTGLAELAHREYQAGDFEAAERHCMQLWRQEPDNTGVLLLLSSIHFQCRRLDRSAHFSTLAIKQNPLLAEAYSNLGNVYKERGQLQEAIEHYRHALRLKPDFIDGYINLAAALVAAGDMEGAVQAYVSALQYNPDLYCVRSDLGNLLKALGRLEEAKACYLKAIETQPNFAVAWSNLGCVFNAQGEIWLAIHHFEKAVTLDPNFLDAYINLGNVLKEARIFDRAVAAYLRALSLSPNHAVVHGNLACVYYEQGLIDLAIDTYRRAIELQPHFPDAYCNLANALKEKGSVAEAEDCYNTALRLCPTHADSLNNLANIKREQGNIEEAVRLYRKALEVFPEFAAAHSNLASVLQQQGKLQEALMHYKEAIRISPTFADAYSNMGNTLKEMQDVQGALQCYTRAIQINPAFADAHSNLASIHKDSGNIPEAIASYRTALKLKPDFPDAYCNLAHCLQIVCDWTDYDERMKKLVSIVADQLEKNRLPSVHPHHSMLYPLSHGFRKAIAERHGNLCLDKINVLHKPPYEHPKDLKLSDGRLRVGYVSSDFGNHPTSHLMQSIPGMHNPDKFEVFCYALSPDDGTNFRVKVMAEANHFIDLSQIPCNGKAADRIHQDGIHILVNMNGYTKGARNELFALRPAPIQAMWLGYPGTSGALFMDYIITDQETSPAEVAEQYSEKLAYMPHTFFIGDHANMFPHLKKKAVIDFKSNGHIYDNRIVLNGIDLKAFLDSLPDVKIVKMKCPDGGDNADSSNTALNMPVIPMNTIAEAVIEMINRGQIQITINGFSISNGLATTQINNKAATGEEVPRTIIVTTRSQYGLPEDAIVYCNFNQLYKIDPSTLQMWANILKRVPNSVLWLLRFPAVGEPNIQQYAQNMGLPQNRIIFSPVAPKEEHVRRGQLADVCLDTPLCNGHTTGMDVLWAGTPMVTMPGETLASRVAASQLTCLGCLELIAKNRQEYEDIAVKLGTDLEYLKKVRGKVWKQRISSPLFNTKQYTMELERLYLQMWEHYAAGNKPDHMIKPVEVTESA

SEQ ID NO: 56524 - protein, 1046 aa, Homo sapiens
MASSVGNVADSTEPTKRMLSFQGLAELAHREYQAGDFEAAERHCMQLWRQEPDNTGVLLLLSSIHFQCRRLDRSAHFSTLAIKQNPLLAEAYSNLGNVYKERGQLQEAIEHYRHALRLKPDFIDGYINLAAALVAAGDMEGAVQAYVSALQYNPDLYCVRSDLGNLLKALGRLEEAKACYLKAIETQPNFAVAWSNLGCVFNAQGEIWLAIHHFEKAVTLDPNFLDAYINLGNVLKEARIFDRAVAAYLRALSLSPNHAVVHGNLACVYYEQGLIDLAIDTYRRAIELQPHFPDAYCNLANALKEKGSVAEAEDCYNTALRLCPTHADSLNNLANIKREQGNIEEAVRLYRKALEVFPEFAAAHSNLASVLQQQGKLQEALMHYKEAIRISPTFADAYSNMGNTLKEMQDVQGALQCYTRAIQINPAFADAHSNLASIHKDSGNIPEAIASYRTALKLKPDFPDAYCNLAHCLQIVCDWTDYDERMKKLVSIVADQLEKNRLPSVHPHHSMLYPLSHGFRKAIAERHGNLCLDKINVLHKPPYEHPKDLKLSDGRLRVGYVSSDFGNHPTSHLMQSIPGMHNPDKFEVFCYALSPDDGTNFRVKVMAEANHFIDLSQIPCNGKAADRIHQDGIHILVNMNGYTKGARNELFALRPAPIQAMWLGYPGTSGALFMDYIITDQETSPAEVAEQYSEKLAYMPHTFFIGDHANMFPHLKKKAVIDFKSNGHIYDNRIVLNGIDLKAFLDSLPDVKIVKMKCPDGGDNADSSNTALNMPVIPMNTIAEAVIEMINRGQIQITINGFSISNGLATTQINNKAATGEEVPRTIIVTTRSQYGLPEDAIVYCNFNQLYKIDPSTLQMWANILKRVPNSVLWLLRFPAVGEPNIQQYAQNMGLPQNRIIFSPVAPKEEHVRRGQLADVCLDTPLCNGHTTGMDVLWAGTPMVTMPGETLASRVAASQLTCLGCLELIAKNRQEYEDIAVKLGTDLEYLKKVRGKVWKQRISSPLFNTKQYTMELERLYLQMWEHYAAGNKPDHMIKPVEVTESA

SEQ ID NO: 56525 - protein, 109 aa, Homo sapiens
MSITDVLSADDIAAALQECRDPDTFEPQKFFQTSGLSKMSANQVKDVFRFIDNDQSGYLDEEELKFFLQKFESGARELTESETKSLMAAADNDGDGKIGAEEFQEMVHS

SEQ ID NO: 56526 - protein, 109 aa, Homo sapiens; identical to SEQ ID NO: 56525

SEQ ID NO: 56527 - protein, 545 aa, Homo sapiens
MPPFLLLTCLFITGTSVSPVALDPCSAYISLNEPWRNTDHQLDESQGPPLCDNHVNGEWYHFTGMAGDAMPTFCIPENHCGTHAPVWLNGSHPLEGDGIVQRQACASFNGNCCLWNTTVEVKACPGGYYVYRLTKPSVCFHVYCGHFYDICDEDCHGSCSDTSECTCAPGTVLGPDRQTCFDENECEQNNGGCSEICVNLKNSYRCECGVGRVLRSDGKTCEDVEGCHNNNGGCSHSCLGSEKGYQCECPRGLVLSEDNHTCQVPVLCKSNAIEVNIPRELVGGLELFLTNTSCRGVSNGTHVNILFSLKTCGTVVDVVNDKIVASNLVTGLPKQTPGSSGDFIIRTSKLLIPVTCEFPRLYTISEGYVPNLRNSPLEIMSRNHGIFPFTLEIFKDNEFEEPYREALPTLKLRDSLYFGIEPVVHVSGLESLVESCFATPTSKIDEVLKYYLIRDGCVSDDSVKQYTSRDHLAKHFQVPVFKFVGKDHKEVFLHCRVLVCGVLDERSRCAQGCHRRMRRGAGGEDSAGLQGQTLTGGPIRIDWED

SEQ ID NO: 56528 - protein, 321 aa, Homo sapiens
MPPFLLLTCLFITGTSVSPVALDPCSAYISLNEPWRNTDHQLDESQGPPLCDNHVNGEWYHFTGMAGDAMPTFCIPENHCGTHAPVWLNGSHPLEGDGIVQRQACASFNGNCCLWNTTVEVKACPGGYYVYRLTKPSVCFHVYCGHFYDICDEDCHGSCSDTSECTCAPGTVLGPDRQTCFDENECEQNNGGCSEICVNLKNSYRCECGVGRVLRSDGKTCEDVEGCHNNNGGCSHSCLGSEKGYQCECPRGLVLSEDNHTCQVPVLCKSNAIEVNIPRELVGGLELFLTNTSCRGVSNGTHVNILFSLKTCGTVVDSCFQ

SEQ ID NO: 56529 - protein, 252 aa, Homo sapiens
MGVLLTQRTLLSLVLALLFPSMASMAAIGSCSKEYRVLLGQLQKQTDLMQDTSRLLDPYIRIQGLDVPKLREHCRERPGAFPSEETLRGLGRRGFLQTLNATLGCVLHRLADLEQRLPKAQDLERSGLNIEDLEKLQMARPNILGLRNNIYCMAQLLDNSDTAEPTKAGRGASQPPTPTPASDAFQRKLEGCRFLHGYHRFMHSVGRVFSKWGESPNRSRRHSPHQALRKGVRRTRPSRKGKRLMTRGQLPR

SEQ ID NO: 56530 - protein, 231 aa, Homo sapiens
MASMAAIGSCSKEYRVLLGQLQKQTDLMQDTSRLLDPYIRIQGLDVPKLREHCRERPGAFPSEETLRGLGRRGFLQTLNATLGCVLHRLADLEQRLPKAQDLERSGLNIEDLEKLQMARPNILGLRNNIYCMAQLLDNSDTAEPTKAGRGASQPPTPTPASDAFQRKLEGCRFLHGYHRFMHSVGRVFSKWGESPNRSRRHSPHQALRKGVRRTRPSRKGKRLMTRGQLPR

SEQ ID NO: 56531 - protein, 979 aa, Homo sapiens
MALFAVFQTTFFLTLLSLRTYQSEVLAERLPLTPVSLKVSTNSTRQSLHLQWTVHNLPYHQELKMVFQIQISRIETSNVIWVGNYSTTVKWNQVLHWSWESELPLECATHFVRIKSLVDDAKFPEPNFWSNWSSWEEVSVQDSTGQDILFVFPKDKLVEEGTNVTICYVSRNIQNNVSCYLEGKQIHGEQLDPHVTAFNLNSVPFIRNKGTNIYCEASQGNVSEGMKGIVLFVSKVLEEPKDFSCETEDFKTLHCTWDPGTDTALGWSKQPSQSYTLFESFSGEKKLCTHKNWCNWQITQDSQETYNFTLIAENYLRKRSVNILFNLTHRVYLMNPFSVNFENVNATNAIMTWKVHSIRNNFTYLCQIELHGEGKMMQYNVSIKVNGEYFLSELEPATEYMARVRCADASHFWKWSEWSGQNFTTLEAAPSEAPDVWRIVSLEPGNHTVTLFWKPLSKLHANGKILFYNVVVENLDKPSSSELHSIPAPANSTKLILDRCSYQICVIANNSVGASPASVIVISADPENKEVEEERIAGTEGGFSLSWKPQPGDVIGYVVDWCDHTQDVLGDFQWKNVGPNTTSTVISTDAFRPGVRYDFRIYGLSTKRIACLLEKKTGYSQELAPSDNPHVLVDTLTSHSFTLSWKDYSTESQPGFIQGYHVYLKSKARQCHPRFEKAVLSDGSECCKYKIDNPEEKALIVDNLKPESFYEFFITPFTSAGEGPSATFTKVTTPDEHSSMLIHILLPMVFCVLLIMVMCYLKSQWIKETCYPDIPDPYKSSILSLIKFKENPHLIIMNVSDCIPDAIEVVSKPEGTKIQFLGTRKSLTETELTKPNYLYLLPTEKNHSGPGPCICFENLTYNQAASDSGSCGHVPVSPKAPSMLGLMTSPENVLKALEKNYMNSLGEIPAGETSLNYVSQLASPMFGDKDSLPTNPVEAPHCSEYKMQMAVSLRLALPPPTENSSLSSITLLDPGEHYC

SEQ ID NO: 56532 - protein, 342 aa, Homo sapiens
MALFAVFQTTFFLTLLSLRTYQSEVLAERLPLTPVSLKVSTNSTRQSLHLQWTVHNLPYHQELKMVFQIQISRIETSNVIWVGNYSTTVKWNQVLHWSWESELPLECATHFVRIKSLVDDAKFPEPNFWSNWSSWEEVSVQDSTGQDILFVFPKDKLVEEGTNVTICYVSRNIQNNVSCYLEGKQIHGEQLDPHVTAFNLNSVPFIRNKGTNIYCEASQGNVSEGMKGIVLFVSKVLEEPKDFSCETEDFKTLHCTWDPGTDTALGWSKQPSQSYTLFESFSGEKKLCTHKNWCNWQITQDSQETYNFTLIAENYLRKRSVNILFNLTHRGETRVVTAHRGH

SEQ ID NO: 56533 - protein, 465 aa, Homo sapiens
MNAQLTMEAIGELHGVSHEPVPAPADLLGGSPHARSSVAHRGSHLPPAHPRSMGMASLLDGGSGGGDYHHHHRAPEHSLAGPLHPTMTMACETPPGMSMPTTYTTLTPLQPLPPISTVSDKFPHHHHHHHHHHHPHHHQRLAGNVSGSFTLMRDERGLASMNNLYTPYHKDVAGMGQSLSPLSSSGLGSIHNSQQGLPHYAHPGAAMPTDKMLTPNGFEAHHPAMLGRHGEQHLTPTSAGMVPINGLPPHHPHAHLNAQGHGQLLGTAREPNPSVTGAQVSNGSNSGQMEEINTKEVAQRITTELKRYSIPQAIFAQRVLCRSQGTLSDLLRNPKPWSKLKSGRETFRRMWKWLQEPEFQRMSALRLAACKRKEQEHGKDRGNTPKKPRLVFTDVQRRTLHAIFKENKRPSKELQITISQQLGLELSTVSNFFMNARRRSLDKWQDEGSSNSGNSSSSSSTCTKA

SEQ ID NO: 56534 - protein, 504 aa, Homo sapiens
MKAAYTAYRCLTKDLEGCAMNPELTMESLGTLHGPAGGGSGGGGGGGGGGGGGGPGHEQELLASPSPHHAGRGAAGSLRGPPPPPTAHQELGTAAAAAAAASRSAMVTSMASILDGGDYRPELSIPLHHAMSMSCDSSPPGMGMSNTYTTLTPLQPLPPISTVSDKFHHPHPHHHPHHHHHHHHQRLSGNVSGSFTLMRDERGLPAMNNLYSPYKEMPGMSQSLSPLAATPLGNGLGGLHNAQQSLPNYGPPGHDKMLSPNFDAHHTAMLTRGEQHLSRGLGTPPAAMMSHLNGLHHPGHTQSHGPVLAPSRERPPSSSSGSQVATSGQLEEINTKEVAQRITAELKRYSIPQAIFAQRVLCRSQGTLSDLLRNPKPWSKLKSGRETFRRMWKWLQEPEFQRMSALRLAACKRKEQEPNKDRNNSQKKSRLVFTDLQRRTLFAIFKENKRPSKEMQITISQQLGLELTTVSNFFMNARRRSLEKWQDDLSTGGSSSTSSTCTKA

SEQ ID NO: 56535 - protein, 485 aa, Homo sapiens [sequence omitted]

SEQ ID NO: 56536 - protein, 149 aa, Homo sapiens
MVDDAGAAESQRGKQTPAHSLEQLRRLPLPPPQIRIRPWWFPVQELRDPLVFYLEAWLADELFGPDRAIIPEMEWTSQALLTVDIVDSGNLVEITVFGRPRVQNRVKSMLLCLAWFHREHRARAEKMKHLEKNLKAHASDPHSPQDPVA

SEQ ID NO: 56537 - protein, 372 aa, Homo sapiens
MEPAPSAGAELQPPLFANASDAYPSACPSAGANASGPPGARSASSLALAIAITALYSAVCAVGLLGNVLVMFGIVRYTKMKTATNIYIFNLALADALATSTLPFQSAKYLMETWPFGELLCKAVLSIDYYNMFTSIFTLTMMSVDRYIAVCHPVKALDFRTPAKAKLINICIWVLASGVGVPIMVMAVTRPRDGAVVCMLQFPSPSWYWDTVTKICVFLFAFVVPILIITVCYGLMLLRLRSVRLLSGSKEKDRSLRRITRMVLVVVGAFVVCWAPIHIFVIVWTLVDIDRRDPLVVAALHLCIALGYANSSLNPVLYAFLDENFKRCFRQLCRKPCGRPDPSSFSRAREATARERVTACTPSDGPGGGAAA

SEQ ID NO: 56538 - protein, 324 aa, Homo sapiens
MEPAPSAGAELQPPLFANASDAYPSACPSAGANASGPPGARSASSLALAIAITALYSAVCAVGLLGNVLVMFGIVRYTKMKTATNIYIFNLALADALATSTLPFQSAKYLMETWPFGELLCKAVLSIDYYNMFTSIFTLTMMSVDRYIAVCHPVKALDFRTPAKAKLINICIWVLASGVGVPIMVMAVTRPRDGAVVCMLQFPSPSWYWDTVTKICVFLFAFVVCWAPIHIFVIVWTLVDIDRRDPLVVAALHLCIALGYANSSLNPVLYAFLDENFKRCFRQLCRKPCGRPDPSSFSRAREATARERVTACTPSDGPGGGAAA

SEQ ID NO: 56539 - protein, 380 aa, Homo sapiens
MDSPIQIFRGEPGPTCAPSACLPPNSSAWFPGWAEPDSNGSAGSEDAQLEPAHISPAIPVIITAVYSVVFVVGLVGNSLVMFVIIRYTKMKTATNIYIFNLALADALVTTTMPFQSTVYLMNSWPFGDVLCKIVISIDYYNMFTSIFTLTMMSVDRYIAVCHPVKALDFRTPLKAKIINICIWLLSSSVGISAIVLGGTKVREDVDVIECSLQFPDDDYSWWDLFMKICVFIFAFVIPVLIIIVCYTLMILRLKSVRLLSGSREKDRNLRRITRLVLVVVAVFVVCWTPIHIFILVEALGSTSHSTAALSSYYFCIALGYTNSSLNPILYAFLDENFKRCFRDFCFPLKMRMERQSTSRVRNTVQDPAYLRDIDGMNKPV

SEQ ID NO: 56540 - protein, 366 aa, Homo sapiens
MDSPIQIFRGEPGPTCAPSACLPPNSSAGSEDAQLEPAHISPAIPVIITAVYSVVFVVGLVGNSLVMFVIIRYTKMKTATNIYIFNLALADALVTTTMPFQSTVYLMNSWPFGDVLCKIVISIDYYNMFTSIFTLTMMSVDRYIAVCHPVKALDFRTPLKAKIINICIWLLSSSVGISAIVLGGTKVREDVDVIECSLQFPDDDYSWWDLFMKICVFIFAFVIPVLIIIVCYTLMILRLKSVRLLSGSREKDRNLRRITRLVLVVVAVFVVCWTPIHIFILVEALGSTSHSTAALSSYYFCIALGYTNSSLNPILYAFLDENFKRCFRDFCFPLKMRMERQSTSRVRNTVQDPAYLRDIDGMNKPV

SEQ ID NO: 56541 - protein, 380 aa, Homo sapiens; identical to SEQ ID NO: 56539

SEQ ID NO: 56542 - protein, 446 aa, Homo sapiens
MDSSAAPTNASNCTDALAYSSCSPAPSPGSWVNLSHLDGNLSDPCGPNRTDLGGRDSLCPPTGSPSMITAITIMALYSIVCVVGLFGNFLVMYVIVRYTKMKTATNIYIFNLALADALATSTLPFQSVNYLMGTWPFGTILCKIVISIDYYNMFTSIFTLCTMSVDRYIAVCHPVKALDFRTPRNAKIINVCNWILSSAIGLPVMFMATTKYRQGSIDCTLTFSHPTWYWENLLKICVFIFAFIMPVLIITVCYGLMILRLKSVRMLSGSKEKDRNLRRITRMVLVVVAVFIVCWTPIHIYVIIKALVTIPETTFQTVSWHFCIALGYTNSCLNPVLYAFLDENFKRCFREFCIPTSSNIEQQNSTRIRQNTRDHPSTANTVDRTNHQCLPIPSLSCWALEQGCLVVYPGPLQGPLVRYDLPAILHSSCLRGNTAPSPSGGAFLLS

SEQ ID NO: 56543 - protein, 400 aa, Homo sapiens
MDSSAAPTNASNCTDALAYSSCSPAPSPGSWVNLSHLDGNLSDPCGPNRTDLGGRDSLCPPTGSPSMITAITIMALYSIVCVVGLFGNFLVMYVIVRYTKMKTATNIYIFNLALADALATSTLPFQSVNYLMGTWPFGTILCKIVISIDYYNMFTSIFTLCTMSVDRYIAVCHPVKALDFRTPRNAKIINVCNWILSSAIGLPVMFMATTKYRQGSIDCTLTFSHPTWYWENLLKICVFIFAFIMPVLIITVCYGLMILRLKSVRMLSGSKEKDRNLRRITRMVLVVVAVFIVCWTPIHIYVIIKALVTIPETTFQTVSWHFCIALGYTNSCLNPVLYAFLDENFKRCFREFCIPTSSNIEQQNSTRIRQNTRDHPSTANTVDRTNHQLENLEAETAPLP

SEQ ID NO: 56544 - protein, 418 aa, Homo sapiens
MDSSAAPTNASNCTDALAYSSCSPAPSPGSWVNLSHLDGNLSDPCGPNRTDLGGRDSLCPPTGSPSMITAITIMALYSIVCVVGLFGNFLVMYVIVRYTKMKTATNIYIFNLALADALATSTLPFQSVNYLMGTWPFGTILCKIVISIDYYNMFTSIFTLCTMSVDRYIAVCHPVKALDFRTPRNAKIINVCNWILSSAIGLPVMFMATTKYRQGSIDCTLTFSHPTWYWENLLKICVFIFAFIMPVLIITVCYGLMILRLKSVRMLSGSKEKDRNLRRITRMVLVVVAVFIVCWTPIHIYVIIKALVTIPETTFQTVSWHFCIALGYTNSCLNPVLYAFLDENFKRCFREFCIPTSSNIEQQNSTRIRQNTRDHPSTANTVDRTNHQPPLAVSMAQIFTRYPPPTHREKTCNDYMKR

SEQ ID NO: 56545 - protein, 402 aa, Homo sapiens
MDSSAAPTNASNCTDALAYSSCSPAPSPGSWVNLSHLDGNLSDPCGPNRTDLGGRDSLCPPTGSPSMITAITIMALYSIVCVVGLFGNFLVMYVIVRYTKMKTATNIYIFNLALADALATSTLPFQSVNYLMGTWPFGTILCKIVISIDYYNMFTSIFTLCTMSVDRYIAVCHPVKALDFRTPRNAKIINVCNWILSSAIGLPVMFMATTKYRQGSIDCTLTFSHPTWYWENLLKICVFIFAFIMPVLIITVCYGLMILRLKSVRMLSGSKEKDRNLRRITRMVLVVVAVFIVCWTPIHIYVIIKALVTIPETTFQTVSWHFCIALGYTNSCLNPVLYAFLDENFKRCFREFCIPTSSNIEQQNSTRIRQNTRDHPSTANTVDRTNHQIRDPISNLPRVSVF

SEQ ID NO: 56546 - protein, 403 aa, Homo sapiens
MDSSAAPTNASNCTDALAYSSCSPAPSPGSWVNLSHLDGNLSDPCGPNRTDLGGRDSLCPPTGSPSMITAITIMALYSIVCVVGLFGNFLVMYVIVRYTKMKTATNIYIFNLALADALATSTLPFQSVNYLMGTWPFGTILCKIVISIDYYNMFTSIFTLCTMSVDRYIAVCHPVKALDFRTPRNAKIINVCNWILSSAIGLPVMFMATTKYRQGSIDCTLTFSHPTWYWENLLKICVFIFAFIMPVLIITVCYGLMILRLKSVRMLSGSKEKDRNLRRITRMVLVVVAVFIVCWTPIHIYVIIKALVTIPETTFQTVSWHFCIALGYTNSCLNPVLYAFLDENFKRCFREFCIPTSSNIEQQNSTRIRQNTRDHPSTANTVDRTNHQGPPAKFVADQLAGSS

SEQ ID NO: 56547 - protein, 420 aa, Homo sapiens
MDSSAAPTNASNCTDALAYSSCSPAPSPGSWVNLSHLDGNLSDPCGPNRTDLGGRDSLCPPTGSPSMITAITIMALYSIVCVVGLFGNFLVMYVIVRYTKMKTATNIYIFNLALADALATSTLPFQSVNYLMGTWPFGTILCKIVISIDYYNMFTSIFTLCTMSVDRYIAVCHPVKALDFRTPRNAKIINVCNWILSSAIGLPVMFMATTKYRQGSIDCTLTFSHPTWYWENLLKICVFIFAFIMPVLIITVCYGLMILRLKSVRMLSGSKEKDRNLRRITRMVLVVVAVFIVCWTPIHIYVIIKALVTIPETTFQTVSWHFCIALGYTNSCLNPVLYAFLDENFKRCFREFCIPTSSNIEQQNSTRIRQNTRDHPSTANTVDRTNHQVELNLDCHCENAKPWPLSYNAGQSPFPFPGRV

SEQ ID NO: 56548 - protein, 392 aa, Homo sapiens
MDSSAAPTNASNCTDALAYSSCSPAPSPGSWVNLSHLDGNLSDPCGPNRTDLGGRDSLCPPTGSPSMITAITIMALYSIVCVVGLFGNFLVMYVIVRYTKMKTATNIYIFNLALADALATSTLPFQSVNYLMGTWPFGTILCKIVISIDYYNMFTSIFTLCTMSVDRYIAVCHPVKALDFRTPRNAKIINVCNWILSSAIGLPVMFMATTKYRQGSIDCTLTFSHPTWYWENLLKICVFIFAFIMPVLIITVCYGLMILRLKSVRMLSGSKEKDRNLRRITRMVLVVVAVFIVCWTPIHIYVIIKALVTIPETTFQTVSWHFCIALGYTNSCLNPVLYAFLDENFKRCFREFCIPTSSNIEQQNSTRIRQNTRDHPSTANTVDRTNHQVRSL

SEQ ID NO: 56549 - protein, 493 aa, Homo sapiens
MCLHRRVPSEETYSLDRFAQNPPLFPPPSLPASESRMAHAPLLQRCGAARTGFCKKQQELWQRRKEAAEALGTRKVSVLLATSHSGARPAVSTMDSSAAPTNASNCTDALAYSSCSPAPSPGSWVNLSHLDGNLSDPCGPNRTDLGGRDSLCPPTGSPSMITAITIMALYSIVCVVGLFGNFLVMYVIVRYTKMKTATNIYIFNLALADALATSTLPFQSVNYLMGTWPFGTILCKIVISIDYYNMFTSIFTLCTMSVDRYIAVCHPVKALDFRTPRNAKIINVCNWILSSAIGLPVMFMATTKYRQGSIDCTLTFSHPTWYWENLLKICVFIFAFIMPVLIITVCYGLMILRLKSVRMLSGSKEKDRNLRRITRMVLVVVAVFIVCWTPIHIYVIIKALVTIPETTFQTVSWHFCIALGYTNSCLNPVLYAFLDENFKRCFREFCIPTSSNIEQQNSTRIRQNTRDHPSTANTVDRTNHQLENLEAETAPLP

SEQ ID NO: 56550 - protein, 397 aa, Homo sapiens
MDSSAAPTNASNCTDALAYSSCSPAPSPGSWVNLSHLDGNLSDPCGPNRTDLGGRDSLCPPTGSPSMITAITIMALYSIVCVVGLFGNFLVMYVIVRYTKMKTATNIYIFNLALADALATSTLPFQSVNYLMGTWPFGTILCKIVISIDYYNMFTSIFTLCTMSVDRYIAVCHPVKALDFRTPRNAKIINVCNWILSSAIGLPVMFMATTKYRQGSIDCTLTFSHPTWYWENLLKICVFIFAFIMPVLIITVCYGLMILRLKSVRMLSGSKEKDRNLRRITRMVLVVVAVFIVCWTPIHIYVIIKALVTIPETTFQTVSWHFCIALGYTNSCLNPVLYAFLDENFKRCFREFCIPTSSNIEQQNSTRIRQNTRDHPSTANTVDRTNHQRERRQKSDW

SEQ ID NO: 56551 - protein, 406 aa, Homo sapiens
MDSSAAPTNASNCTDALAYSSCSPAPSPGSWVNLSHLDGNLSDPCGPNRTDLGGRDSLCPPTGSPSMITAITIMALYSIVCVVGLFGNFLVMYVIVRYTKMKTATNIYIFNLALADALATSTLPFQSVNYLMGTWPFGTILCKIVISIDYYNMFTSIFTLCTMSVDRYIAVCHPVKALDFRTPRNAKIINVCNWILSSAIGLPVMFMATTKYRQGSIDCTLTFSHPTWYWENLLKICVFIFAFIMPVLIITVCYGLMILRLKSVRMLSGSKEKDRNLRRITRMVLVVVAVFIVCWTPIHIYVIIKALVTIPETTFQTVSWHFCIALGYTNSCLNPVLYAFLDENFKRCFREFCIPTSSNIEQQNSTRIRQNTRDHPSTANTVDRTNHQKIDLFQKSSLLNCEHTKG

SEQ ID NO: 56552 - protein, 319 aa, Homo sapiens
MMRAKSISTKAGKPSRYTKMKTATNIYIFNLALADALATSTLPFQSVNYLMGTWPFGTILCKIVISIDYYNMFTSIFTLCTMSVDRYIAVCHPVKALDFRTPRNAKIINVCNWILSSAIGLPVMFMATTKYRQGSIDCTLTFSHPTWYWENLLKICVFIFAFIMPVLIITVCYGLMILRLKSVRMLSGSKEKDRNLRRITRMVLVVVAVFIVCWTPIHIYVIIKALVTIPETTFQTVSWHFCIALGYTNSCLNPVLYAFLDENFKRCFREFCIPTSSNIEQQNSTRIRQNTRDHPSTANTVDRTNHQLENLEAETAPLP

SEQ ID NO: 56553 - protein, 402 aa, Homo sapiens; identical to SEQ ID NO: 56545

SEQ ID NO: 56554 - protein, 163 aa, Homo sapiens [sequence omitted]

SEQ ID NO: 56555 - protein, 300 aa, Homo sapiens
MKTATNIYIFNLALADALATSTLPFQSVNYLMGTWPFGTILCKIVISIDYYNMFTSIFTLCTMSVDRYIAVCHPVKALDFRTPRNAKIINVCNWILSSAIGLPVMFMATTKYRQGSIDCTLTFSHPTWYWENLLKICVFIFAFIMPVLIITVCYGLMILRLKSVRMLSGSKEKDRNLRRITRMVLVVVAVFIVCWTPIHIYVIIKALVTIPETTFQTVSWHFCIALGYTNSCLNPVLYAFLDENFKRCFREFCIPTSSNIEQQNSTRIRQNTRDHPSTANTVDRTNHQLENLEAETAPLP

SEQ ID NO: 56556 - protein, 300 aa, Homo sapiens; identical to SEQ ID NO: 56555

SEQ ID NO: 56557 - protein, 300 aa, Homo sapiens; identical to SEQ ID NO: 56555

SEQ ID NO: 56558 - protein, 402 aa, Homo sapiens; identical to SEQ ID NO: 56545

SEQ ID NO: 56559 - protein, 186 aa, Homo sapiens
MDSSAAPTNASNCTDALAYSSCSPAPSPGSWVNLSHLDGNLSDPCGPNRTDLGGRDSLCPPTGSPSMITAITIMALYSIVCVVGLFGNFLVMYVIVRFHRLYTNILSSNLVLGKPAEDLCFHLRLHYASAHHYRVLWTDDLAPQECPHALWLQRKGQESSKDHQDGAGGGGCVHRLLDSHSHLRHH

SEQ ID NO: 56560 - protein, 389 aa, Homo sapiens
MDSSAAPTNASNCTDALAYSSCSPAPSPGSWVNLSHLDGNLSDPCGPNRTDLGGRDSLCPPTGSPSMITAITIMALYSIVCVVGLFGNFLVMYVIVRYTKMKTATNIYIFNLALADALATSTLPFQSVNYLMGTWPFGTILCKIVISIDYYNMFTSIFTLCTMSVDRYIAVCHPVKALDFRTPRNAKIINVCNWILSSAIGLPVMFMATTKYRQGSIDCTLTFSHPTWYWENLLKICVFIFAFIMPVLIITVCYGLMILRLKSVRMLSGSKEKDRNLRRITRMVLVVVAVFIVCWTPIHIYVIIKALVTIPETTFQTVSWHFCIALGYTNSCLNPVLYAFLDENFKRCFREFCIPTSSNIEQQNSTRIRQNTRDHPSTANTVDRTNHQS

SEQ ID NO: 56561 - protein, 364 aa, Homo sapiens
MAQQWSLQRLAGRHPQDSYEDSTQSSIFTYTNSNSTRGPFEGPNYHIAPRWVYHLTSVWMIFVVTASVFTNGLVLAATMKFKKLRHPLNWILVNLAVADLAETVIASTISIVNQVSGYFVLGHPMCVLEGYTVSLCGITGLWSLAIISWERWLVVCKPFGNVRFDAKLAIVGIAFSWIWSAVWTAPPIFGWSRYWPHGLKTSCGPDVFSGSSYPGVQSYMIVLMVTCCIIPLAIIMLCYLQVWLAIRAVAKQQKESESTQKAEKEVTRMVVVMIFAYCVCWGPYTFFACFAAANPGYAFHPLMAALPAYFAKSATIYNPVIYVFMNRQFRNCILQLFGKKVDDGSELSSASKTEVSSVSSVSPA

SEQ ID NO: 56562 - protein, 364 aa, Homo sapiens
MAQQWSLQRLAGRHPQDSYEDSTQSSIFTYTNSNSTRGPFEGPNYHIAPRWVYHLTSVWMIFVVIASVFTNGLVLAATMKFKKLRHPLNWILVNLAVADLAETVIASTISVVNQVYGYFVLGHPMCVLEGYTVSLCGITGLWSLAIISWERWMVVCKPFGNVRFDAKLAIVGIAFSWIWAAVWTAPPIFGWSRYWPHGLKTSCGPDVFSGSSYPGVQSYMIVLMVTCCITPLSIIVLCYLQVWLAIRAVAKQQKESESTQKAEKEVTRMVVVMVLAFCFCWGPYAFFACFAAANPGYPFHPLMAALPAFFAKSATIYNPVIYVFMNRQFRNCILQLFGKKVDDGSELSSASKTEVSSVSSVSPA

SEQ ID NO: 56563 - protein, 348 aa, Homo sapiens
MRKMSEEEFYLFKNISSVGPWDGPQYHIAPVWAFYLQAAFMGTVFLIGFPLNAMVLVATLRYKKLRQPLNYILVNVSFGGFLLCIFSVFPVFVASCNGYFVFGRHVCALEGFLGTVAGLVTGWSLAFLAFERYIVICKPFGNFRFSSKHALTVVLATWTIGIGVSIPPFFGWSRFIPEGLQCSCGPDWYTVGTKYRSESYTWFLFIFCFIVPLSLICFSYTQLLRALKAVAAQQQESATTQKAEREVSRMVVVMVGSFCVCYVPYAAFAMYMVNNRNHGLDLRLVTIPSFFSKSACIYNPIIYCFMNKQFQACIMKMVCGKAMTDESDTCSSQKTEVSTVSSTQVGPN

SEQ ID NO: 56564 - protein, 323 aa, Homo sapiens
MYSGNRSGGHGYWDGGGAAGAEGPAPAGTLSPAPLFSPGTYERLALLLGSIGLLGVGNNLLVLVLYYKFQRLRTPTHLLLVNISLSDLLVSLFGVTFTFVSCLRNGWVWDTVGCVWDGFSGSLFGWISQLQAATREARASMGPVQQGTICMQLRCVEDLQTIQVIKILKYEKKLAKMCFLMIFTFLVCWMPYIVICFLVVNGHGHLVTPTISIVSYLFAKSNTVYNPVIYVFMIRKFRRSLLQLLCLRLLRCQRPAKDLPAAGSEMQIRPIVMSQKDGDRPKKKVTFNSSSIIFIITSDESLSVDDSDKTNGSKVDVIQVRPL

SEQ ID NO: 56565 - protein, 402 aa, Homo sapiens
MYSGNRSGGHGYWDGGGAAGAEGPAPAGTLSPAPLFSPGTYERLALLLGSIGLLGVGNNLLVLVLYYKFQRLRTPTHLLLVNISLSDLLVSLFGVTFTFVSCLRNGWVWDTVGCVWDGFSGSLFGIVSIATLTVLAYERYIRVVHARVINFSWAWRAITYIWLYSLAWAGAPLLGWNRYILDVHGLGCTVDWKSKDANDSSFVLFLFLGCLVVPLGVIAHCYGHILYSIRMLRCVEDLQTIQVIKILKYEKKLAKMCFLMIFTFLVCWMPYIVICFLVVNGHGHLVTPTISIVSYLFAKSNTVYNPVIYVFMIRKFRRSLLQLLCLRLLRCQRPAKDLPAAGSEMQIRPIVMSQKDGDRPKKKVTFNSSSIIFIITSDESLSVDDSDKTNGSKVDVIQVRPL

SEQ ID NO: 56566 - protein, 961 aa, Homo sapiens
MWRLRRAAVACEVCQSLVKHSSGIKGSLPLQKLHLVSRSIYHSHHPTLKLQRPQLRTSFQQFSSLTNLPLRKLKFSPIKYGYQPRRNFWPARLATRLLKLRYLILGSAVGGGYTAKKTFDQWKDMIPDLSEYKWIVPDIVWEIDEYIDFGSPEETAFRATDRGSESDKHFRKGLLGELILLQQQIQEHEEEARRAAGQYSTSYAQQKRKVSDKEKIDQLQEELLHTQLKYQRILERLEKENKELRKLVLQKDDKGIHHRKLKKSLIDMYSEVLDVLSDYDASYNTQDHLPRVVVVGDQSAGKTSVLEMIAQARIFPRGSGEMMTRSPVKVTLSEGPHHVALFKDSSREFDLTKEEDLAALRHEIELRMRKNVKEGCTVSPETISLNVKGPGLQRMVLVDLPGVINTVTSGMAPDTKETIFSISKAYMQNPNAIILCIQDGSVDAERSIVTDLVSQMDPHGRRTIFVLTKVDLAEKNVASPSRIQQIIEGKLFPMKALGYFAVVTGKGNSSESIEAIREYEEEFFQNSKLLKTSMLKAHQVTTRNLSLAVSDCFWKMVRESVEQQADSFKATRFNLETEWKNNYPRLRELDRNELFEKAKNEILDEVISLSQVTPKHWEEILQQSLWERVSTHVIENIYLPAAQTMNSGTFNTTVDIKLKQWTDKQLPNKAVEVAWETLQEEFSRFMTEPKGKEHDDIFDKLKEAVKEESIKRHKWNDFAEDSLRVIQHNALEDRSISDKQQWDAAIYFMEEALQARLKDTENAIENMVGPDWKKRWLYWKNRTQEQCVHNETKNELEKMLKCNEEHPAYLASDEITTVRKNLESRGVEVDPSLIKDTWHQVYRRHFLKTALNHCNLCRRGFYYYQRHFVDSELECNDVVLFWRIQRMLAITANTLRQQLTNTEVRRLEKNVKEVLEDFAEDGEKKIKLLTGKRVQLAEDLKKVREIQEKLDAFIEALHQEK

SEQ ID NO: 56567 - protein, 1015 aa, Homo sapiens
MWRLRRAAVACEVCQSLVKHSSGIKGSLPLQKLHLVSRSIYHSHHPTLKLQRPQLRTSFQQFSSLTNLPLRKLKFSPIKYGYQPRRNFWPARLATRLLKLRYLILGSAVGGGYTAKKTFDQWKDMIPDLSEYKWIVPDIVWEIDEYIDFEKIRKALPSSEDLVKLAPDFDKIVESLSLLKDFFTSGHKLVSEVIGASDLLLLLGSPEETAFRATDRGSESDKHFRKGLLGELILLQQQIQEHEEEARRAAGQYSTSYAQQKRKVSDKEKIDQLQEELLHTQLKYQRILERLEKENKELRKLVLQKDDKGIHHRKLKKSLIDMYSEVLDVLSDYDASYNTQDHLPRVVVVGDQSAGKTSVLEMIAQARIFPRGSGEMMTRSPVKVTLSEGPHHVALFKDSSREFDLTKEEDLAALRHEIELRMRKNVKEGCTVSPETISLNVKGPGLQRMVLVDLPGVINTVTSGMAPDTKETIFSISKAYMQNPNAIILCIQDGSVDAERSIVTDLVSQMDPHGRRTIFVLTKVDLAEKNVASPSRIQQIIEGKLFPMKALGYFAVVTGKGNSSESIEAIREYEEEFFQNSKLLKTSMLKAHQVTTRNLSLAVSDCFWKMVRESVEQQADSFKATRFNLETEWKNNYPRLRELDRNELFEKAKNEILDEVISLSQVTPKHWEEILQQSLWERVSTHVIENIYLPAAQTMNSGTFNTTVDIKLKQWTDKQLPNKAVEVAWETLQEEFSRFMTEPKGKEHDDIFDKLKEAVKEESIKRHKWNDFAEDSLRVIQHNALEDRSISDKQQWDAAIYFMEEALQARLKDTENAIENMVGPDWKKRWLYWKNRTQEQCVHNETKNELEKMLKCNEEHPAYLASDEITTVRKNLESRGVEVDPSLIKDTWHQVYRRHFLKTALNHCNLCRRGFYYYQRHFVDSELECNDVVLFWRIQRMLAITANTLRQQLTNTEVRRLEKNVKEVLEDFAEDGEKKIKLLTGKRVQLAEDLKKVREIQEKLDAFIEALHQEK

SEQ ID NO: 56568 - protein, 979 aa, Homo sapiens
MWRLRRAAVACEVCQSLVKHSSGIKGSLPLQKLHLVSRSIYHSHHPTLKLQRPQLRTSFQQFSSLTNLPLRKLKFSPIKYGYQPRRNFWPARLATRLLKLRYLILGSAVGGGYTAKKTFDQWKDMIPDLSEYKWIVPDIVWEIDEYIDFGHKLVSEVIGASDLLLLLGSPEETAFRATDRGSESDKHFRKGLLGELILLQQQIQEHEEEARRAAGQYSTSYAQQKRKVSDKEKIDQLQEELLHTQLKYQRILERLEKENKELRKLVLQKDDKGIHHRKLKKSLIDMYSEVLDVLSDYDASYNTQDHLPRVVVVGDQSAGKTSVLEMIAQARIFPRGSGEMMTRSPVKVTLSEGPHHVALFKDSSREFDLTKEEDLAALRHEIELRMRKNVKEGCTVSPETISLNVKGPGLQRMVLVDLPGVINTVTSGMAPDTKETIFSISKAYMQNPNAIILCIQDGSVDAERSIVTDLVSQMDPHGRRTIFVLTKVDLAEKNVASPSRIQQIIEGKLFPMKALGYFAVVTGKGNSSESIEAIREYEEEFFQNSKLLKTSMLKAHQVTTRNLSLAVSDCFWKMVRESVEQQADSFKATRFNLETEWKNNYPRLRELDRNELFEKAKNEILDEVISLSQVTPKHWEEILQQSLWERVSTHVIENIYLPAAQTMNSGTFNTTVDIKLKQWTDKQLPNKAVEVAWETLQEEFSRFMTEPKGKEHDDIFDKLKEAVKEESIKRHKWNDFAEDSLRVIQHNALEDRSISDKQQWDAAIYFMEEALQARLKDTENAIENMVGPDWKKRWLYWKNRTQEQCVHNETKNELEKMLKCNEEHPAYLASDEITTVRKNLESRGVEVDPSLIKDTWHQVYRRHFLKTALNHCNLCRRGFYYYQRHFVDSELECNDVVLFWRIQRMLAITANTLRQQLTNTEVRRLEKNVKEVLEDFAEDGEKKIKLLTGKRVQLAEDLKKVREIQEKLDAFIEALHQEK

SEQ ID NO: 56569 - protein, 978 aa, Homo sapiens
MWRLRRAAVACEVCQSLVKHSSGIKGSLPLQKLHLVSRSIYHSHHPTLKLQRPQLRTSFQQFSSLTNLPLRKLKFSPIKYGYQPRRNFWPARLATRLLKLRYLILGSAVGGGYTAKKTFDQWKDMIPDLSEYKWIVPDIVWEIDEYIDFEKIRKALPSSEDLVKLAPDFDKIVESLSLLKDFFTSGHKLVSEVIGASDLLLLLGSPEETAFRATDRGSESDKHFRKVSDKEKIDQLQEELLHTQLKYQRILERLEKENKELRKLVLQKDDKGIHHRKLKKSLIDMYSEVLDVLSDYDASYNTQDHLPRVVVVGDQSAGKTSVLEMIAQARIFPRGSGEMMTRSPVKVTLSEGPHHVALFKDSSREFDLTKEEDLAALRHEIELRMRKNVKEGCTVSPETISLNVKGPGLQRMVLVDLPGVINTVTSGMAPDTKETIFSISKAYMQNPNAIILCIQDGSVDAERSIVTDLVSQMDPHGRRTIFVLTKVDLAEKNVASPSRIQQIIEGKLFPMKALGYFAVVTGKGNSSESIEAIREYEEEFFQNSKLLKTSMLKAHQVTTRNLSLAVSDCFWKMVRESVEQQADSFKATRFNLETEWKNNYPRLRELDRNELFEKAKNEILDEVISLSQVTPKHWEEILQQSLWERVSTHVIENIYLPAAQTMNSGTFNTTVDIKLKQWTDKQLPNKAVEVAWETLQEEFSRFMTEPKGKEHDDIFDKLKEAVKEESIKRHKWNDFAEDSLRVIQHNALEDRSISDKQQWDAAIYFMEEALQARLKDTENAIENMVGPDWKKRWLYWKNRTQEQCVHNETKNELEKMLKCNEEHPAYLASDEITTVRKNLESRGVEVDPSLIKDTWHQVYRRHFLKTALNHCNLCRRGFYYYQRHFVDSELECNDVVLFWRIQRMLAITANTLRQQLTNTEVRRLEKNVKEVLEDFAEDGEKKIKLLTGKRVQLAEDLKKVREIQEKLDAFIEALHQEK

SEQ ID NO: 56570 - protein, 997 aa, Homo sapiens
MWRLRRAAVACEVCQSLVKHSSGIKGSLPLQKLHLVSRSIYHSHHPTLKLQRPQLRTSFQQFSSLTNLPLRKLKFSPIKYGYQPRRNFWPARLATRLLKLRYLILGSAVGGGYTAKKTFDQWKDMIPDLSEYKWIVPDIVWEIDEYIDFEKIRKALPSSEDLVKLAPDFDKIVESLSLLKDFFTSGSPEETAFRATDRGSESDKHFRKGLLGELILLQQQIQEHEEEARRAAGQYSTSYAQQKRKVSDKEKIDQLQEELLHTQLKYQRILERLEKENKELRKLVLQKDDKGIHHRKLKKSLIDMYSEVLDVLSDYDASYNTQDHLPRVVVVGDQSAGKTSVLEMIAQARIFPRGSGEMMTRSPVKVTLSEGPHHVALFKDSSREFDLTKEEDLAALRHEIELRMRKNVKEGCTVSPETISLNVKGPGLQRMVLVDLPGVINTVTSGMAPDTKETIFSISKAYMQNPNAIILCIQDGSVDAERSIVTDLVSQMDPHGRRTIFVLTKVDLAEKNVASPSRIQQIIEGKLFPMKALGYFAVVTGKGNSSESIEAIREYEEEFFQNSKLLKTSMLKAHQVTTRNLSLAVSDCFWKMVRESVEQQADSFKATRFNLETEWKNNYPRLRELDRNELFEKAKNEILDEVISLSQVTPKHWEEILQQSLWERVSTHVIENIYLPAAQTMNSGTFNTTVDIKLKQWTDKQLPNKAVEVAWETLQEEFSRFMTEPKGKEHDDIFDKLKEAVKEESIKRHKWNDFAEDSLRVIQHNALEDRSISDKQQWDAAIYFMEEALQARLKDTENAIENMVGPDWKKRWLYWKNRTQEQCVHNETKNELEKMLKCNEEHPAYLASDEITTVRKNLESRGVEVDPSLIKDTWHQVYRRHFLKTALNHCNLCRRGFYYYQRHFVDSELECNDVVLFWRIQRMLAITANTLRQQLTNTEVRRLEKNVKEVLEDFAEDGEKKIKLLTGKRVQLAEDLKKVREIQEKLDAFIEALHQEK

SEQ ID NO: 56571 - protein, 166 aa, Homo sapiens
MWRLRRAAVACEVCQSLVKHSSGIKGSLPLQKLHLVSRSIYHSHHPTLKLQRPQLRTSFQQFSSLTNLPLRKLKFSPIKYGYQPRRNFWPARLATRLLKLRYLILGSAVGGGYTAKKTFDQWKDMIPDLSEYKWIVPDIVWEIDEYIDFGSPEETAFRATDRGSES

SEQ ID NO: 56572 - protein, 960 aa, Homo sapiens
MWRLRRAAVACEVCQSLVKHSSGIKGSLPLQKLHLVSRSIYHSHHPTLKLQRPQLRTSFQQFSSLTNLPLRKLKFSPIKYGYQPRRNFWPARLATRLLKLRYLILGSAVGGGYTAKKTFDQWKDMIPDLSEYKWIVPDIVWEIDEYIDFEKIRKALPSSEDLVKLAPDFDKIVESLSLLKDFFTSGSPEETAFRATDRGSESDKHFRKVSDKEKIDQLQEELLHTQLKYQRILERLEKENKELRKLVLQKDDKGIHHRKLKKSLIDMYSEVLDVLSDYDASYNTQDHLPRVVVVGDQSAGKTSVLEMIAQARIFPRGSGEMMTRSPVKVTLSEGPHHVALFKDSSREFDLTKEEDLAALRHEIELRMRKNVKEGCTVSPETISLNVKGPGLQRMVLVDLPGVINTVTSGMAPDTKETIFSISKAYMQNPNAIILCIQDGSVDAERSIVTDLVSQMDPHGRRTIFVLTKVDLAEKNVASPSRIQQIIEGKLFPMKALGYFAVVTGKGNSSESIEAIREYEEEFFQNSKLLKTSMLKAHQVTTRNLSLAVSDCFWKMVRESVEQQADSFKATRFNLETEWKNNYPRLRELDRNELFEKAKNEILDEVISLSQVTPKHWEEILQQSLWERVSTHVIENIYLPAAQTMNSGTFNTTVDIKLKQWTDKQLPNKAVEVAWETLQEEFSRFMTEPKGKEHDDIFDKLKEAVKEESIKRHKWNDFAEDSLRVIQHNALEDRSISDKQQWDAAIYFMEEALQARLKDTENAIENMVGPDWKKRWLYWKNRTQEQCVHNETKNELEKMLKCNEEHPAYLASDEITTVRKNLESRGVEVDPSLIKDTWHQVYRRHFLKTALNHCNLCRRGFYYYQRHFVDSELECNDVVLFWRIQRMLAITANTLRQQLTNTEVRRLEKNVKEVLEDFAEDGEKKIKLLTGKRVQLAEDLKKVREIQEKLDAFIEALHQEK

SEQ ID NO: 56573 - protein, 185 aa, Homo sapiens
  VARIANT 1: note = MOD_RES - Any amino acid
XYLILGSAVGGGYTAKKTFDQWKDMIPDLSEYKWIVPDIVWEIDEYIDFEKIRKALPSSEDLVKLAPDFDKIVESLSLLKDFFTSGHKLVSEVIGASDLLLLLGSPEETAFRATDRGSESDKHFRKVSDKEKIDQLQEELLHTQLKYQRILERLEKENKELRKLVLQKDDKGIHHRKLKKSLIDM

SEQ ID NO: 56574 - protein, 179 aa, Homo sapiens
MVVGAFPMAKLLYLGIRQVSKPLANRIKEAARRSEFFKTYICLPPAQLYHWVEMRTKMRIMGFRGTVIKPLNEEAAAELGAELLGEATIFIVGGGCLVLEYWRHQAQQRHKEEEQRAAWNALRDEVGHLALALEALQAQVQAAPPQGALEELRTELQEVRAQLCNPGRSASHAVPASKK

SEQ ID NO: 56575 - protein, 180 aa, Homo sapiens
MVVGAFPMAKLLYLGIRQVSKPLANRIKEAARRSEFFKTYICLPPAQLYHWLEMRTKMRIMGFNAAAIKPLNEGAAAELGAELLGEGIIFITACSCLMLEYWRHQLQQRRKEKERRVAREALRGEVGHLGLALEELQAQVQATSTQLALEELRAQLQEVRAHLCLRDPPPAPPVAPASEK

SEQ ID NO: 56576 - protein, 126 aa, Homo sapiens
MRTKMRIMGFRGTVIKPLNEEAAAELGAELLGEATIFIVGGGCLVLEYWRHQAQQRHKEEEQRAAWNALRDEVGHLALALEALQAQVQAAPPQGALEELRTELQEVRAQLCNPGRSASHAVPASKK

SEQ ID NO: 56577 - protein, 577 aa, Homo sapiens [sequence omitted]

SEQ ID NO: 56578 - protein, 577 aa, Homo sapiens [sequence omitted]

SEQ ID NO: 56579 - protein, 577 aa, Homo sapiens [sequence omitted]

SEQ ID NO: 56580 - protein, 571 aa, Homo sapiens
MSHQPLSCLTEKEDSPSESTGNGPPHLAHPNLDTFTPEELLQQMKELLTENHQLKEAMKLNNQAMKGRFEELSAWTEKQKEERQFFEIQSKEAKERLMALSHENEKLKEELGKLKGKSERSSEDPTDDSRLPRAEAEQEKDQLRTQVVRLQAEKADLLGIVSELQLKLNSSGSSEDSFVEIRMAEGEAEGSVKEIKHSPGPTRTVSTGTSRSADGAKNYFEHEELTVSQLLLCLREGNQKVERLEVALKEAKERVSDFEKKTSNRSEIETQTEGSTEKENDEEKGPETVGSEVEALNLQVTSLFKELQEAHTKLSKAELMKKRLQEKCQALERKNSAIPSELNEKQELVYTNKKLELQVESMLSEIKMEQAKTEDEKSKLTVLQMTHNKLLQEHNNALKTIEELTRKESEKVDRAVLKELSEKLELAEKALASKQLQMDEMKQTIAKQEEDLETMTILRAQMEVYCSDFHAERAAREKIHEEKEQLALQLAVLLKENDAFEDGGRQSLMEMQSRHGARTSDSDQQAYLVQRGAEDRDWRQQRNIPIHSCPKCGEVLPDIDTLQIHVMDCII

SEQ ID NO: 56581 - protein, 577 aa, Homo sapiens [sequence omitted]

SEQ ID NO: 56582 - protein, 571 aa, Homo sapiens; identical to SEQ ID NO: 56580

SEQ ID NO: 56583 - protein, 126 aa, Homo sapiens
  VARIANT 1: note = MOD_RES - Any amino acid
XGEAEGSVKEIKHSPGPTRTVSTGTALSKYRSRSADGAKNYFEHEELTVSQLLLCLREGNQKVERLEVALKEAKERVSDFEKKTSNRSEIETQTEGSTEKENDEEKGPETTGFHHVGQDGLDLLTS

SEQ ID NO: 56584 - protein, 147 aa, Homo sapiens
MKLNNQAMKGRFEELSAWTEKQKEERQFFEIQSKEAKERLMALSHENEKLKEELGKLKGKSERSSEDPTDDSRLPRAEAEQEKDQLRTQVVRLQAEKADLLGIVSELQLKLNSSGSSEDSFVEIRMAEGEAEGSVKEIKHSPGPTRT

SEQ ID NO: 56585 - protein, 303 aa, Homo sapiens
MHPEPAPPPSRSSPELPPSGGSTTSGSRRSRRRSGDGEPPGAPPPPPPPSAVTYPDWIGQSYSEVMSLNEHSMQALSWRKLYLSRAKLKASSRTSALLSGFAMVAMVEVQLDADHDYPPGLLIAFSACTTVLVAVHLFALMISTCILPNIEAVSNVHNLNSVKESPHERMHRHIELAWAFSTVIGTLLFLAEVVLLCWVKFLPLKKQPGQPRPTSKPPASGAAANVSTSGITPGQAAAIASTTIMVPFGLIFIVFAVHFYRSLVSHKTDRQFQELNELAEFARLQDQLDHRGDHPLTPGSHYA

SEQ ID NO: 56586 - protein, 254 aa, Homo sapiens
MSAELNVPIDPSAPACPEPGHKGMDYRDWVRRSYLELVTSNHHSVQALSWRKLYLSRAKLKASSRTSALLSGFAMVAMVEVQLETQYQYPRPLLIAFSACTTVLVAVHLFALLISTCILPNVEAVSNIHNLNSISESPHERMHPYIELAWGFSTVLGILLFLAEVVLLCWIKFLPVDARRQPGPPPGPGSHTGWQAALVSTIIMVPVGLIFVVFTIHFYRSLVRHKTERHNREIEELHKLKVQLDGHERSLQVL

SEQ ID NO: 56587 - protein, 254 aa, Homo sapiens; identical to SEQ ID NO: 56586

SEQ ID NO: 56588 - protein, 212 aa, Homo sapiens
MSAELNVPIDPSAPACPEPGHKGMDYRDWVRRSYLELVTSNHHSVQALSWRKLYLSRAKLKASSRTSALLSGFAMVAMVEVQLETQYQYPRPLLIAFSACTTVLVAVHLFALLISTCILPNVEAVSNIHNLNSISESPHERMHPYIELAWGFSTVLGILLFLAEVVLLCWIKFLPVDARRQPGPPPGPGSHTGWQAALVSTIIMVPVGLIFV

SEQ ID NO: 56589 - protein, 254 aa, Homo sapiens; identical to SEQ ID NO: 56586

SEQ ID NO: 56590 - protein, 254 aa, Homo sapiens; identical to SEQ ID NO: 56586

SEQ ID NO: 56591 - protein, 30 aa, Homo sapiens
MSAELNVPIDPSAPACPEPGHKGMDYRDWV

SEQ ID NO: 56592 - protein, 229 aa, Homo sapiens
MSAELNVPIDPSAPACPEPGHKGMDYRDWVRRSYLELVTSNHHSVQALSWRKLYLSRAKLKASSRTSALLSGFAMVAMVEVQLETQYQYPRPLLIAFSACTTVLVAVHLFALLISTCILPNVEAVSNIHNLNSISESPHERMHPYIELAWGFSTVLGILLFLAEVVLLCWIKFLPVDARRQPGPPPGPGSHTGWQAALVSTIIMVPVGLIFVVFTIHFYRSLVRHKTER

SEQ ID NO: 56593 - protein, 97 aa, Homo sapiens
MSAELNVPIDPSAPACPEPGHKGMDYRDWVRRSYLELVTSNHHSVQALSWRKLYLSRAKLKASSRTSALLSGFAMVAMVEVQLETQYQYPRPLLIAF

SEQ ID NO: 56594 - protein, 295 aa, Homo sapiens [sequence omitted]

SEQ ID NO: 56595 - protein, 273 aa, Homo sapiens
MKGGEGDAGEQAPLNPEGESPAGSATYREFVHRGYLDLMGASQHSLRALSWRRLYLSRAKLKASSRTSALLSGFAMVAMVEVQLESDHEYPPGLLVAFSACTTVLVAVHLFALMVSTCLLPHIEAVSNIHNLNSVHQSPHQRLHRYVELAWGFSTALGTFLFLAEVVLVGWVKFVPIGAPLDTPTPMVPTSRVPGTLAPVATSLSPASNLPRSSASAAPSQAEPACPPRQACGGGGAHGPGWQAAMASTFPGIFPISLSLGFCKLLCTWAGLS

SEQ ID NO: 56596 - protein, 137 aa, Homo sapiens
MAGSQDIFDAIVMADERFHGEGYREGYEEGSSLGVMEGRQHGTLHGAKIGSEIGCYQGFAFAWKCLLHSCTTEKDSRKMKVLESLIGMIQKFPYDDPTYDKLHEDLDKIRGKFKQFCSLLNVQPDFKISAEGSGLSF

SEQ ID NO: 56597 - protein, 221 aa, Homo sapiens
MAGSQDIFDAIVMADERFHGEGYREGYEEGSSLGVMEGRQHGTLHGAKIGSEIGCYQGFAFAWKCLLHSCTTEKDSRKMKVLESLIGMIQKFPYDDPTYDKLHEDLDKIRGKFKQTGLSPSAVMVRPPSYVELPVTCWCWEAPRCNQKCTDPAARRPDPQTCASQDRLRCAPCTCHQPLASRYTQHPGLVPLPHHDRQSVPQGPRVVQTDAAARMVEQQTM

SEQ ID NO: 56598 - protein, 137 aa, Homo sapiens; identical to SEQ ID NO: 56596

SEQ ID NO: 56599 - protein, 78 aa, Homo sapiens
MAGSQDIFDAIVMADESRKMKVLESLIGMIQKFPYDDPTYDKLHEDLDKIRGKFKQFCSLLNVQPDFKISAEGSGLSF

SEQ ID NO: 56600 - protein, 1012 aa, Homo sapiens
MMAQSNMFTVADVLSQDELRKKLYQTFKDRGILDTLKTQLRNQLIHELMHPVLSGELQPRSISVEGSSLLIGASNSLVADHLQRCGYEYSLSVFFPESGLAKEKVFTMQDLLQLIKINPTSSLYKSLVSGSDKENQKGFLMHFLKELAEYHQAKESCNMETQTSSTFNRDSLAEKLQLIDDQFADAYPQRIKFESLEIKLNEYKREIEEQLRAEMCQKLKFFKDTEIAKIKMEAKKKYEKELTMFQNDFEKACQAKSEALVLREKSTLERIHKHQEIETKEIYAQRQLLLKDMDLLRGREAELKQRVEAFELNQKLQEEKHKSITEALRRQEQNIKSFEETYDRKLKNELLKYQLELKDDYIIRTNRLIEDERKNKEKAVHLQEELIAINSKKEELNQSVNRVKELELELESVKAQSLAITKQNHMLNEKVKEMSDYSLLKEEKLELLAQNKLLKQQLEESRNENLRLLNRLAQPAPELAVFQKELRKAEKAIVVEHEEFESCRQALHKQLQDEIEHSAQLKAQILGYKASVKSLTTQVADLKLQLKQTQTALENEVYCNPKQSVIDRSVNGLINGNVVPCNGEISGDFLNNPFKQENVLARMVASRITNYPTAWVEGSSPDSDLEFVANTKARVKELQQEAERLEKAFRSYHRRVIKNSAKSPLAAKSPPSLHLLEAFKNITSSSPERHIFGEDRVVSEQPQVGTLEERNDVVEALTGSAASRLRGGTSSRRLSSTPLPKAKRSLESEMYLEGLGRSHIASPSPCPDRMPLPSPTESRHSLSIPPVSSPPEQKVGLYRRQTELQDKSEFSDVDKLAFKDNEEFESSFESAGNMPRQLEMGGLSPAGDMSHVDAAAAAVPLSYQHPSVDQKQIEEQKEEEKIREQQVKERRQREERRQSNLQEVLERERRELEKLYQERKMIEESLKIKIKKELEMENELEMSNQEIKDKSAHSENPLEKYMKIIQQEQDQESADKSSKKMVQEGSLVDTLQSSDKVESLTGFSHEELDDSW

SEQ ID NO: 56601 - protein, 972 aa, Homo sapiens
MMAQSNMFTVADVLSQDELRKKLYQTFKDRGILDTLKTQLRNQLIHELMHPVLSGELQPRSISVEGSSLLIGASNSLVADHLQRCGYEYSLSVFFPESGLAKEKVFTMQDLLQLIKINPTSSLYKSLVSGSDKENQKGFLMHFLKELAEYHQAKESCNMETQTSSTFNRDSLAEKLQLIDDQFADAYPQRIKFESLEIKLNEYKREIEEQLRAEMCQKLKFFKDTEIAKIKMEAKKKYEKELTMFQNDFEKACQAKSEALVLREKSTLERIHKHQEIETKEIYAQRQLLLKDMDLLRGREAELKQRVEAFELYQLELKDDYIIRTNRLIEDERKNKEKAVHLQEELIAINSKKEELNQSVNRVKELELELESVKAQSLAITKQNHMLNEKVKEMSDYSLLKEEKLELLAQNKLLKQQLEESRNENLRLLNRLAQPAPELAVFQKELRKAEKAIVVEHEEFESCRQALHKQLQDEIEHSAQLKAQILGYKASVKSLTTQVADLKLQLKQTQTALENEVYCNPKQSVIDRSVNGLINGNVVPCNGEISGDFLNNPFKQENVLARMVASRITNYPTAWVEGSSPDSDLEFVANTKARVKELQQEAERLEKAFRSYHRRVIKNSAKSPLAAKSPPSLHLLEAFKNITSSSPERHIFGEDRVVSEQPQVGTLEERNDVVEALTGSAASRLRGGTSSRRLSSTPLPKAKRSLESEMYLEGLGRSHIASPSPCPDRMPLPSPTESRHSLSIPPVSSPPEQKVGLYRRQTELQDKSEFSDVDKLAFKDNEEFESSFESAGNMPRQLEMGGLSPAGDMSHVDAAAAAVPLSYQHPSVDQKQIEEQKEEEKIREQQVKERRQREERRQSNLQEVLERERRELEKLYQERKMIEESLKIKIKKELEMENELEMSNQEIKDKSAHSENPLEKYMKIIQQEQDQESADKSSKKMVQEGSLVDTLQSSDKVESLTGFSHEELDDSW

SEQ ID NO: 56602 - protein, 872 aa, Homo sapiens
MHFLKELAEYHQAKESCNMETQTSSTFNRDSLAEKLQLIDDQFADAYPQRIKFESLEIKLNEYKREIEEQLRAEMCQKLKFFKDTEIAKIKMEAKKKYEKELTMFQNDFEKACQAKSEALVLREKSTLERIHKHQEIETKEIYAQRQLLLKDMDLLRGREAELKQRVEAFELNQKLQEEKHKSITEALRRQEQNIKSFEETYDRKLKNELLKYQLELKDDYIIRTNRLIEDERKNKEKAVHLQEELIAINSKKEELNQSVNRVKELELELESVKAQSLAITKQNHMLNEKVKEMSDYSLLKEEKLELLAQNKLLKQQLEESRNENLRLLNRLAQPAPELAVFQKELRKAEKAIVVEHEEFESCRQALHKQLQDEIEHSAQLKAQILGYKASVKSLTTQVADLKLQLKQTQTALENEVYCNPKQSVIDRSVNGLINGNVVPCNGEISGDFLNNPFKQENVLARMVASRITNYPTAWVEGSSPDSDLEFVANTKARVKELQQEAERLEKAFRSYHRRVIKNSAKSPLAAKSPPSLHLLEAFKNITSSSPERHIFGEDRVVSEQPQVGTLEERNDVVEALTGSAASRLRGGTSSRRLSSTPLPKAKRSLESEMYLEGLGRSHIASPSPCPDRMPLPSPTESRHSLSIPPVSSPPEQKVGLYRRQTELQDKSEFSDVDKLAFKDNEEFESSFESAGNMPRQLEMGGLSPAGDMSHVDAAAAAVPLSYQHPSVDQKQIEEQKEEEKIREQQVKERRQREERRQSNLQEVLERERRELEKLYQERKMIEESLKIKIKKELEMENELEMSNQEIKDKSAHSENPLEKYMKIIQQEQDQESADKSSKKMVQEGSLVDTLQSSDKVESLTGFSHEELDDSW

SEQ ID NO: 56603 - protein, 367 aa, Homo sapiens
MMAQSNMFTVADVLSQDELRKKLYQTFKDRGILDTLKTQLRNQLIHELMHPVLSGELQPRSISVEGSSLLIGASNSLVADHLQRCGYEYSLSVFFPESGLAKEKVFTMQDLLQLIKINPTSSLYKSLVSGSDKENQKGFLMHFLKELAEYHQAKESCNMETQTSSTFNRDSLAEKLQLIDDQFADAYPQRIKFESLEIKLNEYKREIEEQLRAEMCQKLKFFKDTEIAKIKMEAKKKYEKELTMFQNDFEKACQAKSEALVLREKSTLERIHKHQEIETKEIYAQRQLLLKDMDLLRGREAELKQRVEAFELNQKLQEEKHKSITEALRRQEQNIKSFEETYDRKLKNELLNFHRLHGVCLALGILI

SEQ ID NO: 56604 - protein, 338 aa, Homo sapiens [sequence omitted]

SEQ ID NO: 56605 - protein, 861 aa, Homo sapiens
MAHYPTRLKTRKTYSWVGRPLLDRKLHYQTYREMCVKTEGCSTEIHIQIGQFVLIEGDDDENPYVAKLLELFEDDSDPPPKKRARVQWFVRFCEVPACKRHLLGRKPGAQEIFWYDYPACDSNINAETIIGLVRVIPLAPKDVVPTNLKNEKTLFVKLSWNEKKFRPLSSELFAELNKPQESAAKCQKPVRAKSKSAESPSWTPAEHVAKRIESRHSASKSRQTPTHPLTPRARKRLELGNLGNPQMSQQTSCASLDSPGRIKRKVAFSEITSPSKRSQPDKLQTLSPALKAPEKTRETGLSYTEDDKKASPEHRIILRTRIAASKTIDIREERTLTPISGGQRSSVVPSVILKPENIKKRDAKEAKAQNEATSTPHRIRRKSSVLTMNRIRQQLRFLGNSKSDQEEKEILPAAEISDSSSDEEEASTPPLPRRAPRTVSRNLRSSLKSSLHTLTKVPKKSLKPRTPRCAAPQIRSRSLAAQEPASVLEEARLRLHVSAVPESLPCREQEFQDIYNFVESKLLDHTGGCMYISGVPGTGKTATVHEVIRCLQQAAQANDVPPFQYIEVNGMKLTEPHQVYVQILQKLTGQKATANHAAELLAKQFCTRGSPQETTVLLVDELDLLWTHKQDIMYNLFDWPTHKEARLVVLAIANTMDLPERIMMNRVSSRLGLTRMCFQPYTYSQLQQILRSRLKHLKAFEDDAIQLVARKVAALSGDARRCLDICRRATEICEFSQQKPDSPGLVTIAHSMEAVDEMFSSSYITAIKNSSVLEQSFLRAILAEFRRSGLEEATFQQIYSQHVALCRMEGLPYPTMSETMAVCSHLGSCRLLLVEPSRNDLLLRVRLNVSQDDVLYALKDE

SEQ ID NO: 56606 - protein, 861 aa, Homo sapiens; identical to SEQ ID NO: 56605

SEQ ID NO: 56607 - protein, 577 aa, Homo sapiens
MSKPELKEDKMLEVHFVGDDDVLNHILDREGGAKLKKERAQLLVNPKKIIKKPEYDLEEDDQEVLKDQNYVEIMGRDVQESLKNGSATGGGNKVYSFQNRKHSEKMAKLASELAKTPQKSVSFSLKNDPEITINVPQSSKGHSASDKVQPKNNDKSEFLSTAPRSLRKRLIVPRSHSDSESEYSASNSEDDEGVAQEHEEDTNAVIFSQKIQAQNRVVSAPVGKETPSKRMKRDKTSDLVEEYFEAHSSSKVLTSDRTLQKLKRAKLDQQTLRNLLSKVSPSFSAELKQLNQQYEKLFHKWMLQLHLGFNIVLYGLGSKRDLLERFRTTMLQDSIHVVINGFFPGISVKSVLNSITEEVLDHMGTFRSILDQLDWIVNKFKEDSSLELFLLIHNLDSQMLRGEKSQQIIGQLSSLHNIYLIASIDHLNAPLMWDHAKQSLFNWLWYETTTYSPYTEETSYENSLLVKQSGSLPLSSLTHVLRSLTPNARGIFRLLIKYQLDNQDNPSYIGLSFQDFYQQCREAFLVNSDLTLRAQLTEFRDHKLIRTKKGTDGVEYLLIPVDNGTLTDFLEKEEEEA

SEQ ID NO: 56608 - protein, 109 aa, Homo sapiens
MSKPELKEDKMLEVHFVGDDDVLNHILDREGGAKLKKERAQLLVNPKKIIKKPEYDLEEDDQEVLKDQNYVEIMGRDVQESLKNGSATGGGNKVYSFQNRKHSEKMAKL

SEQ ID NO: 56609 - protein, 72 aa, Homo sapiens
MSKPELKEDKMLEVHFVGDDDVLNHILDREGGAKLKKERAQLLVNPKKIIKKPEYDLEEDDQEVLKDQNYVE

SEQ ID NO: 56610 - protein, 712 aa, Homo sapiens
MATSSMSKGCFVFKPNSKKRKISLPIEDYFNKGKNEPEDSKLRFETYQLIWQQMKSENERLQEELNKNLFDNLIEFLQKSHSGFQKNSRDLGGQIKLREIPTAALVLGVNVTDHDLTFGSLTEALQNNVTPYVVSLQAKDCPDMKHFLQKLISQLMDCCVDIKSKEEESVHVTQRKTHYSMDSLSSWYMTVTQKTDPKMLSKKRTTSSQWQSPPVVVILKDMESFATKVLQDFIIISSQHLHEFPLILIFGIATSPIIIHRLLPHAVSSLLCIELFQSLSCKEHLTTVLDKLLLTTQFPFKINEKVLQVLTNIFLYHDFSVQNFIKGLQLSLLEHFYSQPLSVLCCNLPEAKRRINFLSNNQCENIRRLPSFRRYVEKQASEKQVALLTNERYLKEETQLLLENLHVYHMNYFLVLRCLHKFTSSLPKYPLGRQIRELYCTCLEKNIWDSEEYASVLQLLRMLAKDELMTILEKCFKVFKSYCENHLGSTAKRIEEFLAQFQSLDAETKEEEDASGSQPKGLQKTDLYHLQKSLLEMKELRRSKKQTKFEVLRENVVNFIDCLVREYLLPPETQPLHEVVYFSAAHALREHLNAAPRIALHTALNNPYYYLKNEALKSEEGCIPNIAPDICIAYKLHLECSRLINLVDWSEAFATVVTAAEKMDANSATSEEMNEIIHARFIRAVSELELLGFIKPTKQKTDHVARLTWGGC

SEQ ID NO: 56611 - protein, 711 aa, Homo sapiens
MATSSMSKGCFVFKPNSKKRKISLPIEDYFNKGKNEPEDSKLRFETYQLIWQQMKSENERLQEELNKNLFDNLIEFLQKSHSGFQKNSRDLGGQIKLREIPTAALVLGVNVTDHDLTFGSLTEALQNNVTPYVVSLQAKDCPDMKHFLQKLISQLMDCCVDIKSKEEESVHVTQRKTHYSMDSLSSWYMTVTQKTDPKMLSKKRTTSSQWQSPPVVVILKDMESFATKVLQDFIIISSQHLHEFPLILIFGIATSPIIIHRLLPHAVSSLLCIELFQSLSCKEHLTTVLDKLLLTTQFPFKINEKVLQVLTNIFLYHDFSVQNFIKGLQLSLLEHFYSQPLSVLCCNLPEAKRRINFLSNNQCENIRRLPSFRRYVEKQASEKQVALLTNERYLKEETQLLLENLHVYHMNYFLVLRCLHKFTSSLPKYPLGRQIRELYCTCLEKNIWDSEEYASVLQLLRMLAKDELMTILEKCFKVFKSYCENHLGSTAKRIEEFLAQFQSLDETKEEEDASGSQPKGLQKTDLYHLQKSLLEMKELRRSKKQTKFEVLRENVVNFIDCLVREYLLPPETQPLHEVVYFSAAHALREHLNAAPRIALHTALNNPYYYLKNEALKSEEGCIPNIAPDICIAYKLHLECSRLINLVDWSEAFATVVTAAEKMDANSATSEEMNEIIHARFIRAVSELELLGFIKPTKQKTDHVARLTWGGC

SEQ ID NO: 56612 - protein, 444 aa, Homo sapiens
MKSENERLQEELNKNLFDNLIEFLQKSHSGFQKNSRDLGGQIKLREIPTAALVLGVNVTDHDLTFGSLTEALQNNVTPYVVSLQAKDCPDMKHFLQKLISQLMDCCVDIKSKEEESVHVTQRKTHYSMDSLSSWYMTVTQKTDPKMLSKKRTTSSQWQSPPVVVILKDMESFATKVLQDFIIISSQHLHEFPLILIFGIATSPIIIHRLLPHAVSSLLCIELFQSLSCKEHLTTVLDKLLLTTQFPFKINEKVLQVLTNIFLYHDFSVQNFIKGLQLSLLEHFYSQPLSVLCCNLPEAKRRINFLSNNQCENIRRLPSFRRYVEKQASEKQVALLTNERYLKEETQLLLENLHVYHMNYFLVLRCLHKFTSSLPKYPLGRQIRELYCTCLEKNIWDSEEYASVLQLLRLGLAFLDIQLFGAQSGQELLLPLSWEANPSHAANLG

SEQ ID NO: 56613 - protein, 568 aa, Homo sapiens
MKHFLQKLISQLMDCCVDIKSKEEESVHVTQRKTHYSMDSLSSWYMTVTQKTDPKMLSKKRTTSSQWQSPPVVVILKDMESFATKVLQDFIIISSQHLHEFPLILIFGIATSPIIIHRLLPHAVSSLLCIELFQSLSCKEHLTTVLDKLLLTTQFPFKINEKVLQVLTNIFLYHDFSVQNFIKGLQLSLLEHFYSQPLSVLCCNLPEAKRRINFLSNNQCENIRRLPSFRRYVEKQASEKQVALLTNERYLKEETQLLLENLHVYHMNYFLVLRCLHKFTSSLPKYPLGRQIRELYCTCLEKNIWDSEEYASVLQLLRMLAKDELMTILEKCFKVFKSYCENHLGSTAKRIEEFLAQFQSLDETKEEEDASGSQPKGLQKTDLYHLQKSLLEMKELRRSKKQTKFEVLRENVVNFIDCLVREYLLPPETQPLHEVVYFSAAHALREHLNAAPRIALHTALNNPYYYLKNEALKSEEGCIPNIAPDICIAYKLHLECSRLINLVDWSEAFATVVTAAEKMDANSATSEEMNEIIHARFIRAVSELELLGFIKPTKQKTDHVARLTWGGC

SEQ ID NO: 56614 - protein, 436 aa, Homo sapiens
MSSRKSKSNSLIHTECLSQVQRILRERFCRQSPHSNLFGVQVQYKHLSELLKRTALHGESNSVLIIGPRGSGKTMLINHALKELMEIEEVSENVLQVHLNGLLQINDKIALKEITRQLNLENVVGDKVFGSFAENLSFLLEALKKGDRTSSCPVIFILDEFDLFAHHKNQTLLYNLFDISQSAQTPIAVIGLTCRLDILELLEKRVKSRFSHRQIHLMNSFGFPQYVKIFKEQLSLPAEFPDKVFAEKWNENVQYLSEDRSVQEVLQKHFNISKNLRSLHMLLMLALNRVTASHPFMTAVDLMEASQLCSMDSKANIVHGLSVLEICLIIAMKHLNDIYEEEPFNFQMVYNEFQKFVQRKAHSVYNFEKPVVMKAFEHLQQLELIKPMERTSGNSQREYQLMKLLLDNTQIMNALQKYPNCPTDVRQWATSSLSWL

SEQ ID NO: 56615 - protein, 436 aa, Homo sapiens; identical to SEQ ID NO: 56614

SEQ ID NO: 56616 - protein, 436 aa, Homo sapiens; identical to SEQ ID NO: 56614

SEQ ID NO: 56617 - protein, 145 aa, Homo sapiens
MSSRKSKSNSLIHTECLSQVQRILRERFCRQSPHSNLFGVQVQYKHLSELLKRTALHGESNSVLIIGPRGSGKTMLINHALKELMEIEEVSENVLQVHLNGLLQINDKIALKEITRQLNLENVVGDKVFGSFAENLSFLLEALKK

SEQ ID NO: 56618 - protein, 127 aa, Homo sapiens
MSSRKSKSNSLIHTECLSQVQRILRERFCRQSPHSNLFGVQVQYKHLSELLKRTALHGESNSVLIIGPRGSGKTMLINHALKELMEIEEVSENVLQVHLNGLLQINDKIALKEITRQLNLENVVGDK

SEQ ID NO: 56619 - protein, 128 aa, Homo sapiens
MSSRKSKSNSLIHTECLSQVQRILRERFCRQSPHSNLFGVQVQYKHLSELLKRTALHGESNSVLIIGPRGSGKTMLINHALKELMEIEEVSENVLQVHLNGLLQINDKIALKEITRQLNLENVVGDKV

SEQ ID NO: 56620 - protein, 436 aa, Homo sapiens; identical to SEQ ID NO: 56614

SEQ ID NO: 56621 - protein, 352 aa, Homo sapiens
MEIEEVSENVLQVHLNGLLQINDKIALKEITRQLNLENVVGDKVFGSFAENLSFLLEALKKGDRTSSCPVIFILDEFDLFAHHKNQTLLYNLFDISQSAQTPIAVIGLTCRLDILELLEKRVKSRFSHRQIHLMNSFGFPQYVKIFKEQLSLPAEFPDKVFAEKWNENVQYLSEDRSVQEVLQKHFNISKNLRSLHMLLMLALNRVTASHPFMTAVDLMEASQLCSMDSKANIVHGLSVLEICLIIAMKHLNDIYEEEPFNFQMVYNEFQKFVQRKAHSVYNFEKPVVMKAFEHLQQLELIKPMERTSGNSQREYQLMKLLLDNTQIMNALQKYPNCPTDVRQWATSSLSWL

SEQ ID NO: 56622 - protein, 362 aa, Homo sapiens
MLINHALKELMEIEEVSENVLQVHLNGLLQINDKIALKEITRQLNLENVVGDKVFGSFAENLSFLLEALKKGDRTSSCPVIFILDEFDLFAHHKNQTLLYNLFDISQSAQTPIAVIGLTCRLDILELLEKRVKSRFSHRQIHLMNSFGFPQYVKIFKEQLSLPAEFPDKVFAEKWNENVQYLSEDRSVQEVLQKHFNISKNLRSLHMLLMLALNRVTASHPFMTAVDLMEASQLCSMDSKANIVHGLSVLEICLIIAMKHLNDIYEEEPFNFQMVYNEFQKFVQRKAHSVYNFEKPVVMKAFEHLQQLELIKPMERTSGNSQREYQLMKLLLDNTQIMNALQKYPNCPTDVRQWATSSLSWL

SEQ ID NO: 56623 - protein, 219 aa, Homo sapiens
MNSFGFPQYVKIFKEQLSLPAEFPDKVFAEKWNENVQYLSEDRSVQEVLQKHFNISKNLRSLHMLLMLALNRVTASHPFMTAVDLMEASQLCSMDSKANIVHGLSVLEICLIIAMKHLNDIYEEEPFNFQMVYNEFQKFVQRKAHSVYNFEKPVVMKAFEHLQQLELIKPMERTSGNSQREYQLMKLLLDNTQIMNALQKYPNCPTDVRQWATSSLSWL

SEQ ID NO: 56624 - protein, 435 aa, Homo sapiens
MPHLENVVLCRESQVSILQSLFGERHHFSFPSIFIYGHTASGKTYVTQTLLKTLELPHVFVNCVECFTLRLLLEQILNKLNHLSSSEDGCSTEITCETFNDFVRLFKQVTTAENLKDQTVYIVLDKAEYLRDMEANLLPGFLRLQELADRNVTVLFLSEIVWEKFRPNTGCFEPFVLYFPDYSIGNLQKILSHDHPPEYSADFYAAYINILLGVFYTVCRDLKELRHLAVLNFPKYCEPVVKGEASERDTRKLWRNIEPHLKKAMQTVYLREISSSQWEKLQKDDTDPGQLKGLSAHTHVELPYYSKFILIAAYLASYNPARTDKRFFLKHHGKIKKTNFLKKHEKTSNHLLGPKPFPLDRLLAILYSIVDSRVAPTANIFSQITSLVTLQLLTLVGHDDQLDGPKYKCTVSLDFIRAIARTVNFDIIKYLYDFL

SEQ ID NO: 56625 - protein, 324 aa, Homo sapiens
MPHLENVVLCRESQVSILQSLFGERHHFSFPSIFIYGHTASGKTYVTQTLLKTLELPHVFVNCVECFTLRLLLEQILNKLNHLSSSEDGCSTEITCETFNDFVRLFKQVTTAENLKDQTVYIVLDKAEYLRDMEANLLPGFLRLQELADRNVTVLFLSEIVWEKFRPNTGCFEPFVLYFPDYSIGNLQKILSHDHPPEYSADFYAAYINILLGVFYTVCRDLKELRHLAVLNFPKYCEPVVKGEASERDTRKLWRNIEPHLKKAMQTVYLREISSSQWEKLQKDDTDPGQLKGIRGSIETVTGDTSSANYQDTKVNTKEHSVRK

SEQ ID NO: 56626 - protein, 303 aa, Homo sapiens
MEANLLPGFLRLQELADRNVTVLFLSEIVWEKFRPNTGCFEPFVLYFPDYSIGNLQKILSHDHPPEYSADFYAAYINILLGVFYTVCRDLKELRHLAVLNFPKYCEPVVKGEASERDTRKLWRNIEPHLKKAMQTVYLREISSSQWEKLQKDDTDPGQLKGLSAHTHVELPYYSKFILIAAYLASYNPARTDKRFFLKHHGKIKKTNFLKKHEKTSNHLLGPKPFPLDRLLAILYSIVDSRVAPTANIFSQITSLVTLQLLTLVGHDDQLDGPKYKCTVSLDFIRAIARTVNFDIIKYLYDFL

SEQ ID NO: 56627 - protein, 252 aa, Homo sapiens
MGSELIGRLAPRLGLAEPDMLRKAEEYLRLSRVKCVGLSARTTETSSAVMCLDLAASWMKCPLDRAYLIKLSGLNKETYQSCLKSFECLLGLNSNIGIRDLAVQFSCIEAVNMASKILKSYESSLPQTQQVDLDLSRPLFTSAALLSACKILKLKVDKNKMVATSGVKKAIFDRLCKQLEKIGQQVDREPGDVATPPRKRKKIVVEAPAKEMEKVEEMPHKPQKDEDLTQDYEEWKRKILENAASAQKATAE

SEQ ID NO: 56628 - protein, 153 aa, Homo sapiens
MNVGVAHSEVNPNTRVMNSRGMWLTYALGVGLLHIVLLSIPFFSVPVAWTLTNIIHNLGMYVFLHAVKGTPFETPDQGKARLLTHWEQLDYGVQFTSSRKFFTISPIILYFLASFYTKYDPTHFILNTASLLSVLIPKMPQLHGVRIFGINKY

SEQ ID NO: 56629 - protein, 153 aa, Homo sapiens; identical to SEQ ID NO: 56628

SEQ ID NO: 56630 - protein, 153 aa, Homo sapiens; identical to SEQ ID NO: 56628

SEQ ID NO: 56631 - protein, 109 aa, Homo sapiens
MNVGVAHSEVNPNTRVMNSRGMWLTYALGVGLLHIVLLSIPFFSVPVAWTLTNIIHNLGMYVFLHAVKGTPFETPDQGKARLLTHWEQLDYGVQFTSSRKFFTISPIIL

SEQ ID NO: 56632 - protein, 109 aa, Homo sapiens; identical to SEQ ID NO: 56631

SEQ ID NO: 56633 - protein, 153 aa, Homo sapiens
MNVGVAHSEVNPNTRVMNSRGIWLAYIILVGLLHMVLLSIPFFSIPVVWTLTNVIHNLATYVFLHTVKGTPFETPDQGKARLLTHWEQMDYGLQFTSSRKFLSISPIVLYLLASFYTKYDAAHFLINTASLLSVLLPKLPQFHGVRVFGINKY

SEQ ID NO: 56634 - protein, 153 aa, Homo sapiens; identical to SEQ ID NO: 56633

SEQ ID NO: 56635 - protein, 153 aa, Homo sapiens
MNVGTAHSEVNPNTRVMNSRGIWLSYVLAIGLLHIVLLSIPFVSVPVVWTLTNLIHNMGMYIFLHTVKGTPFETPDQGKARLLTHWEQMDYGVQFTASRKFLTITPIVLYFLTSFYTKYDQIHFVLNTVSLMSVLIPKLPQLHGVRIFGINKY

SEQ ID NO: 56636 - protein, 153 aa, Homo sapiens; identical to SEQ ID NO: 56635

SEQ ID NO: 56637 - protein, 439 aa, Homo sapiens
MFSKLAHLQRFAVLSRGVHSSVASATSVATKKTVQGPPTSDDIFEREYKYGAHNYHPLPVALERGKGIYLWDVEGRKYFDFLSSYSAVNQGHCHPKIVNALKSQVDKLTLTSRAFYNNVLGEYEEYITKLFNYHKVLPMNTGVEAGETACKLARKWGYTVKGIQKYKAKIVFAAGNFWGRTLSAISSSTDPTSYDGFGPFMPGFDIIPYNDLPALERALQDPNVAAFMVEPIQGEAGVVVPDPGYLMGVRELCTRHQVLFIADEIQTGLARTGRWLAVDYENVRPDIVLLGKALSGGLYPVSAVLCDDDIMLTIKPGEHGSTYGGNPLGCRVAIAALEVLEEENLAENADKLGIILRNELMKLPSDVVTAVRGKGLLNAIVIKETKDWDAWKVCLRLRDNGLLAKPTHGDIIRFAPPLVIKEDELRESIEIINKTILSF

SEQ ID NO: 56638 - protein, 301 aa, Homo sapiens
MNTGVEAGETACKLARKWGYTVKGIQKYKAKIVFAAGNFWGRTLSAISSSTDPTSYDGFGPFMPGFDIIPYNDLPALERALQDPNVAAFMVEPIQGEAGVVVPDPGYLMGVRELCTRHQVLFIADEIQTGLARTGRWLAVDYENVRPDIVLLGKALSGGLYPVSAVLCDDDIMLTIKPGEHGSTYGGNPLGCRVAIAALEVLEEENLAENADKLGIILRNELMKLPSDVVTAVRGKGLLNAIVIKETKDWDAWKVCLRLRDNGLLAKPTHGDIIRFAPPLVIKEDELRESIEIINKTILSF

SEQ ID NO: 56639 - protein, 461 aa, Homo sapiens
MNNFGNEEFDCHFLDEGFTAKDILDQKINEVSSSDDKDAFYVADLGDILKKHLRWLKALPRVTPFYAVKCNDSKAIVKTLAATGTGFDCASKTEIQLVQSLGVPPERIIYANPCKQVSQIKYAANNGVQMMTFDSEVELMKVARAHPKAKLVLRIATDDSKAVCRLSVKFGATLRTSRLLLERAKELNIDVVGVSFHVGSGCTDPETFVQAISDARCVFDMGAEVGFSMYLLDIGGGFPGSEDVKLKFEEITGVINPALDKYFPSDSGVRIIAEPGRYYVASAFTLAVNIIAKKIVLKEQTGSDDEDESSEQTFMYYVNDGVYGSFNCILYDHAHVKPLLQKRPKPDEKYYSSSIWGPTCDGLDRIVERCDLPEMHVGDWMLFENMGAYTVAAASTFNGFQRPTIYYVMSGPAWQLMQQFQNPDFPPEVEEQDASTLPVSCAWESGMKRHRAACASASINV

SEQ ID NO: 56640 - protein, 461 aa, Homo sapiens; identical to SEQ ID NO: 56639

SEQ ID NO: 56641 - protein, 68 aa, Homo sapiens
MNNFGNEEFDCHFLDEGFTAKDILDQKINEVSSSDDKDAFYVADLGDILKKHLRWLKALPRVTPFYAV

SEQ ID NO: 56642 - protein, 308 aa, Homo sapiens
MMTFDSEVELMKVARAHPKAKLVLRIATDDSKAVCRLSVKFGATLRTSRLLLERAKELNIDVVGVSFHVGSGCTDPETFVQAISDARCVFDMGAEVGFSMYLLDIGGGFPGSEDVKLKFEEITGVINPALDKYFPSDSGVRIIAEPGRYYVASAFTLAVNIIAKKIVLKEQTGSDDEDESSEQTFMYYVNDGVYGSFNCILYDHAHVKPLLQKRPKPDEKYYSSSIWGPTCDGLDRIVERCDLPEMHVGDWMLFENMGAYTVAAASTFNGFQRPTIYYVMSGPAWQLMQQFQNPDFPPCLCLVPGRVG

SEQ ID NO: 56643 - protein, 227 aa, Homo sapiens
MVKSSLQRILNSHCFAREKEGDKPSATIHASRTMPLLSLHSRGGSSSESSRVSLHCCSNPGPGPRWCDAPHPPLKIPGGRGNSQRDHNLSANLFYSDDRLNVTEELTSNDKTRILNVQSRLTDAKRINWRTVLSGGSLYIEIPGGALPEGSKDSFAVLLEFAEEQLRADHVFICFHKNREDRAALLRTFSFLGFEIVRPGHPLVPKRPDACFMAYTFERESSGEEEE

SEQ ID NO: 56644 - protein, 276 aa, Homo sapiens
MWITSLITMKDEDIFDLAGDPQDSLIPGPSPTPKQNPVCNEAFFGHQTFSLRETGLKSVHCQGQEAENMEREKFQQKALKQTKQKKSKSAEFLMVKEDREATEGTGNPAFNMSSPDLSACQTAEKKVIRHDMPDRTLAAHQQKFRLPASAEPKGNEYGRNYFDPLMDEEINPRQCATEVSREDESGREETLNSEAPGSSNKSHEIHKEASEATTAHLEEFQRSQKTIILLGSSPLEQEIRSTSLHCMEDEMSHPWILLLKVTAVIRSRRYYREQRF

SEQ ID NO: 56645 - protein, 480 aa, Homo sapiens
MEREKFQQKALKQTKQKKSKSAEFLMVKEDREATEGTGNPAFNMSSPDLSACQTAEKKVIRHDMPDRTLAAHQQKFRLPASAEPKGNEYGRNYFDPLMDEEINPRQCATEVSREVCLMAKGEKAESGVDNTAGLSEKETQKNPRAPMDEADVKSAAHSSQGSIPKKIGPCSMDYDPNLLEEDDELHSQGDSLTDHSVKGKSTVWRIGEAEDYSQDISYLEELEEHRFSVCCSSVADSRYGDFFKHLHFVLVSASSELQLSQWQSQGFWYIILLMFFLWFLRLYLHYLGQWLFLQAISTPVTKFHFSLHIVELCYPTSSLHIGEELPVVVMGPLMLNAILLLLVLIRWGCQLLFASCPDVLSKLIITMGLWTILDPLAVFILDTLLGRLTDNEETPVADAAKLYWMFVRTVQPGILGVVITVLLYILLFVISSLILYLYCLRLHNDSWILDAFQRIHSEETKFFIPYDLEISNQELSYIVK

SEQ ID NO: 56646 - protein, 201 aa, Homo sapiens
MALSWVLTVLSLLPLLEAQIPLCANLVPVPITNATLDRITGKWFYIASAFRNEEYNKSVQEIQATFFYFTPNKTEDTIFLREYQTRQDQCIYNTTYLNVQRENGTISRYVGGQEHFAHLLILRDTKTYMLAFDVNDEKNWGLSVYADKPETTKEQLGEFYEALDCLRIPKSDVVYTDWKKDKCEPLEKQHEKERKQEEGES

SEQ ID NO: 56647 - protein, 194 aa, Homo sapiens [sequence omitted]

SEQ ID NO: 56648 - protein, 194 aa, Homo sapiens [sequence omitted]

SEQ ID NO: 56649 - protein, 201 aa, Homo sapiens
MALSWVLTVLSLLPLLEAQIPLCANLVPVPITNATLDRITGKWFYIASAFRNEEYNKSVQEIQATFFYFTPNKTEDTIFLREYQTRQNQCFYNSSYLNVQRENGTVSRYEGGREHVAHLLFLRDTKTLMFGSYLDDEKNWGLSFYADKPETTKEQLGEFYEALDCLCIPRSDVMYTDWKKDKCEPLEKQHEKERKQEEGES

SEQ ID NO: 56650 - protein, 354 aa, Homo sapiens
MMSYLKQPPYGMNGLGLAGPAMDLLHPSVGYPATPRKQRRERTTFTRSQLDVLEALFAKTRYPDIFMREEVALKINLPESRVQVWFKNRRAKCRQQQQSGSGTKSRPAKKKSSPVRESSGSESSGQFTPPAVSSSASSSSSASSSSANPAAAAAAGLGGNPVAAASSLSTPAASSIWSPASISPGSAPASVSVPEPLAAPSNTSCMQRSVAAGAATAAASYPMSYGQGGSYGQGYPTPSSSYFGGVDCSSYLAPMHSHHHPHQLSPMAPSSMAGHHHHHPHAHHPLSQSSGHHHHHHHHHHQGYGGSGLAFNSADCLDYKEPGAAAASSAWKLNFNSPDCLDYKDQASWRFQVL

SEQ ID NO: 56651 - protein, 354 aa, Homo sapiens; identical to SEQ ID NO: 56650

SEQ ID NO: 56652 - protein, 297 aa, Homo sapiens
MMSYLKQPPYAVNGLSLTTSGMDLLHPSVGYPGPWASCPAATPRKQRRERTTFTRAQLDVLEALFAKTRYPDIFMREEVALKINLPESRVQVWFKNRRAKCRQQQQQQQNGGQNKVRPAKKKTSPAREVSSESGTSGQFTPPSSTSVPTIASSSAPVSIWSPASISPLSDPLSTSSSCMQRSYPMTYTQASGYSQGYAGSTSYFGGMDCGSYLTPMHHQLPGPGATLSPMGTNAVTSHLNQSPASLSTQGYGASSLGFNSTTDCLDYKDQTASWKLNFNADCLDYKDQTSSWKFQVL

SEQ ID NO: 56653 - protein, 289 aa, Homo sapiens
MMSYLKQPPYAVNGLSLTTSGMDLLHPSVGYPATPRKQRRERTTFTRAQLDVLEALFAKTRYPDIFMREEVALKINLPESRVQVWFKNRRAKCRQQQQQQQNGGQNKVRPAKKKTSPAREVSSESGTSGQFTPPSSTSVPTIASSSAPVSIWSPASISPLSDPLSTSSSCMQRSYPMTYTQASGYSQGYAGSTSYFGGMDCGSYLTPMHHQLPGPGATLSPMGTNAVTSHLNQSPASLSTQGYGASSLGFNSTTDCLDYKDQTASWKLNFNADCLDYKDQTSSWKFQVL

SEQ ID NO: 56654 - protein, 239 aa, Homo sapiens
MMSYLKQPPYAVNGLSLTTSGMDLLHPSVGYPGPWASCPAATPRKQRRERTTFTRAQLDVLEALFAKTRYPDIFMREEVALKINLPESRVQVWFKNRRAKCRQQQQQQQNGGQNKVRPAKKKTSPAREVSSESGTSGQFTPPSSTSVPTIASSSAPVSIWSPASISPLSDPLSTSSSCMQRSYPMTYTQASGYSQGYAGSTSYFGGMDCGSYLTPMHHQLPGPGATLSPMGTNAVTSHL

SEQ ID NO: 56655 - protein, 289 aa, Homo sapiens; identical to SEQ ID NO: 56653

SEQ ID NO: 56656 - protein, 163 aa, Homo sapiens
MMSYLKQPPYAVNGLSLTTSGMDLLHPSVGYPATPRKQRRERTTFTRAQLDVLEALFAKTRYPDIFMREEVALKINLPESRVQVWFKNRRAKCRQQQQQQQNGGQNKVRPAKKKTSPAREVSSESGTSGQFTPPSSTSVPTIASSSAPVSIWSPASISPLSDP

SEQ ID NO: 56657 - protein, 325 aa, Homo sapiens
MLSHADLLDARLGMKDAAELLGHREAVKCRLGVGGSDPGGHPGDLAPNSDPVEGATLLPGEDITTVGSTPASLAVSAKDPDKQPGPQGGPNPSQAGQQQGQQKQKRHRTRFTPAQLNELERSFAKTHYPDIFMREELALRIGLTESRVQVWFQNRRAKWKKRKKTTNVFRAPGTLLPTPGLPQFPSAAAAAAAAMGDSLCSFHANDTRWAAAAMPGVSQLPLPPALGRQQAMAQSLSQCSLAAGPPPNSMGLSNSLAGSNGAGLQSHLYQPAFPGMVPASLPGPSNVSGSPQLCSSPDSSDVWRGTSIASLRRKALEHTVSMSFT

SEQ ID NO: 56658 - protein, 335 aa, Homo sapiens
MPAVLGFEGSANKIGVGVVRDGKVLANPRRTYVTPPGTGFLPGDTARHHRAVILDLLQEALTESGLTSQDIDCIAYTKGPGMGAPLVSVAVVARTVAQLWNKPLVGVNHCIGHIEMGRLITGATSPTVLYVSGGNTQVIAYSEHRYRIFGETIDIAVGNCLDRFARVLKISNDPSPGYNIEQMAKRGKKLVELPYTVKGMDVSFSGILSFIEDVAHRMLATGECTPEDLCFSLQETVFAMLVEITERAMAHCGSQEALIVGGVGCNVRLQEMMATMCQERGARLFATDERFCIDNGAMIAQAGWEMFRAGHRTPLSDSGVTQRYRTDEVEVTWRD

SEQ ID NO: 56659 - protein, 286 aa, Homo sapiens
MALVLILQLLTLWPLCHTDITPSVAIIVPPASYHPKPWLGAQPATVVTPGVNVTLRCRAPQPAWRFGLFKPGEIAPLLFRDVSSELAEFFLEEVTPAQGGIYRCCYRRPDWGPGVWSQPSDVLELLVTEELPRPSLVALPGPVVGPGANVSLRCAGRLRNMSFVLYREGVAAPLQYRHSAQPWADFTLLGARAPGTYSCYYHTPSAPYVLSQRSEVLVISWEGEGPEARPASSAPGMQAPGPPPSDPGAQAPSLSSFRPRGLVLQPLLPQTQDSWDPAPPPSDPGV

SEQ ID NO: 56660 - protein, 282 aa, Homo sapiens
MALVLILQLLTLWPLCHTDITPSVPPASYHPKPWLGAQPATVVTPGVNVTLRCRAPQPAWRFGLFKPGEIAPLLFRDVSSELAEFFLEEVTPAQGGIYRCCYRRPDWGPGVWSQPSDVLELLVTEELPRPSLVALPGPVVGPGANVSLRCAGRLRNMSFVLYREGVAAPLQYRHSAQPWADFTLLGARAPGTYSCYYHTPSAPYVLSQRSEVLVISWEGEGPEARPASSAPGMQAPGPPPSDPGAQAPSLSSFRPRGLVLQPLLPQTQDSWDPAPPPSDPGV

SEQ ID NO: 56661 - protein, 252 aa, Homo sapiens
MALVLILQLLTLFPPASYHPKPWLGAQPATVVTPGVNVTLRCRAPQPAWRFGLFKPGEIAPLLFRDVSSELAEFFLEEVTPAQGGIYRCCYRRPDWGPGVWSQPSDVLELLVTEELPRPSLVALPGPVVGPGANVSLRCAGRLRNMSFVLYREGVAAPLQYRHSAQPWADFTLLGARAPGTYSCYYHTPSAPYVLSQRSEVLVISWEDSGSSDYTRGNLVRLGLAGLVLISLGALVTFDWRSQNRAPAGIRP

SEQ ID NO: 56662 - protein, 267 aa, Homo sapiens
MALVLILQLLTLWPLCHTDITPSVAIIVPPASYHPKPWLGAQPATVVTPGVNVTLRCRAPQPAWRFGLFKPGEIAPLLFRDVSSELAEFFLEEVTPAQGGIYRCCYRRPDWGPGVWSQPSDVLELLVTEELPRPSLVALPGPVVGPGANVSLRCAGRLRNMSFVLYREGVAAPLQYRHSAQPWADFTLLGARAPGTYSCYYHTPSAPYVLSQRSEVLVISWEDSGSSDYTRGNLVRLGLAGLVLISLGALVTFDWRSQNRAPAGIRP

SEQ ID NO: 56663 - protein, 263 aa, Homo sapiens
MALVLILQLLTLWPLCHTDITPSVPPASYHPKPWLGAQPATVVTPGVNVTLRCRAPQPAWRFGLFKPGEIAPLLFRDVSSELAEFFLEEVTPAQGGIYRCCYRRPDWGPGVWSQPSDVLELLVTEELPRPSLVALPGPVVGPGANVSLRCAGRLRNMSFVLYREGVAAPLQYRHSAQPWADFTLLGARAPGTYSCYYHTPSAPYVLSQRSEVLVISWEDSGSSDYTRGNLVRLGLAGLVLISLGALVTFDWRSQNRAPAGIRP

SEQ ID NO: 56664 - protein, 214 aa, Homo sapiens
MSKPPPKPVKPGQVKVFRALYTFEPRTPDELYFEEGDIIYITDMSDTNWWKGTSKGRTGLIPSNYVAEQAESIDNPLHEAAKRGNLSWLRECLDNRVGVNGLDKAGSTALYWACHGGHKDIVEMLFTQPNIELNQQNKLGDTALHAAAWKGYADIVQLLLAKGARTDLRNIEKKLAFDMATNAACASLLKKKQGTDAVRTLSNAEDYLDDEDSD

SEQ ID NO: 56665 - protein, 298 aa, Homo sapiens
MKTLQSTLLLLLLVPLIKPAPPTQQDSRIIYDYGTDNFEESIFSQDYEDKYLDGKNIKEKETVIIPNEKSLQLQKDEAITPLPPKKENDEMPTCLLCVCLSGSVYCEEVDIDAVPPLPKESAYLYARFNKIKKLTAKDFADIPNLRRLDFTGNLIEDIEDGTFSKLSLLEELSLAENQLLKLPVLPPKLTLFNAKYNKIKSRGIKANAFKKLNNLTFLYLDHNALESVPLNLPESLRVIHLQFNNIASITDDTFCKANDTSYIRDRIEEIRLEGNPIVLGKHPNSFICLKRLPIGSYF

SEQ ID NO: 56666 - protein, 298 aa, Homo sapiens; identical to SEQ ID NO: 56665

SEQ ID NO: 56667 - protein, 268 aa, Homo sapiens
MLAKISTTWKLFLKLLGPEILLSSLKSRHSFSHSPSHLGLMHRHEHLLRKTTKNFKTATTTLQSTLLLLLLVPLIKPAPPTQQDSRIIYDYGTDNFEESIFSQDYEDKYLDGKNIKEKETVIIPNEKSLQLQKDEAITPLPPKKENDEMPTCLLCVCLSGSVYCEEVDIDAVPPLPKESAYLYARFNKIKKLTAKDFADIPNLRRLDFTGNLIEDIEDGTFSKLSLLEELSLAENQLLKLPVLPPKLTLFNAKYNKIKSRGIKANAFK

SEQ ID NO: 56668 - protein, 613 aa, Homo sapiens
MAAETLLSSLLGLLLLGLLLPASLTGGVGSLNLEELSEMRYGIEILPLPVMGGQSQSSDVVIVSSKYKQRYECRLPAGAIHFQREREEETPAYQGPGIPELLSPMRDAPCLLKTKDWWTYEFCYGRHIQQYHMEDSEIKGEVLYLGYYQSAFDWDDETAKASKQHRLKRYHSQTYGNGSKCDLNGRPREAEVRFLCDEGAGISGDYIDRVDEPLSCSYVLTIRTPRLCPHPLLRPPPSAAPQAILCHPSLQPEEYMAYVQRQAVDSKQYGDKIIEELQDLGPQVWSETKSGVAPQKMAGASPTKDDSKDSDFWKMLNEPEDQAPGGEEVPAEEQDPSPEAADSASGAPNDFQNNVQVKVIRSPADLIRFIEELKGGTKKGKPNIGQEQPVDDAAEVPQREPEKERGDPERQREMEEEEDEDEDEDEDEDERQLLGEFEKELEGILLPSDRDRLRSEVKAGMERELENIIQETEKELDPDGLKKESERDRAMLALTSTLNKLIKRLEEKQSPELVKKHKKKRVVPKKPPPSPQPTGKIEIKIVRPWAEGTEEGARWLTDEDTRNLKEIFFNILVPGAEEAQKERQRQKELESNYRRVWGSPGGEGTGDLDEFDF

SEQ ID NO: 56669 - protein, 652 aa, Homo sapiens
MAAETLLSSLLGLLLLGLLLPASLTGGVGSLNLEELSEMRYGIEILPLPVMGGQSQSSDVVIVSSKYKQRYECRLPAGAIHFQREREEETPAYQGPGIPELLSPMRDAPCLLKTKDWWTYEFCYGRHIQQYHMEDSEIKGEVLYLGYYQSAFDWDDETAKASKQHRLKRYHSQTYGNGSKCDLNGRPREAEVRFLCDEGAGISGDYIDRVDEPLSCSYVLTIRTPRLCPHPLLRPPPSAAPQAILCHPSLQPEEYMAYVQRQADSKQYGDKIIEELQDLGPQVWSETKSGVAPQKMAGASPTKDDSKDSDFWKMLNEPEDQAPGGEEVPAEEQDPSPEAADSASGAPNDFQNNVQVKVIRSPADLIRFIEELKGGTKKGKPNIGQEQPVDDAAEVPQREPEKERGDPERQREMEEEEDEDEDEDEDEDERQLLGEFEKELEGILLPSDRDRLRSETEKELDPDGLKKESERDRAMLALTSTLNKLIKRLEEKQSPELVKKHKKKRVVPKKPPPSPQPTEEDPEHRVRVRVTKLRLGGPNQDLTVLEMKRENPQLKQIEGLVKELLEREGLTAAGKIEIKIVRPWAEGTEEGARWLTDEDTRNLKEIFFNILVPGAEEAQKERQRQKELESNYRRVWGSPGGEGTGDLDEFDF

SEQ ID NO: 56670 - protein, 560 aa, Homo sapiens
MAAETLLSSLLGLLLLGLLLPASLTGGVGSLNLEELSEMRYGIEILPLPVMGGQSQSSDVVIVSSKYKQRYECRLPAGAIHFQREREEETPAYQGPGIPELLSPMRDAPCLLKTKDWWTYEFCYGRHIQQYHMEDSEIKGEFLCDEGAGISGDYIDRVDEPLSCSYVLTIRTPRLCPHPLLRPPPSAAPQAILCHPSLQPEEYMAYVQRQADSKQYGDKIIEELQDLGPQVWSETKSGVAPQKMAGASPTKDDSKDSDFWKMLNEPEDQAPGGEEVPAEEQDPSPEAADSASGAPNDFQNNVQVKVIRSPADLIRFIEELKGGTKKGKPNIGQEQPVDDAAEVPQREPEKERGDPERQREMEEEEDEDEDEDEDEDERQLLGEFEKELEGILLPSDRDRLRSEVKAGMERELENIIQETEKELDPDGLKKESERDRAMLALTSTLNKLIKRLEEKQSPELVKKHKKKRVVPKKPPPSPQPTGKIEIKIVRPWAEGTEEGARWLTDEDTRNLKEIFFNILVPGAEEAQKERQRQKELESNYRRVWGSPGGEGTGDLDEFDF

SEQ ID NO: 56671 - protein, 580 aa, Homo sapiens
MAAETLLSSLLGLLLLGLLLPASLTGGVGSLNLEELSEMRYGIEILPLPVMGGQSQSSDVVIVSSKYKQRYECRLPAGAIHFQREREEETPAYQGPGIPELLSPMRDAPCLLKTKDWWTYEFCYGRHIQQYHMEDSEIKGEVLYLGYYQSAFDWDDETAKFLCDEGAGISGDYIDRVDEPLSCSYVLTIRTPRLCPHPLLRPPPSAAPQAILCHPSLQPEEYMAYVQRQAVDSKQYGDKIIEELQDLGPQVWSETKSGVAPQKMAGASPTKDDSKDSDFWKMLNEPEDQAPGGEEVPAEEQDPSPEAADSASGAPNDFQNNVQVKVIRSPADLIRFIEELKGGTKKGKPNIGQEQPVDDAAEVPQREPEKERGDPERQREMEEEEDEDEDEDEDEDERQLLGEFEKELEGILLPSDRDRLRSEVKAGMERELENIIQETEKELDPDGLKKESERDRAMLALTSTLNKLIKRLEEKQSPELVKKHKKKRVVPKKPPPSPQPTGKIEIKIVRPWAEGTEEGARWLTDEDTRNLKEIFFNILVPGAEEAQKERQRQKELESNYRRVWGSPGGEGTGDLDEFDF

SEQ ID NO: 56672 - protein, 667 aa, Homo sapiens
MAAETLLSSLLGLLLLGLLLPASLTGGVGSLNLEELSEMRYGIEILPLPVMGGQSQSSDVVIVSSKYKQRYECRLPAGAIHFQREREEETPAYQGPGIPELLSPMRDAPCLLKTKDWWTYEFCYGRHIQQYHMEDSEIKGEVLYLGYYQSAFDWDDETAKASKQHRLKRYHSQTYGNGSKCDLNGRPREAEVRFLCDEGAGISGDYIDRVDEPLSCSYVLTIRTPRLCPHPLLRPPPSAAPQAILCHPSLQPEEYMAYVQRQADSKQYGDKIIEELQDLGPQVWSETKSGVAPQKMAGASPTKDDSKDSDFWKMLNEPEDQAPGGEEVPAEEQDPSPEAADSASGAPNDFQNNVQVKVIRSPADLIRFIEELKGGTKKGKPNIGQEQPVDDAAEVPQREPEKERGDPERQREMEEEEDEDEDEDEDEDERQLLGEFEKELEGILLPSDRDRLRSEVKAGMERELENIIQETEKELDPDGLKKESERDRAMLALTSTLNKLIKRLEEKQSPELVKKHKKKRVVPKKPPPSPQPTEEDPEHRVRVRVTKLRLGGPNQDLTVLEMKRENPQLKQIEGLVKELLEREGLTAAGKIEIKIVRPWAEGTEEGARWLTDEDTRNLKEIFFNILVPGAEEAQKERQRQKELESNYRRVWGSPGGEGTGDLDEFDF

SEQ ID NO: 56673 - protein, 597 aa, Homo sapiens
MAAETLLSSLLGLLLLGLLLPASLTGGVGSLNLEELSEMRYGIEILPLPVMGGQSQSSDVVIVSSKYKQRYECRLPAGAIHFQREREEETPAYQGPGIPELLSPMRDAPCLLKTKDWWTYEFCYGRHIQQYHMEDSEIKGEVLYLGYYQSAFDWDDETAKASKQHRLKRYHSQTYGNGSKCDLNGRPREAEVRFLCDEGAGISGDYIDRVDEPLSCSYVLTIRTPRLCPHPLLRPPPSAAPQAILCHPSLQPEEYMAYVQRQADSKQYGDKIIEELQDLGPQVWSETKSGVAPQKMAGASPTKDDSKDSDFWKMLNEPEDQAPGGEEVPAEEQDPSPEAADSASGAPNDFQNNVQVKVIRSPADLIRFIEELKGGTKKGKPNIGQEQPVDDAAEVPQREPEKERGDPERQREMEEEEDEDEDEDEDEDERQLLGEFEKELEGILLPSDRDRLRSETEKELDPDGLKKESERDRAMLALTSTLNKLIKRLEEKQSPELVKKHKKKRVVPKKPPPSPQPTGKIEIKIVRPWAEGTEEGARWLTDEDTRNLKEIFFNILVPGAEEAQKERQRQKELESNYRRVWGSPGGEGTGDLDEFDF

SEQ ID NO: 56674 - protein, 612 aa, Homo sapiens
MAAETLLSSLLGLLLLGLLLPASLTGGVGSLNLEELSEMRYGIEILPLPVMGGQSQSSDVVIVSSKYKQRYECRLPAGAIHFQREREEETPAYQGPGIPELLSPMRDAPCLLKTKDWWTYEFCYGRHIQQYHMEDSEIKGEVLYLGYYQSAFDWDDETAKASKQHRLKRYHSQTYGNGSKCDLNGRPREAEVRFLCDEGAGISGDYIDRVDEPLSCSYVLTIRTPRLCPHPLLRPPPSAAPQAILCHPSLQPEEYMAYVQRQADSKQYGDKIIEELQDLGPQVWSETKSGVAPQKMAGASPTKDDSKDSDFWKMLNEPEDQAPGGEEVPAEEQDPSPEAADSASGAPNDFQNNVQVKVIRSPADLIRFIEELKGGTKKGKPNIGQEQPVDDAAEVPQREPEKERGDPERQREMEEEEDEDEDEDEDEDERQLLGEFEKELEGILLPSDRDRLRSEVKAGMERELENIIQETEKELDPDGLKKESERDRAMLALTSTLNKLIKRLEEKQSPELVKKHKKKRVVPKKPPPSPQPTGKIEIKIVRPWAEGTEEGARWLTDEDTRNLKEIFFNILVPGAEEAQKERQRQKELESNYRRVWGSPGGEGTGDLDEFDF

SEQ ID NO: 56675 - protein, 1153 aa, Homo sapiens
MSQEPTTYSLFLFLFLSHGVSSYTVPNSRQDLHPLLQNMAEEIIDGSYLNALLDLIQFQSSHVWTDDLSHRVLAYLNSRNVAFTIPSLQAAVENHLEQRLHQPQKLLEDLRKTDAQQFRTAMKCLLEDKKDGLDLKDIIIDLGEIRERALQSPGVNRSLFLITLERCFQMLNSLECVEILGKVLRGSSGSFLQPDITERLPRDLREDAFKNLSAVFKDLYDKTSAHSQRALYSWMTGILQTSSNATDDSASWVSAEHLWVLGRYMVHLSFEEITKISPIEIGLFISYDNATKQLDMVYDITPELAQAFLERISSSNFNMRNTSTIHRQAHELWALEPFPKMLGLLVCFYNDLELLDATVAQVLLYQMIKCSHLRGFQAGVQKLKAELLDIAMENQTLNETLGSLSDAVVGLTYSQLESLSPEAVHGAISTLNQVSGWAKSQVIILSAKYLAHEKVLSFYNVSQMGALLAGVSTQAFCSMKRKDISQVLRSAVSQYVSDLSPAQQQGILSKMVQAEDTAPGIVEIQGAFFKEVSLFDLRRQPGFNSTVLKDKELGRSQALFLYELLLKTTRRPEELLSAGQLVKGVTCSHIDAMSTDFFLAHFQDFQNNFALLSPYQVNCLAWKYWEVSRLSMPPFLLAALPARYLASVPASQCVPFLISLGKSWLDSLVLDSHKKTSVLRKVQQCLDDSIADEYTVDIMGNLLCHLPAAIIDRGISPRAWATALHGLRDCPDLNPEQKAAVRLKLLGQYGLPQHWTAETTKDLGPFLVLFSGDELSSIATKFPEILLQAASKMARTLPTKEFLWAVFQSVRNSSDKIPSYDPMPGCHGVVAPSSDDIFKLAEANACWALEDLRCMEEDTFIRTVELLGAVQGFSRPQLMTLKEKAIQVWDMPSYWREHHIVSLGRIALALNESELEQLDLSSIDTVASLSWQTEWTPGQAESILQGYLDDSGYSIQDLKSFHLVGLGATLCAINITEIPLIKISEFRVVVARIGTLLCSTHVLAEFKRKAEVVFGDPTEWTSSVLQELGTIAAGLTKAELRMLDKDLMPYFQPSAIKCLPDEIFKELSAEQIASLGPENAAAVTHAQRRRLSPLQLQSLQQALDGAKTHSWQDAPASAGPTRTSSSRSPAGALQSWGLWLGCPLLVLMAKLLW

SEQ ID NO: 56676 - protein, 548 aa, Homo sapiens
PRAVWVEARGGAQHPTMRRTAPLHRGTWSKMSIILRARYLASVPASQCVPFLISLGKSWLDSLVLDSHKKTSVLRKVQQCLDDSIADEYTVDIMGNLLCHLPAAIIDRGISPRAWATALHGLRDCPDLNPEQKAAVRLKLLGQYGLPQHWTAETTKDLGPFLVLFSGDELSSIATKFPEILLQAASKMARTLPTKEFLWAVFQSVRNSSDKIPSYDPMPGCHGVVAPSSDDIFKLAEANACWALEDLRCMEEDTFIRTVELLGAVQGFSRPQLMTLKEKAIQVWDMPSYWREHHIVSLGRIALALNESELEQLDLSSIDTVASLSWQTEWTPGQAESILQGYLDDSGYSIQDLKSFHLVGLGATLCAINITEIPLIKISEFRVVVARIGTLLCSTHVLAEFKRKAEVVFGDPTEWTSSVLQELGTIAAGLTKAELRMLDKDLMPYFQPSAIKCLPDEIFKELSAEQIASLGPENAAAVTHAQRRRLSPLQLQSLQQALDGAKTHSWQDAPASAGPTRTSSSRSPAGALQSWGLWLGCPLLVLMAKLLW

SEQ ID NO: 56677 - protein, 1060 aa, Homo sapiens
MGNSITYRDQAAVENHLEQRLHQPQKLLEDLRKTDAQQFRTAMKCLLEDKKDGLDLKDIIIDLGEIRERALQSPGVNRSLFLITLERCFQMLNSLECVEILGKVLRGSSGSFLQPDITERLPRDLREDAFKNLSAVFKDLYDKTSAHSQRALYSWMTGILQTSSNATDDSASWVSAEHLWVLGRYMVHLSFEEITKISPIEIGLFISYDNATKQLDMVYDITPELAQAFLERISSSNFNMRNTSTIHRLGLLVCFYNDLELLDATVAQVLLYQMIKCSHLRGFQAGVQKLKAELLDIAMENQTLNETLGSLSDAVVGLTYSQLESLSPEAVHGAISTLNQVSGWAKSQVIILSAKYLAHEKVLSFYNVSQMGALLAGVSTQAFCSMKRKDISQVLRSAVSQYVSDLSPAQQQGILSKMVQAEDTAPGIVEIQGAFFKEVSLFDLRRQPGFNSTVLKDKELGRSQALFLYELLLKTTRRPEELLSAGQLVKGVTCSHIDAMSTDFFLAHFQDFQNNFALLSPYQVNCLAWKYWEVSRLSMPPFLLAALPARYLASVPASQCVPFLISLGKSWLDSLVLDSHKKTSVLRKVQQCLDDSIADEYTVDIMGNLLCHLPAAIIDRGISPRAWATALHGLRDCPDLNPEQKAAVRLKLLGQYGLPQHWTAETTKDLGPFLVLFSGDELSSIATKFPEILLQAASKMARTLPTKEFLWAVFQSVRNSSDKIPSYDPMPGCHGVVAPSSDDIFKLAEANACWALEDLRCMEEDTFIRTVELLGAVQGFSRPQLMTLKEKAIQVWDMPSYWREHHIVSLGRIALALNESELEQLDLSSIDTVASLSWQTEWTPGQAESILQGYLDDSGYSIQDLKSFHLVGLGATLCAINITEIPLIKISEFRVVVARIGTLLCSTHVLAEFKRKAEVVFGDPTEWTSSVLQELGTIAAGLTKAELRMLDKDLMPYFQPSAIKCLPDEIFKELSAEQIASLGPENAAAVTHAQRRRLSPLQLQSLQQALDGAKTHSWQDAPASAGPTRTSSSRSPAGALQSWGLWLGCPLLVLMAKLLW

SEQ ID NO: 56678 - protein, 815 aa, Homo sapiens
MFRLGLLVCFYNDLELLDATVAQVLLYQMIKCSHLRGFQAGVQKLKAELLDIAMENQTLNETLGSLSDAVVGLTYSQLESLSPEAVHGAISTLNQVSGWAKSQVIILSAKYLAHEKVLSFYNVSQMGALLAGVSTQAFCSMKRKDISQVLRSAVSQYVSDLSPAQQQGILSKMVQAEDTAPGIVEIQGAFFKEVSLFDLRRQPGFNSTVLKDKELGRSQALFLYELLLKTTRRPEELLSAGQLVKGVTCSHIDAMSTDFFLAHFQDFQNNFALLSPYQVNCLAWKYWEVSRLSMPPFLLAALPARYLASVPASQCVPFLISLGKSWLDSLVLDSHKKTSVLRKVQQCLDDSIADEYTVDIMGNLLCHLPAAIIDRGISPRAWATALHGLRDCPDLNPEQKAAVRLKLLGQYGLPQHWTAETTKDLGPFLVLFSGDELSSIATKFPEILLQAASKMARTLPTKEFLWAVFQSVRNSSDKIPSYDPMPGCHGVVAPSSDDIFKLAEANACWALEDLRCMEEDTFIRTVELLGAVQGFSRPQLMTLKEKAIQVWDMPSYWREHHIVSLGRIALALNESELEQLDLSSIDTVASLSWQTEWTPGQAESILQGYLDDSGYSIQDLKSFHLVGLGATLCAINITEIPLIKISEFRVVVARIGTLLCSTHVLAEFKRKAEVVFGDPTEWTSSVLQELGTIAAGLTKAELRMLDKDLMPYFQPSAIKCLPDEIFKELSAEQIASLGPENAAAVTHAQRRRLSPLQLQSLQQALDGAKTHSWQDAPASAGPTRTSSSRSPAGALQSWGLWLGCPLLVLMAKLLW

SEQ ID NO: 56679 - protein, 1139 aa, Homo sapiens
MSQEPTTYSLFLFLFLSHGVSSYTVPNSRQDLHPLLQNMAEEIIDGSYLNALLDLIQFQSSHVWTDDLSHRVLAYLNSRNVAFTIPSLQAAVENHLEQRLHQPQKLLEDLRKTDAQQFRTAMKCLLEDKKDGLDLKDIIIDLGEIRERALQSPGVNRSLFLITLERCFQMLNSLECVEILGKVLRGSSGSFLQPDITERLPRDLREDAFKNLSAVFKDLYDKTSAHSQRALYSWMTGILQTSSNATDDSASWVSAEHLWVLGRYMVHLSFEEITKISPIEIGLFISYDNATKQLDMVYDITPELAQAFLERISSSNFNMRNTSTIHRLGLLVCFYNDLELLDATVAQVLLYQMIKCSHLRGFQAGVQKLKAELLDIAMENQTLNETLGSLSDAVVGLTYSQLESLSPEAVHGAISTLNQVSGWAKSQVIILSAKYLAHEKVLSFYNVSQMGALLAGVSTQAFCSMKRKDISQVLRSAVSQYVSDLSPAQQQGILSKMVQAEDTAPGIVEIQGAFFKEVSLFDLRRQPGFNSTVLKDKELGRSQALFLYELLLKTTRRPEELLSAGQLVKGVTCSHIDAMSTDFFLAHFQDFQNNFALLSPYQVNCLAWKYWEVSRLSMPPFLLAALPARYLASVPASQCVPFLISLGKSWLDSLVLDSHKKTSVLRKVQQCLDDSIADEYTVDIMGNLLCHLPAAIIDRGISPRAWATALHGLRDCPDLNPEQKAAVRLKLLGQYGLPQHWTAETTKDLGPFLVLFSGDELSSIATKFPEILLQAASKMARTLPTKEFLWAVFQSVRNSSDKIPSYDPMPGCHGVVAPSSDDIFKLAEANACWALEDLRCMEEDTFIRTVELLGAVQGFSRPQLMTLKEKAIQVWDMPSYWREHHIVSLGRIALALNESELEQLDLSSIDTVASLSWQTEWTPGQAESILQGYLDDSGYSIQDLKSFHLVGLGATLCAINITEIPLIKISEFRVVVARIGTLLCSTHVLAEFKRKAEVVFGDPTEWTSSVLQELGTIAAGLTKAELRMLDKDLMPYFQPSAIKCLPDEIFKELSAEQIASLGPENAAAVTHAQRRRLSPLQLQSLQQALDGAKTHSWQDAPASAGPTRTSSSRSPAGALQSWGLWLGCPLLVLMAKLLW

SEQ ID NO: 56680 - protein, 477 aa, Homo sapiens
MIAFLLTSVLMIPHAGGHPLDTPHLPQELPPGLPNNINITFFSGMFKNVESVAEIFDCLGPHFTWLQAVFTNFPVLIQFVNGMKCVAGLCPRDFEDYGCTCRFEMEGLPVDESDSCCFQHRRCYEEAAEMDCLQDPAKLSTEVNCVSKKIICESKDNCEHLLCTCDKAAIECLARSSLNSSLNLLDTSFCLAQTPETTIKEDLTTLLPRVVPVEPTDTSLTALSGEEAGHDQEGVGAARATSPPGSAEIVATRVTAKIVTLVPAGIKSLGLAVSSVENDPEETTEKACDRFTFLHLGSGDNMQVMPQLGEMLFCLTSRCPEEFESYGCYCGQEGRGEPRDDLDRCCLSHHCCLEQVRRLGCLLERLPWSPVVCVDHTPKCGGQSLCEKLLCACDQTAAECMTSASFNQSLKSPSRLGCPGQPAACEDSLHPVPAAPTLGSSSEEDSEEDPPQEDLGRAKRFLRKSLGPLGIGPLHGR

SEQ ID NO: 56681 - protein, 493 aa, Homo sapiens
MIAFLLTSVLMIPHAGGHPLDTPHLPQELPPGLPNNINITFFSGMFKNVESVAEIFDCLGPHFTWLQAVFTNFPVLIQFVNGMKCVAGLCPRDFEDYGCTCRFEMEGLPVDESDSCCFQHRRCYEEAAEMDCLQDPAKLSTEVNCVSKKIICESKDNCEHLLCTCDKAAIECLARSSLNSSLNLLDTSFCLAQTPETTIKEDLTTLLPRVVPVEPTDTSLTALSGEVAAETEADRLITLSKKKAGHDQEGVGAARATSPPGSAEIVATRVTAKIVTLVPAGIKSLGLAVSSVENDPEETTEKACDRFTFLHLGSGDNMQVMPQLGEMLFCLTSRCPEEFESYGCYCGQEGRGEPRDDLDRCCLSHHCCLEQVRRLGCLLERLPWSPVVCVDHTPKCGGQSLCEKLLCACDQTAAECMTSASFNQSLKSPSRLGCPGQPAACEDSLHPVPAAPTLGSSSEEDSEEDPPQEDLGRAKRFLRKSLGPLGIGPLHGR

SEQ ID NO: 56682 - protein, 1997 aa, Homo sapiens
MALLIHLKTVSELRGRGDRIAKVTFRGQSFYSRVLENCEDVADFDETFRWPVASSIDRNEMLEIQVFNYSKVFSNKLIGTFRMVLQKVVEESHVEVTDTLIDDNNAIIKTSLCVEVRYQATDGTVGSWDDGDFLGDESLQEEEKDSQETDGLLPGSRPSSRPPGEKSFRRAGRSVFSAMKLGKNRSHKEEPQRPDEPAVLEMEDLDHLAIRLGDGLDPDSVSLASVTALTTNVSNKRSKPDIKMEPSAGRPMDYQVSITVIEARQLVGLNMDPVVCVEVGDDKKYTSMKESTNCPYYNEYFVFDFHVSPDVMFDKIIKISVIHSKNLLRSGTLVGSFKMDVGTVYSQPEHQFHHKWAILSDPDDISSGLKGYVKCDVAVVGKGDNIKTPHKANETDEDDIEGNLLLPEGVPPERQWARFYVKIYRAEGLPRMNTSLMANVKKAFIGENKDLVDPYVQVFFAGQKGKTSVQKSSYEPLWNEQVVFTDLFPPLCKRMKVQIRDSDKVNDVAIGTHFIDLRKISNDGDKGFLPTLGPAWVNMYGSTRNYTLLDEHQDLNEGLGEGVSFRARLLLGLAVEIVDTSNPELTSSTEVQVEQATPISESCAGKMEEFFLFGAFLEASMIDRRNGDKPITFEVTIGNYGNEVDGLSRPQRPRPRKEPGDEEEVDLIQNASDDEAGDAGDLASVSSTPPMRPQVTDRNYFHLPYLERKPCIYIKSWWPDQRRRLYNANIMDHIADKLEEGLNDIQEMIKTEKSYPERRLRGVLEELSCGCCRFLSLADKDQGHSSRTRLDRERLKSCMRELENMGQQARMLRAQVKRHTVRDKLRLCQNFLQKLRFLADEPQHSIPDIFIWMMSNNKRVAYARVPSKDLLFSIVEEETGKDCAKVKTLFLKLPGKRGFGSAGWTVQAKVELYLWLGLSKQRKEFLCGLPCGFQEVKAAQGLGLHAFPPVSLVYTKKQAFQLRAHMYQARSLFAADSSGLSDPFARVFFINQSQCTEVLNETLCPTWDQMLVFDNLELYGEAHELRDDPPIIVIEIYDQDSMGKADFMGRTFAKPLVKMADEAYCPPRFPPQLEYYQIYRGNATAGDLLAAFELLQIGPAGKADLPPINGPVDVDRGPIMPVPMGIRPVLSKYRVEVLFWGLRDLKRVNLAQVDRPRVDIECAGKGVQSSLIHNYKKNPNFNTLVKWFEVDLPENELLHPPLNIRVVDCRAFGRYTLVGSHAVSSLRRFIYRPPDRSAPSWNTTVRLLRRCRVLCNGGSSSHSTGEVVVTMEPEVPIKKLETMVKLDATSEAVVKVDVAEEEKEKKKKKKGTAEEPEEEEPDESMLDWWSKYFASIDTMKEQLRQQEPSGIDLEEKEEVDNTEGLKGSMKGKEKARAAKEEKKKKTQSSGSGQGSEAPEKKKPKIDELKVYPKELESEFDNFEDWLHTFNLLRGKTGDDEDGSTEEERIVGRFKGSLCVYKVPLPEDVSREAGYDSTYGMFQGIPSNDPINVLVRVYVVRATDLHPADINGKADPYIAIRLGKTDIRDKENYISKQLNPVFGKSFDIEASFPMESMLTVAVYDWDLVGTDDLIGETKIDLENRFYSKHRATCGIAQTYSTHGYNIWRDPMKPSQILTRLCKDGKVDGPHFGPPGRVKVANRVFTGPSEIEDENGQRKPTDEHVALLALRHWEDIPRAGCRLVPEHVETRPLLNPDKPGIEQGRLELWVDMFPMDMPAPGTPLDISPRKPKKYELRVIIWNTDEVVLEDDDFFTGEKSSDIFVRGWLKGQQEDKQDTDVHYHSLTGEGNFNWRYLFPFDYLAAEEKIVISKKESMFSWDETEYKIPARLTLQIWDADHFSADDFLGAIELDLNRFPRGAKTAKQCTMEMATGEVDVPLVSIFKQKRVKGWWPLLARNENDEFELTGKVEAELHLLTAEEAEKNPVGLARNEPDPLEKPNRPDTSFIWFLNPLKSARYFLWHTYRWLLLKLLLLLLLLLLLALFLYSVPGYLVKKILGA

SEQ ID NO: 56683 - protein, 1230 aa, Homo sapiens
MIKTEKSYPERRLRGVLEELSCGCCRFLSLADKDQGHSSRTRLDRERLKSCMRELENMGQQARMLRAQVKRHTVRDKLRLCQNFLQKLRFLADEPQHSIPDIFIWMMSNNKRVAYARVPSKDLLFSIVEEETGKDCAKVKTLFLKLPGKRGFGSAGWTVQAKVELYLWLGLSKQRKEFLCGLPCGFQEVKAAQGLGLHAFPPVSLVYTKKQAFQLRAHMYQARSLFAADSSGLSDPFARVFFINQSQCTEVLNETLCPTWDQMLVFDNLELYGEAHELRDDPPIIVIEIYDQDSMGKADFMGRTFAKPLVKMADEAYCPPRFPPQLEYYQIYRGNATAGDLLAAFELLQIGPAGKADLPPINGPVDVDRGPIMPVPMGIRPVLSKYRVEVLFWGLRDLKRVNLAQVDRPRVDIECAGKGVQSSLIHNYKKNPNFNTLVKWFEVDLPENELLHPPLNIRVVDCRAFGRYTLVGSHAVSSLRRFIYRPPDRSAPSWNTTGEVVVTMEPEVPIKKLETMVKLDATSEAVVKVDVAEEEKEKKKKKKGTAEEPEEEEPDESMLDWWSKYFASIDTMKEQLRQQEPSGIDLEEKEEVDNTEGLKGSMKGKEKARAAKEEKKKKTQSSGSGQGSEAPEKKKPKIDELKVYPKELESEFDNFEDWLHTFNLLRGKTGDDEDGSTEEERIVGRFKGSLCVYKVPLPEDVSREAGYDSTYGMFQGIPSNDPINVLVRVYVVRATDLHPADINGKADPYIAIRLGKTDIRDKENYISKQLNPVFGKSFDIEASFPMESMLTVAVYDWDLVGTDDLIGETKIDLENRFYSKHRATCGIAQTYSTHGYNIWRDPMKPSQILTRLCKDGKVDGPHFGPPGRVKVANRVFTGPSEIEDENGQRKPTDEHVALLALRHWEDIPRAGCRLVPEHVETRPLLNPDKPGIEQGRLELWVDMFPMDMPAPGTPLDISPRKPKKYELRVIIWNTDEVVLEDDDFFTGEKSSDIFVRGWLKGQQEDKQDTDVHYHSLTGEGNFNWRYLFPFDYLAAEEKIVISKKESMFSWDETEYKIPARLTLQIWDADHFSADDFLGAIELDLNRFPRGAKTAKQCTMEMATGEVDVPLVSIFKQKRVKGWWPLLARNENDEFELTGKVEAELHLLTAEEAEKNPVGLARNEPDPLEKPNRPDTSFIWFLNPLKSARYFLWHTYRWLLLKLLLLLLLLLLLALFLYSVPGYLVKKILGA

SEQ ID NO: 56684 - protein, 1230 aa, Homo sapiens
MIKTEKSYPERRLRGVLEELSCGCCRFLSLADKDQGHSSRTRLDRERLKSCMRELENMGQQARMLRAQVKRHTVRDKLRLCQNFLQKLRFLADEPQHSIPDIFIWMMSNNKRVAYARVPSKDLLFSIVEEETGKDCAKVKTLFLKLPGKRGFGSAGWTVQAKVELYLWLGLSKQRKEFLCGLPCGFQEVKAAQGLGLHAFPPVSLVYTKKQAFQLRAHMYQARSLFAADSSGLSDPFARVFFINQSQCTEVLNETLCPTWDQMLVFDNLELYGEAHELRDDPPIIVIEIYDQDSMGKADFMGRTFAKPLVKMADEAYCPPRFPPQLEYYQIYRGNATAGDLLAAFELLQIGPAGKADLPPINGPVDVDRGPIMPVPMGIRPVLSKYRVEVLFWGLRDLKRVNLAQVDRPRVDIECAGKGVQSSLIHNYKKNPNFNTLVKWFEVDLPENELLHPPLNIRVVDCRAFGRYTLVGSHAVSSLRRFIYRPPDRSAPSWNTTGEVVVTMEPEVPIKKLETMVKLDATSEAVVKVDVAEEEKEKKKKKKGTAEEPEEEEPDESMLDWWSKYFASIDTMKEQLRQQEPSGIDLEEKEEVDNTEGLKGSMKGKEKARAAKEEKKKKTQSSGSGQGSEAPEKKKPKIDELKVYPKELESEFDNFEDWLHTFNLLRGKTGDDEDGSTEEERIVGRFKGSLCVYKVPLPEDVSREAGYDSTYGMFQGIPSNDPINVLVRVYVVRATDLHPADINGKADPYIAIRLGKTDIRDKENYISKQLNPVFGKSFDIEASFPMESMLTVAVYDWDLVGTDDLIGETKIDLENRFYSKHRATCGIAQTYSTHGYNIWRDPMKPSQILTRLCKDGKVDGPHFGPPGRVKVANRVFTGPSEIEDENGQRKPTDEHVALLALRHWEDIPRAGCRLVPEHVETRPLLNPDKPGIEQGRLELWVDMFPMDMPAPGTPLDISPRKPKKYELRVIIWNTDEVVLEDDDFFTGEKSSDIFVRGWLKGQQEDKQDTDVHYHSLTGEGNFNWRYLFPFDYLAAEEKIVISKKESMFSWDETEYKIPARLTLQIWDADHFSADDFLGAIELDLNRFPRGAKTAKQCTMEMATGEVDVPLVSIFKQKRVKGWWPLLARNENDEFELTGKVEAELHLLTAEEAEKNPVGLARNEPDPLEKPNRPDTAFVWFLNPLKSIKYLICTRYKWLIIKIVLALLGLLMLGLFLYSLPGYMVKKLLGA

SEQ ID NO: 56685 - protein, 77 aa, Homo sapiens
EAEKNPVGLARNEPDPLEKPNRPDTAFVWFLNPLKSIKYLICTRYKWLIIKIVLALGCSCWGPLQPPWLHGQKAPWG

SEQ ID NO: 56686 - protein, 113 aa, Homo sapiens
DFLGDESLQEEEKDSQETDGLLPGSRPSSRPPGEKSFRSKGREKTKGGRDDEHKAGRSVFSAMKLGKNRSHKEEPQRPDEPAVLEMEDLDHLAIRLGDGLDPDSVSLASVTAL

SEQ ID NO: 56687 - protein, 1307 aa, Homo sapiens
MMTDTQDGPSESSQIMRSLTPLINREEAFGEAGEAGLWPSITHTPDSQEEGLNDIQEMIKTEKSYPERRLRGVLEELSCGCCRFLSLADKDQGHSSRTRLDRERLKSCMRELENMGQQARMLRAQVKRHTVRDKLRLCQNFLQKLRFLADEPQHSIPDIFIWMMSNNKRVAYARVPSKDLLFSIVEEETGKDCAKVKTLFLKLPGKRGFGSAGWTVQAKVELYLWLGLSKQRKEFLCGLPCGFQEVKAAQGLGLHAFPPVSLVYTKKQAFQLRAHMYQARSLFAADSSGLSDPFARVFFINQSQCTEVLNETLCPTWDQMLVFDNLELYGEAHELRDDPPIIVIEIYDQDSMGKADFMGRTFAKPLVKMADEAYCPPRFPPQLEYYQIYRGNATAGDLLAAFELLQIGPAGKADLPPINGPVDVDRGPIMPVPMGIRPVLSKYRVEVLFWGLRDLKRVNLAQVDRPRVDIECAGKGVQSSLIHNYKKNPNFNTLVKWFEVDLPENELLHPPLNIRVVDCRAFGRYTLVGSHAVSSLRRFIYRPPDRSAPSWNTTVRLLRRCRVLCNGGSSSHSTGEVVVTMEPEVPIKKLETMVKLDATSEAVVKVDVAEEEKEKKKKKKGTAEEPEEEEPDESMLDWWSKYFASIDTMKEQLRQQEPSGIDLEEKEEVDNTEGLKGSMKGKEKARAAKEEKKKKTQSSGSGQGSEAPEKKKPKIDELKVYPKELESEFDNFEDWLHTFNLLRGKTGDDEDGSTEEERIVGRFKGSLCVYKVPLPEDVSREAGYDSTYGMFQGIPSNDPINVLVRVYVVRATDLHPADINGKADPYIAIRLGKTDIRDKENYISKQLNPVFGKSFDIEASFPMESMLTVAVYDWDLVGTDDLIGETKIDLENRFYSKHRATCGIAQTYSTHGYNIWRDPMKPSQILTRLCKDGKVDGPHFGPPGRVKVANRVFTGPSEIEDENGQRKPTDEHVALLALRHWEDIPRAGCRLVPEHVETRPLLNPDKPGIEQGRLELWVDMFPMDMPAPGTPLDISPRKPKKYELRVIIWNTDEVVLEDDDFFTGEKSSDIFVRGWLKGQQEDKQDTDVHYHSLTGEGNFNWRYLFPFDYLAAEEKIVISKKESMFSWDETEYKIPARLTLQIWDADHFSADDFLGAIELDLNRFPRGAKTAKQCTMEMATGEVDVPLVSIFKQKRVKGWWPLLARNENDEFELTGKVEAELHLLTAEEAEKNPVGLARNEPDPLEKPNRPDTSFIWFLNPLKSARYFLWHTYRWLLLKLLLLLLLLLLLALFLYSVPGYLVKKILGA

SEQ ID NO: 56688 - protein, 1508 aa, Homo sapiens
MFPARGVPLHLEGEGVFPWGPGDVSLPYLSTSDVSFSVIVENVNCYSSGMICRKFISINVGNSLIVFDDDSGNPSPESFLDDKQEVHTWRVGFFTLVHFPQEHITLLWDQRTTVHVQAGPQWQGQLAGLCGNFDLKTINEMRTPENLELTNPQEFGSSWAAVECPDTLDPRDMCVLNPLREPFAKKECSILLSEVFEICHPVVDVTWFYSNCLTDTCGCSQGGDCECFCASVSAYAHQCCQHGVAVDWRTPRLCLLGKGPYQLSSLAAGGALVGMKAVGDDIVLVRTEDVAPADIVSFLLTAALYKAKAHDPDVVSLEAADRPNFFLHVTANGSLELAKWQGRDTFQQHASFLLHRGTRQAGLVALESLAKPSSFLYVSGAVLALRLYEHTEVFRRGTLFRLLDAKPSGAAYPICEWRYDACASPCFQTCRDPRAASCRDVPRVEGCVPVCPTPQVLDEVTQRCVYLEDCVEPAVWVPTEALGNETLPPSQGLPTPSDEEPQLSQESPRTPTHRPALTPAAPLTTALNPPVTATEEPVVSPGPTQTTLQQPLELTASQLPAGPTESPASKGVTASLLAIPHTPESSSLPVALQTPTPGMVSGAMETTRVTVIFAGSPNITVSSRSPPAPRFPLMTKAVTVRGHGSLPVRTTPPQPSLTASPSSRPVASPGAISRSPTSSGSHKAVLTPAVTKVISRTGVPQPTQAQSASSPSTPLTVAGTAAEQVPVSPLATRSLEIVLSTEKGEAGHSQPMGSPASPQPHPLPSAPPRPAQHTTMATRSPALPPETPAAASLSTATDGLAATPFMSLESTRPSQLLSGLPPDTSLPLAKVGTSAPVATPGPKASVITTPLQPQATTLPAQTLSPVLPFTPAAMTQAHPPTHIAPPAAGTAPGLLLGATLPTSGVLPVAEGTASMVSVVPRKSTTGKVAILSKQVSLPTSMYGSAEGGPTELTPATSHPLTPLVAEPEGAQAGTALPVPTSYALSRVSARTAPQDSMLVLLPQLAEAHGTSAGPHLAAEPVDEATTEPSGRSAPALSIVEGLAEALATTTEANTSTTCVPIAEQDCVRHICLEGQLIRVNQSQHCPQGAAPPRCGILGLAVRVGGDRCCPLWECACRCSIFPDLSFVTFDGSHVALFKEAIYILSQSPDEMLTVHVLDCKSANLGHLNWPPFCLVMLNMTHLAHQVTIDRFNRKVTVDLQPVWPPVSRYGFRIEDTGHMYMILTPSDIQIQWLHSSGLMIVEASKTSKAQGHGLCGICDGDAANDLTLKDGSVVGGAEDPAPFLDSWQVPSSLTSVGQTRFRPDSCATTDCSPCLRMVSNRTFSACHRFVPPESFCELWIRDTKYVQQPCVALTVYVAMCHKFHVCIEWRRSDYCPFLCSSDSTYQACVTACEPPKTCQDGILGPLDPEHCQVLGEGCVCSEGTILHRRHSALCIPEAKCACGDCPDSIPECQEGEALTVHRNTTELCCPLYQCVCENFRCPQVQCGLGTALVEVWSPDRCCPYKSCG

SEQ ID NO: 56689 - protein, 2925 aa, Homo sapiens
MGVLASALCWLLCVWLPWGEQAAESLRVQRLGERVVDSGRSGARGMRNVKGMRNGPAQTRVSSSSSHQEATLAMGDKATVVGGQQAEAPDSVAMSSWERRLHRAKCAPSYLFSCFNGGECVHPAFCDCRRFNATGPRCQMVYNAGPERDSICRAWGQHHVETFDGLYYYLSGKGSYTLVGRHEPEGQSFSIQVHNDPQCGSSPYTCSRAVSLFFVGEQEIHLAKEVTHGGMRVQLPHVMGSARLQQLAGYVIVRHQSAFTLAWDGASAVYIKMSPELLGWTHGLCGNNNADPKDDLVTSSGKLTDDVVEFVHSWQEQAPNQPPGPTTSSLPRPPCLQQNPGTMQGVYEQCEALLRPPFDACHAYVSPLPFTASCTSDLCQSMGDVATWCRALAEYARACAQAGRPLQGWRTQLRQCTVHCKEKAFTYNECIACCPASCHPRASCVDSEIACVDGCYCPNGLIFEDGGCVAPAECPCEFHGTLYPPGSVVKEDCNTCTCTSGKWECSTAVCPAECSVTGDIHFTTFDGRRYTFPATCQYILAKSRSSGTFTVTLQNAPCGLNQDGACVQSVSVILHQDPRRQVTLTQAGDVLLFDQYKIIPPYTDDAFEIRRLSSVFLRVRTNVGVRVLYDREGLRLYLQVDQRWVEDTVGLCGTFNGNTQDDFLSPVGVPESTPQLFGNSWKTLSACSPLVSGSPLDPCDVHLQAASYSVQACSVLTGEMFAPCSAFLSPVPYFEQCRRDACRCGQPCLCATLAHYAHLCRRHGLPVDFRARLPACALSCEASKEYSPCVAPCGRTCQDLASPEACGVDGGDDLSRDECVEGCACPPDTYLDTQADLCVPRNQCSCHFQGVDYPPGDSDIPSLGHCHCKDGVMSCDSRAPAAACPAGQVFVNCSDLHTDLELSRERTCEQQLLNLSVSARGPCLSGCACPQGLLRHGDACFLPEECPCTWKGKEYFPGDQVMSPCHTCVCQRGSFQCTLHPCASTCTAYGDRHYRTFDGLPFDFVGACKVHLVKSTSDVSFSVIVENVNCYSSGMICRKFISINVGNSLIVFDDDSGNPSPESFLDDKQEVHTWRVGFFTLVHFPQEHITLLWDQRTTVHVQAGPQWQGQLAGLCGNFDLKTINEMRTPENLELTNPQEFGSSWAAVECPDTLDPRDMCVLNPLREPFAKKECSILLSEVFEICHPVVDVTWFYSNCLTDTCGCSQGGDCECFCASVSAYAHQCCQHGVAVDWRTPRLCPYDCDFFNKVLGKGPYQLSSLAAGGALVGMKAVGDDIVLVRTEDVAPADIVSFLLTAALYKAKAHDPDVVSLEAADRPNFFLHVTANGSLELAKWQGRDTFQQHASFLLHRGTRQAGLVALESLAKPSSFLYVSGAVLALRLYEHTEVFRRGTLFRLLDAKPSGAAYPICEWRYDACASPCFQTCRDPRAASCRDVPRVEGCVPVCPTPQVLDEVTQRCVYLEDCVEPAVWVPTEALGNETLPPSQGLPTPSDEEPQLSQESPRTPTHRPALTPAAPLTTALNPPVTATEEPVVSPGPTQTTLQQPLELTASQLPAGPTESPASKGVTASLLAIPHTPESSSLPVALQTPTPGMVSGAMETTRVTVIFAGSPNITVSSRSPPAPRFPLMTKAVTVRGHGSLPVRTTPPQPSLTASPSSRPVASPGAISRSPTSSGSHKAVLTPAVTKVISRTGVPQPTQAQSASSPSTPLTVAGTAAEQVPVSPLATRSLEIVLSTEKGEAGHSQPMGSPASPQPHPLPSAPPRPAQHTTMATRSPALPPETPAAASLSTATDGLAATPFMSLESTRPSQLLSGLPPDTSLPLAKVGTSAPVATPGPKASVITTPLQPQATTLPAQTLSPVLPFTPAAMTQAHPPTHIAPPAAGTAPGLLLGATLPTSGVLPVAEGTASMVSVVPRKSTTGKVAILSKQVSLPTSMYGSAEGGPTELTPATSHPLTPLVAEPEGAQAGTALPVPTSYALSRVSARTAPQDSMLVLLPQLAEAHGTSAGPHLAAEPVDEATTEPSGRSAPALSIVEGLAEALATTTEANTSTTCVPIAEQDCVRHICLEGQLIRVNQSQHCPQGAAPPRCGILGLAVRVGGDRCCPLWECACRCSIFPDLSFVTFDGSHVALFKEAIYILSQSPDEMLTVHVLDCKSANLGHLNWPPFCLVMLNMTHLAHQVTIDRFNRKVTVDLQPVWPPVSRYGFRIEDTGHMYMILTPSDIQIQWLHSSGLMIVEASKTSKAQGHGLCGICDGDAANDLTLKDGSVVGGAEDPAPFLDSWQVPSSLTSVGQTRFRPDSCATTDCSPCLRMVSNRTFSACHRFVPPESFCELWIRDTKYVQQPCVALTVYVAMCHKFHVCIEWRRSDYCPFLCSSDSTYQACVTACEPPKTCQDGILGPLDPEHCQVLGEGCVCSEGTILHRRHSALCIPEAKCACTDSMGVPRALGETWNSSLSGCCQHQCQAPDTIVPVDLGCPSPRPESCLRFGEVALLLPTKDPCCLGTVCVCNQTLCEGLAPTCRPGHRLLTHFQEDSCCPSYSCECDPDLCEAELVPSCRQDQILITGRLGDSCCTSYFCACGDCPDSIPECQEGEALTVHRNTTELCCPLYQCVCENFRCPQVQCGLGTALVEVWSPDRCCPYKSCECDCDTIPVPRCHLWEKSQLDEEFMHSVENVCGCAKYECVKAPVCLSRELGVMQPGQTVVELSADGVCHTSRCTTVLDPLTNFYQINTTSVLCDIHCEANQEYEHPRDLAACCGSCRNVSCLFTFPNGTTSLFLPGASWIADCARHHCSSTPLGAVLVRSPISCPPLNETECAKVGGSVVPSLEGCCRTCKEDGRSCKKVTIRMTIRKNECRSSTPVNLVSCDGRCPSASIYNYNINTYARFCKCCREVGLQRRSVQLFCATNATWVPYTVQEPTDCACQWS

SEQ ID NO: 56690 - protein, 128 aa, Homo sapiens
MARILLLFLPGLVAVCAVHGIFMDRLASKKLCADDECVYTISLASAQEDYNAPDCRFINVKKGQQIYVYSKLVKENGAGEFWAGSVYGDGQDEMGVVGYFPRNLVKEQRVYQEATKEVPTTDIDFFCE

SEQ ID NO: 56691 - protein, 481 aa, Homo sapiens
MQLYSSVCTHYPAGAPGPTAAAPAPPAAATPFKVSLQPPGAAGAAPEPETGECQPAAAAEHREAAAVPAAKMPAFSSCFEVVSGAAAPASAAAGPPGASCKPPLPPHYTSTAQITVRALGADRLLLHGPDPVPGAAGSAAAPRGRCLLLAPAPAAPVPPRRGSSAWLLEELLRPDCPEPAGLDATREGPDRNFRLSEHRQALAAAKHRGPAATPGSPDPGPGPWGEEHLAERGPRGWERGGDRCDAPGGDAARRPDPEAEAPPAGSIEAAPSSAAEPVIVSRSDPRDEKLALYLAEVEKQDKYLRQRNKYRFHIIPDGNCLYRAVSKTVYGDQSLHRELREQTVHYIADHLDHFSPLIEGDVGEFIIAAAQDGAWAGYPELLAMGQMLNVNIHLTTGGRLESPTVSTMIHYLGPEDSLRPSIWLSWLSNGHYDAVFDHSYPNPEYDNWCKQTQVQRKRDEELAKSMAISLSKMYIEQNACS

SEQ ID NO: 56692 - protein, 398 aa, Homo sapiens
MSRKQAAKSRPGSGSRKAEAERKRDERAARRALAKERRNRPESGGGGGCEEEFVSFANQLQALGLKLREVPGDGNCLFRALGDQLEGHSRNHLKHRQETVDYMIKQREDFEPFVEDDIPFEKHVASLAKPGTFAGNDAIVAFARNHQLNVVIHQLNAPLWQIRGTEKSSVRELHIAYRYGEHYDSVRRINDNSEAPAHLQTDFQMLHQDESNKREKIKTKGMDSEDDLRDEVEDAVQKVCNATGCSDFNLIVQNLEAENYNIESAIIAVLRMNQGKRNNAEENLEPSGRVLKQCGPLWEEGGSGARIFGNQGLNEGRTENNKAQASPSEENKANKNQLAKVTNKQRREQQWMEKKKRQEERHRHKALESRGSHRDNNRSEAEANTQVTLVKTFAALNI

SEQ ID NO: 56693 - protein, 145 aa, Homo sapiens
MACIHYLRENREKFEAFIEGSFEEYLKRLENPQEWVGQVEISALSLMYRKDFIIYREPNVSPSQVTENNFPEKVLLCFSNGNHYDIVYPIKYKESSAMCQSLLYELLYEKVFKTDVSKIVMELDTLEVADEDNSEISDSEDDSCK

SEQ ID NO: 56694 - protein, 1114 aa, Homo sapiens
MEAAVGVPDGGDQGGAGPREDATPMDAYLRKLGLYRKLVAKDGSCLFRAVAEQVLHSQSRHVEVRMACIHYLRENREKFEAFIEGSFEEYLKRLENPQEWVGQVEISALSLMYRKDFIIYREPNVSPSQVTENNFPEKVLLCFSNGNHYDIVYPIKYKESSAMCQSLLYELLYEKVFKTDVSKIVMELDTLEVADEDNSEISDSEDDSCKSKTAAAAADVNGFKPLSGNEQLKNNGNSTSLPLSRKVLKSLNPAVYRNVEYEIWLKSKQAQQKRDYSIAAGLQYEVGDKCQVRLDHNGKFLNADVQGIHSENGPVLVEELGKKHTSKNLKAPPPESWNTVSGKKMKKPSTSGQNFHSDVDYRGPKNPSKPIKAPSALPPRLQHPSGVRQHAFSSHSSGSQSQKFSSEHKNLSRTPSQIIRKPDRERVEDFDHTSRESNYFGLSPEERREKQAIEESRLLYEIQNRDEQAFPALSSSSVNQSASQSSNPCVQRKSSHVGDRKGSRRRMDTEERKDKDSIHGHSQLDKRPEPSTLENITDDKYATVSSPSKSKKLECPSPAEQKPAEHVSLSNPAPLLVSPEVHLTPAVPSLPATVPAWPSEPTTFGPTGVPAPIPVLSVTQTLTTGPDSAVSQAHLTPSPVPVSIQAVNQPLMPLPQTLSLYQDPLYPGFPCNEKGDRAIVPPYSLCQTGEDLPKDKNILRFFFNLGVKAYSCPMWAPHSYLYPLHQAYLAACRMYPKVPVPVYPHNPWFQEAPAAQNESDCTCTDAHFPMQTEASVNGQMPQPEIGPPTFSSPLVIPPSQVSESHGQLSYQADLESETPGQLLHADYEESLSGKNMFPQPSFGPNPFLGPVPIAPPFFPHVWYGYPFQGFIENPVMRQNIVLPSDEKGELDLSLENLDLSKDCGSVSTVDEFPEARGEHVHSLPEASVSSKPDEGRTEQSSQTRKADTALASIPPVAEGKAHPPTQILNRERETVPVELEPKRTIQSLKEKTEKVKDPKTAADVVSPGANSVDSRVQRPKEESSEDENEVSNILRSGRSKQFYNQTYGSRKYKSDWGYSGRGGYQHVRSEESWKGQPSRSRDEGYQYHRNVRGRPFRGDRRRSGMGDGHRGQHT

SEQ ID NO: 56695 - protein, 1049 aa, Homo sapiens
MACIHYLRENREKFEAFIEGSFEEYLKRLENPQEWVGQVEISALSLMYRKDFIIYREPNVSPSQVTENNFPEKVLLCFSNGNHYDIVYPIKYKESSAMCQSLLYELLYEKVFKTDVSKIVMELDTLEVADEDNSEISDSEDDSCKSKTAAAAADVNGFKPLSGNEQLKNNGNSTSLPLSRKVLKSLNPAVYRNVEYEIWLKSKQAQQKRDYSIAAGLQYEVGDKCQVRLDHNGKFLNADVQGIHSENGPVLVEELGKKHTSKNLKAPPPESWNTVSGKKMKKPSTSGQNFHSDVDYRGPKNPSKPIKAPSALPPRLQHPSGVRQHAFSSHSSGSQSQKFSSEHKNLSRTPSQIIRKPDRERVEDFDHTSRESNYFGLSPEERREKQAIEESRLLYEIQNRDEQAFPALSSSSVNQSASQSSNPCVQRKSSHVGDRKGSRRRMDTEERKDKDSIHGHSQLDKRPEPSTLENITDDKYATVSSPSKSKKLECPSPAEQKPAEHVSLSNPAPLLVSPEVHLTPAVPSLPATVPAWPSEPTTFGPTGVPAPIPVLSVTQTLTTGPDSAVSQAHLTPSPVPVSIQAVNQPLMPLPQTLSLYQDPLYPGFPCNEKGDRAIVPPYSLCQTGEDLPKDKNILRFFFNLGVKAYSCPMWAPHSYLYPLHQAYLAACRMYPKVPVPVYPHNPWFQEAPAAQNESDCTCTDAHFPMQTEASVNGQMPQPEIGPPTFSSPLVIPPSQVSESHGQLSYQADLESETPGQLLHADYEESLSGKNMFPQPSFGPNPFLGPVPIAPPFFPHVWYGYPFQGFIENPVMRQNIVLPSDEKGELDLSLENLDLSKDCGSVSTVDEFPEARGEHVHSLPEASVSSKPDEGRTEQSSQTRKADTALASIPPVAEGKAHPPTQILNRERETVPVELEPKRTIQSLKEKTEKVKDPKTAADVVSPGANSVDSRVQRPKEESSEDENEVSNILRSGRSKQFYNQTYGSRKYKSDWGYSGRGGYQHVRSEESWKGQPSRSRDEGYQYHRNVRGRPFRGDRRRSGMGDGHRGQHT

SEQ ID NO: 56696 - protein, 139 aa, Homo sapiens
MACIHYLRENREKFEAFIEGSFEEYLKRLENPQEWVGQVEISALSLMYRKDFIIYREPNVSPSQVTENNFPEKVLLCFSNGNHYDIVYPIKYKESSAMCQSLLYELLYEKVFKTDVSKIVMELDTLEVADEDNSEISDS

SEQ ID NO: 56697 - protein, 145 aa, Homo sapiens; identical to SEQ ID NO: 56693

SEQ ID NO: 56698 - protein, 571 aa, Homo sapiens
MTILPKKKPPPPDADPANEPPPPGPMPPAPRRGGGVGVGGGGTGVGGGDRDRDSGVVGARPRASPPPQGPLPGPPGALHRWALAVPPGAVAGPRPQQASPPPCGGPGGPGGGPGDALGAAAAGVGAAGVVVGVGGAVGVGGCCSGPGHSKRRRQAPGVGAVGGGSPEREEVGAGYNSEDEYEAAAARIEAMDPATVEQQEHWFEKALRDKKGFIIKQMKEDGACLFRAVADQVYGDQDMHEVVRKHCMDYLMKNADYFSNYVTEDFTTYINRKRKNNCHGNHIEMQAMAEMYNRPVEVYQYSTGTSAVEPINTFHGIHQNEDEPIRVSYHRNIHYNSVVNPNKATIGVGLGLPSFKPGFAEQSLMKNAIKTSEESWIEQQMLEDKKRATDWEATNEAIEEQVARESYLQWLRDQEKQARQVRGPSQPRKASATCSSATAAASSGLEEWTSRSPRQRSSASSPEHPELHAELGMKPPSPGTVLALAKPPSPCAPGTSSQFSAGADRATSPLVSLYPALECRALIQQMSPSAFGLNDWDDDEILASVLAVSQQEYLDSMKKNKVHRDPPPDKS

SEQ ID NO: 56699 - protein, 566 aa, Homo sapiens
MTILPKKKPPPPDADPANEPPPPGPMPPAPRRGGGVGVGGGGTGVGGGDRDRDSGVVGARPRASPPPQGPLPGPPGALHRWALAVPPGAVAGPRPQQASPPPCGGPGGPGGGPGDALGAAAAGVGAAGVVVGVGGAVGVGGCCSGPGHSKRRRQAPGVGAVGGGSPEREEVGAGYNSEDEYEAAAARIEAMDPATVEQQEHWFEKALRDKKGFIIKQMKEDGACLFRAVADQVYGDQDMHEVVRKHCMDYLMKNADYFSNYVTEDFTTYINRKRKNNCHGNHIEMQAMAEMYNRPVEVYQYSTEPINTFHGIHQNEDEPIRVSYHRNIHYNSVVNPNKATIGVGLGLPSFKPGFAEQSLMKNAIKTSEESWIEQQMLEDKKRATDWEATNEAIEEQVARESYLQWLRDQEKQARQVRGPSQPRKASATCSSATAAASSGLEEWTSRSPRQRSSASSPEHPELHAELGMKPPSPGTVLALAKPPSPCAPGTSSQFSAGADRATSPLVSLYPALECRALIQQMSPSAFGLNDWDDDEILASVLAVSQQEYLDSMKKNKVHRDPPPDKS

SEQ ID NO: 56700 - protein, 566 aa, Homo sapiens; identical to SEQ ID NO: 56699

SEQ ID NO: 56701 - protein, 349 aa, Homo sapiens
MKEDGACLFRAVADQVYGDQDMHEVVRKHCMDYLMKNADYFSNYVTEDFTTYINRKRKNNCHGNHIEMQAMAEMYNRPVEVYQYSTEPINTFHGIHQNEDEPIRVSYHRNIHYNSVVNPNKATIGVGLGLPSFKPGFAEQSLMKNAIKTSEESWIEQQMLEDKKRATDWEATNEAIEEQVARESYLQWLRDQEKQARQVRGPSQPRKASATCSSATAAASSGLEEWTSRSPRQRSSASSPEHPELHAELGMKPPSPGTVLALAKPPSPCAPGTSSQFSAGADRATSPLVSLYPALECRALIQQMSPSAFGLNDWDDDEILASVLAVSQQEYLDSMKKNKVHRDPPPDKS

SEQ ID NO: 56702 - protein, 542 aa, Homo sapiens
MTILPKKKPPPPDADPGGTGVGGGDRDRDSGVVGARPRASPPPQGPLPGPPGALHRWALAVPPGAVAGPRPQQASPPPCGGPGGPGGGPGDALGAAAAGVGAAGVVVGVGGAVGVGGCCSGPGHSKRRRQAPGVGAVGGGSPEREEVGAGYNSEDEYEAAAARIEAMDPATVEQQEHWFEKALRDKKGFIIKQMKEDGACLFRAVADQVYGDQDMHEVVRKHCMDYLMKNADYFSNYVTEDFTTYINRKRKNNCHGNHIEMQAMAEMYNRPVEVYQYSTEPINTFHGIHQNEDEPIRVSYHRNIHYNSVVNPNKATIGVGLGLPSFKPGFAEQSLMKNAIKTSEESWIEQQMLEDKKRATDWEATNEAIEEQVARESYLQWLRDQEKQARQVRGPSQPRKASATCSSATAAASSGLEEWTSRSPRQRSSASSPEHPELHAELGMKPPSPGTVLALAKPPSPCAPGTSSQFSAGADRATSPLVSLYPALECRALIQQMSPSAFGLNDWDDDEILASVLAVSQQEYLDSMKKNKVHRDPPPDKS

SEQ ID NO: 56703 - protein, 444 aa, Homo sapiens
GVVVGVGGAVGVGGCCSGPGHSKRRRQAPGVGAVGGGSPEREEVGAGYNSEDEYEAAAARIEAMDPATVEQQEHWFEKALRDKKGFIIKQMKEDGACLFRAVADQVYGDQDMHEVVRKHCMDYLMKNADYFSNYVTEDFTTYINRKRKNNCHGNHIEMQAMAEMYNRPVEVYQYSTGTSAVEPINTFHGIHQNEDEPIRVSYHRNIHYNSVVNPNKATIGVGLGLPSFKPGFAEQSLMKNAIKTSEESWIEQQMLEDKKRATDWEATNEAIEEQVARESYLQWLRDQEKQARQVRGPSQPRKASATCSSATAAASSGLEEWTSRSPRQRSSASSPEHPELHAELGMKPPSPGTVLALAKPPSPCAPGTSSQFSAGADRATSPLVSLYPALECRALIQQMSPSAFGLNDWDDDEILASVLAVSQQEYLDSMKKNKVHRDPPPDKS

SEQ ID NO: 56704 - protein, 288 aa, Homo sapiens
MDDPKSEQQRILRRHQRERQELQAQIRSLKNSVPKTDKTKRKQLLQDVARMEAEMAQKHRQELEKFQDDSSIESVVEDLAKMNLENRPPRSSKAHRKRERMESEERERQESIFQAEMSEHLAGFKREEEEKLAAILGARGLEMKAIPADGHCMYRAIQDQLVFSVSVEMLRCRTASYMKKHVDEFLPFFSNPETSDSFGYDDFMIYCDNIVRTTAWGGQLELRALSHVLKTPIEVIQADSPTLIIGEEYVKKPIILVYLRYAYSLGEHYNSVTPLEAGAAGGVLPRLL

SEQ ID NO: 56705 - protein, 323 aa, Homo sapiens
MEPRVRVEGWKVPTSRCRFLLARVLGYLVVMEAVLTEELDEEEQLLRRHRKEKKELQAKIQGMKNAVPKNDKKRRKQLTEDVAKLEKEMEQKHREELEQLKLTTKENKIDSVAVNISNLVLENQPPRISKAQKRREKKAALEKEREERIAEAEIENLTGARHMESEKLAQILAARQLEIKQIPSDGHCMYKAIEDQLKEKDCALTVVALRSQTAEYMQSHVEDFLPFLTNPNTGDMYTPEEFQKYCEDIVNTAAWGGQLELRALSHILQTPIEIIQADSPPIIVGEEYSKKPLILVYMRHAYGLGEHYNSVTRLVNIVTENCS

SEQ ID NO: 56706 - protein, 192 aa, Homo sapiens
MISKEKKAALEKEREERIAEAEIENLTGARHMESEKLAQILAARQLEIKQIPSDGHCMYKAIEDQLKEKDCALTVVALRSQTAEYMQSHVEDFLPFLTNPNTGDMYTPEEFQKYCEDIVNTAAWGGQLELRALSHILQTPIEIIQADSPPIIVGEEYSKKPLILVYMRHAYGLGEHYNSVTRLVNIVTENCS

SEQ ID NO: 56707 - protein, 926 aa, Homo sapiens
MVSSVLPNPTSAECWAALLHDPMTLDMDAVLSDFVRSTGAEPGLARDLLEGKNWDLTAALSDYEQLRQVHTANLPHVFNEGRGPKQPEREPQPGHKVERPCLQRQDDIAQEKRLSRGISHASSAIVSLARSHVASECNNEQFPLEMPIYTFQLPDLSVYSEDFRSFIERDLIEQATMVALEQAGRLNWWSTVCTSCKRLLPLATTGDGNCLLHAASLGMWGFHDRDLVLRKALYTMMRTGAEREALKRRWRWQQTQQNKEEEWEREWTELLKLASSEPRTHFSKNGGTGGGVDNSEDPVYESLEEFHVFVLAHILRRPIVVVADTMLRDSGGEAFAPIPFGGIYLPLEVPPNRCHCSPLVLAYDQAHFSALVSMEQRDQQREQAVIPLTDSEHKLLPLHFAVDPGKDWEWGKDDNDNARLAHLILSLEAKLNLLHSYMNVTWIRIPSETRAPLAQPESPTASAGEDVQSLADSLDSDRDSVCSNSNSNNGKNGKDKEKEKQRKEKDKTRADSVANKLGSFSKTLGIKLKKNMGGLGGLVHGKMGRANSANGKNGDSAERGKEKKAKSRKGSKEESGASASTSPSEKTTPSPTDKAAGASPAEKGGGPRGDAWKYSTDVKLSLNILRAAMQGERKFIFAGLLLTSHRHQFHEEMIGYYLTSAQERFSAEQEQRRRDAATAAAAAAAAAAATAKRPPRRPETEGVPVPERASPGPPTQLVLKLKERPSPGPAAGRAARAAAGGTASPGGGARRASASGPVPGRSPPAPARQSVIHVQASGARDEACAPAVGALRPCATYPQQNRSLSSQSYSPARAAALRTVNTVESLARAVPGALPGAAGTAGAAEHKSQTYTNGFGALRDGLEFADADAPTARSNGECGRGGPGPVQRRCQRENCAFYGRAETEHYCSYCYREELRRRREARGARP

SEQ ID NO: 56708 - protein, 933 aa, Homo sapiens
MVSSVLPNPTSAECWAALLHDPMTLDMDAVLSDFVRSTGAEPGLARDLLEGKNWDLTAALSDYEQLRQVHTANLPHVFNEGRGPKQPEREPQPGHKVERPCLQRQDDIAQEKRLSRGISHASSAIVSLARSHVASECNNEQFPLEMPIYTFQLPDLSVYSEDFRSFIERDLIEQATMVALEQAGRLNWWSTVCTSCKRLLPLATTGDGNCLLHAASLGMWGFHDRDLVLRKALYTMMRTGAEREALKRRWRWQQTQQNKESGLVYTEEEWEREWTELLKLASSEPRTHFSKNGGTGGGVDNSEDPVYESLEEFHVFVLAHILRRPIVVVADTMLRDSGGEAFAPIPFGGIYLPLEVPPNRCHCSPLVLAYDQAHFSALVSMEQRDQQREQAVIPLTDSEHKLLPLHFAVDPGKDWEWGKDDNDNARLAHLILSLEAKLNLLHSYMNVTWIRIPSETRAPLAQPESPTASAGEDVQSLADSLDSDRDSVCSNSNSNNGKNGKDKEKEKQRKEKDKTRADSVANKLGSFSKTLGIKLKKNMGGLGGLVHGKMGRANSANGKNGDSAERGKEKKAKSRKGSKEESGASASTSPSEKTTPSPTDKAAGASPAEKGGGPRGDAWKYSTDVKLSLNILRAAMQGERKFIFAGLLLTSHRHQFHEEMIGYYLTSAQERFSAEQEQRRRDAATAAAAAAAAAAATAKRPPRRPETEGVPVPERASPGPPTQLVLKLKERPSPGPAAGRAARAAAGGTASPGGGARRASASGPVPGRSPPAPARQSVIHVQASGARDEACAPAVGALRPCATYPQQNRSLSSQSYSPARAAALRTVNTVESLARAVPGALPGAAGTAGAAEHKSQTYTNGFGALRDGLEFADADAPTARSNGECGRGGPGPVQRRCQRENCAFYGRAETEHYCSYCYREELRRRREARGARP

SEQ ID NO: 56709 - protein, 110 aa, Homo sapiens
MVSSVLPNPTSAECWAALLHDPMTLDMDAVLSDFVRSTGAEPGLARDLLEGKNWDLTAALSDYEQLRQVHTANLPHVFNEGRGPKQPEREPQPGHKVERPCLQRQDDIAQ

SEQ ID NO: 56710 - protein, 843 aa, Homo sapiens
MTLDMDAVLSDFVRSTGAEPGLARDLLEGKNWDVNAALSDFEQLRQVHAGNLPPSFSEGSGGSRTPEKGFSDREPTRPPRPILQRQDDIVQEKRLSRGISHASSSIVSLARSHVSSNGGGGGSNEHPLEMPICAFQLPDLTVYNEDFRSFIERDLIEQSMLVALEQAGRLNWWVSVDPTSQRLLPLATTGDGNCLLHAASLGMWGFHDRDLMLRKALYALMEKGVEKEALKRRWRWQQTQQNKESGLVYTEDEWQKEWNELIKLASSEPRMHLGTNGANCGGVESSEEPVYESLEEFHVFVLAHVLRRPIVVVADTMLRDSGGEAFAPIPFGGIYLPLEVPASQCHRSPLVLAYDQAHFSALVSMEQKENTKEQAVIPLTDSEYKLLPLHFAVDPGKGWEWGKDDSDNVRLASVILSLEVKLHLLHSYMNVKWIPLSSDAQAPLAQPESPTASAGDEPRSTPESGDSDKESVGSSSTSNEGGRRKEKSKRDREKDKKRADSVANKLGSFGKTLGSKLKKNMGGLMHSKGSKPGGVGTGLGGSSGTETLEKKKKNSLKSWKGGKEEAAGDGPVSEKPPAESVGNGGSKYSQEVMQSLSILRTAMQGEGKFIFVGTLKMGHRHQYQEEMIQRYLSDAEERFLAEQKQKEAERKIMNGGIGGGPPPAKKPEPDAREEQPTGPPAESRAMAFSTGYPGDFTIPRPSGGGVHCQEPRRQLAGGPCVGGLPPYATFPRQCPPGRPYPHQDSIPSLEPGSHSKDGLHRGALLPPPYRVADSYSNGYREPPEPDGWAGGLRGLPPTQTKCKQPNCSFYGHPETNNFCSCCYREELRRREREPDGELLVHRF

SEQ ID NO: 56711 - protein, 427 aa, Homo sapiens
MTLDMDAVLSDFVRSTGAEPGLARDLLEGKNWDVNAALSDFEQLRQVHAGNLPPSFSEGSGGSRTPEKGFSDREPTRPPRPILQRQDDIVQEKRLSRGISHASSSIVSLARSHVSSNGGGGGSNEHPLEMPICAFQLPDLTVYNEDFRSFIERDLIEQSMLVALEQAGRLNWWVSVDPTSQRLLPLATTGDGNCLLHAASLGMWGFHDRDLMLRKALYALMEKGVEKEALKRRWRWQQTQQNKESGLVYTEDEWQKEWNELIKLASSEPRMHLGTNGANCGGVESSEEPVYESLEEFHVFVLAHVLRRPIVVVADTMLRDSGGEAFAPIPFGGIYLPLEVPASQCHRSPLVLAYDQAHFSALVSMEQKENTKEQAVIPLTDSEYKLLPLHFAVDPGKGWEWGKDDSDNVRLASVILSLEVKLHLLHS

SEQ ID NO: 56712 - protein, 814 aa, Homo sapiens
MTLDMDAVLSDFVRSTGAEPGLARDLLEGKNWDVNAALSDFEQLRQVHAGNLPPSFSEGSGGSRTPEKGFSDREPTRPPRPILQRQDDIVQEKRLSRGISHASSSIVSLARSHVSSNGGGGGSNEHPLEMPICAFQLPDLTVYNEDFRSFIERDLIEQSMLVALEQAGRLNWWVSVDPTSQRLLPLATTGDGNCLLHAASLGMWGFHDRDLMLRKALYALMEKGVEKEALKRRWRWQQTQQNKESGLVYTEDEWQKEWNELIKLASSEPRMHLGTNGANCGGVESSEEPVYESLEEFHVFVLAHVLRRPIVVVADTMLRDSGGEAFAPIPFGGIYLPLEVPASQCHRSPLVLAYDQAHFSALVSMEQKENTKEQAVIPLTDSEYKLLPLHFAVDPGKGWEWGKDDSDNVRLASVILSLEVKLHLLHSYMNVKWIPLSSDAQAPLAQPESPTASAGDEPRSTPESGDSDKESVGSSSTSNEGGRRKEKSKRDREKDKKRADSVANKLGSFGKTLGSKLKKNMGGLMHSKGSKPGGVGTGLGGSSGTETLEKKKKNSLKSWKGGKEEAAGDGPVSEKPPAESVGNGGSKYSQEVMQSLSILRTAMQGEGKFIFVGTLKMGHRHQYQEEMIQRYLSDAEERFLAEQKQKEAERKIMNGGIGGGPPPAKKPEPDAREEQPTGPPAESRAMAFSTGYPGDFTIPRPSGGGVHCQEPRRQLAGGPCVGGLPPYATFPRQCPPGRPYPHQDSIPSLEPGSHSKDGLHRGALLPPPYRVADSYSNGYREPPEPDGWAGGLRGLPPTQTKCKQPDGELLVHRF

SEQ ID NO: 56713 - protein, 308 aa, Homo sapiens
MCGVEGCCQGGATRRGSLPGGRQLATRKRSVVRRCLKMAAEEPQQQKQEPLGSDSEGVNCLAYDEAIMAQQDRIQQEIAVQNPLVSERLELSVLYKEYAEDDNIYQQKIKDLHKKYSYIRKTRPDGNCFYRAFGFSHLEALLDDSKELQRFKAVSAKSKEDLVSQGFTEFTIEDFHNTFMDLIEQVEKQTSVADLLASFNDQSTSDYLVVYLRLLTSGYLQRESKFFEHFIEGGRTVKEFCQQEVEPMCKESDHIHIIALAQALSVSIQVEYMDRGEGGTTNPHIFPEGSEPKVYLLYRPGHYDILYK

SEQ ID NO: 56714 - protein, 271 aa, Homo sapiens
MAAEEPQQQKQEPLGSDSEGVNCLAYDEAIMAQQDRIQQEIAVQNPLVSERLELSVLYKEYAEDDNIYQQKIKDLHKKYSYIRKTRPDGNCFYRAFGFSHLEALLDDSKELQRFKAVSAKSKEDLVSQGFTEFTIEDFHNTFMDLIEQVEKQTSVADLLASFNDQSTSDYLVVYLRLLTSGYLQRESKFFEHFIEGGRTVKEFCQQEVEPMCKESDHIHIIALAQALSVSIQVEYMDRGEGGTTNPHIFPEGSEPKVYLLYRPGHYDILYK

SEQ ID NO: 56715 - protein, 271 aa, Homo sapiens; identical to SEQ ID NO: 56714

SEQ ID NO: 56716 - protein, 280 aa, Homo sapiens
MAAEEPQQQKQEPLGSDSEGVNCLAYDEAIMAQQDRIQQEDMTDPCLLQIAVQNPLVSERLELSVLYKEYAEDDNIYQQKIKDLHKKYSYIRKTRPDGNCFYRAFGFSHLEALLDDSKELQRFKAVSAKSKEDLVSQGFTEFTIEDFHNTFMDLIEQVEKQTSVADLLASFNDQSTSDYLVVYLRLLTSGYLQRESKFFEHFIEGGRTVKEFCQQEVEPMCKESDHIHIIALAQALSVSIQVEYMDRGEGGTTNPHIFPEGSEPKVYLLYRPGHYDILYK

SEQ ID NO: 56717 - protein, 234 aa, Homo sapiens
MSETSFNLISEKCDILSILRDHPENRIYRRKIEELSKRFTAIRKTKGDGNCFYRALGYSYLESLLGKSREIFKFKERVLQTPNDLLAAGFEEHKFRNFFNAFYSVVELVEKDGSVSSLLKVFNDQSASDHIVQFLRLLTSAFIRNRADFFRHFIDEEMDIKDFCTHEVEPMATECDHIQITALSQALSIALQVEYVDEMDTALNHHVFPEAATPSVYLLYKTSHYNILYAADKH

SEQ ID NO: 56718 - protein, 73 aa, Homo sapiens
MSETSFNLISEKCDILSILRDHPENRIYRRKIEELSKRFTAIRKTKGDGNCFYRALGYSYLESLLGKSREIFK

SEQ ID NO: 56719 - protein, 250 aa, Homo sapiens
MAALSCLLDSVRRDIKKVDRELRQLRCIDEFSTRCLCDLYMHPYCCCDLHPYPYCLCYSKRSRSCGLCDLYPCCLCDYKLYCLRPSLRSLERKAIRAIEDEKRELAKLRRTTNRILASSCCSSNILGSVNVCGFEPDQVKVRVKDGKVCVSAERENRYDCLGSKKYSYMNICKEFSLPPCVDEKDVTYSYGLGSCVKIESPCYPCTSPCSPCSPCSPCNPCSPCNPCSPYDPCNPCYPCGSRFSCRKMIL

SEQ ID NO: 56720 - protein, 805 aa, Homo sapiens
MKDRSSTPPLHVHVDENTPVHVHIKKLPKPSATSSQKSHKRGMKGDTVNVRRSVRVKTKNPPHCLEITPPSSEKLVSVMRLSDLSTEDDDSGHCKMNRYDKKIDSLMNAVGCLKSEVKMQKGERQMAKRFLEERKEELEEVAHELAETEHENTVLRHNIERMKEEKDFTILQKKHLQQEKECLMSKLVEAEMDGAAAAKQVMALKDTIGKLKTEKQMTCTDINTLTRQKELLLQKLSTFEETNRTLRDLLREQHCKEDSERLMEQQGALLKRLAEADSEKARLLLLLQDKDKEVEELLQEIQCEKAQAKTASELSKSMESMRGHLQAQLRSKEAENSRLCMQIKNLERSGNQHKAEVEAIMEQLKELKQKGDRDKESLKKAIRAQKERAEKSEEYAEQLHVQLADKDLYVAEALSTLESWRSRYNQVVKEKGDLELEIIVLNDRVTDLVNQQQTLEEKMREDRDSLVERLHRQTAEYSAFKLENERLKASFAPMEDKLNQAHLEVQQLKASVKNYEGMIDNYKSQVMKTRLEADEVAAQLERCDKENKILKDEMNKEIEAARRQFQSQLADLQQLPDILKITEAKLAECQDQLQGYERKNIDLTAIISDLRSRIEHQGDKLEMAREKHQASQKENKQLSLKVDELERKLEATSAQNIEFLQVIAKREEAIHQSQLRLEEKTRECGTLARQLESAIEDARRQVEQTKEHALSKERAAQNKILDLETQLSRTKTELSQLRRSRDDADRRYQSRLQDLKDRLEQSESTNRSMQNYVQFLKSSYANVFGDGPYSTFLTSSPIRSRSPPA

SEQ ID NO: 56721 - protein, 824 aa, Homo sapiens
MKDRSSTPPLHVHVDENTPVHVHIKKLPKPSATSSQKSHKRGMKGDTVNVRRSVRVKTKVPWMPPGKSSARPVGCKWENPPHCLEITPPSSEKLVSVMRLSDLSTEDDDSGHCKMNRYDKKIDSLMNAVGCLKSEVKMQKGERQMAKRFLEERKEELEEVAHELAETEHENTVLRHNIERMKEEKDFTILQKKHLQQEKECLMSKLVEAEMDGAAAAKQVMALKDTIGKLKTEKQMTCTDINTLTRQKELLLQKLSTFEETNRTLRDLLREQHCKEDSERLMEQQGALLKRLAEADSEKARLLLLLQDKDKEVEELLQEIQCEKAQAKTASELSKSMESMRGHLQAQLRSKEAENSRLCMQIKNLERSGNQHKAEVEAIMEQLKELKQKGDRDKESLKKAIRAQKERAEKSEEYAEQLHVQLADKDLYVAEALSTLESWRSRYNQVVKEKGDLELEIIVLNDRVTDLVNQQQTLEEKMREDRDSLVERLHRQTAEYSAFKLENERLKASFAPMEDKLNQAHLEVQQLKASVKNYEGMIDNYKSQVMKTRLEADEVAAQLERCDKENKILKDEMNKEIEAARRQFQSQLADLQQLPDILKITEAKLAECQDQLQGYERKNIDLTAIISDLRSRIEHQGDKLEMAREKHQASQKENKQLSLKVDELERKLEATSAQNIEFLQVIAKREEAIHQSQLRLEEKTRECGTLARQLESAIEDARRQVEQTKEHALSKERAAQNKILDLETQLSRTKTELSQLRRSRDDADRRYQSRLQDLKDRLEQSESTNRSMQNYVQFLKSSYANVFGDGPYSTFLTSSPIRSRSPPA

SEQ ID NO: 56722 - protein, 638 aa, Homo sapiens
MSASSSGGSPRFPSCGKNGVTSLTQKKVLRAPCGAPSVTVTKSHKRGMKGDTVNVRRSVRVKTKNPPHCLEITPPSSEKLVSVMRLSDLSTEDDDSGHCKMNRYDKKIDSLMNAVGCLKSEVKMQKGERQMAKRFLEERKEELEEVAHELAETEHENTVLRHNIERMKEEKDFTILQKKHLQQEKECLMSKLVEAEMDGAAAAKQVMALKDTIGKLKTEKQMTCTDINTLTRQKELLLQKLSTFEETNRTLRDLLREQHCKEDSERLMEQQGALLKRLAEADSEKARLLLLLQDKDKEVEELLQEIQCEKAQAKTASELSKSMESMRGHLQAQLRSKEAENSRLCMQIKNLERSGNQHKAEVEAIMEQLKELKQKGDRDKESLKKAIRAQKERAEKSEEYAEQLHVQLADKDLYVAEALSTLESWRSRYNQVVKEKGDLELEIIVLNDRVTDLVNQQQTLEEKMREDRDSLVERLHRQTAEYSAFKLENERLKASFAPMEDKLNQAHLEVQQLKASVKNYEGMIDNYKSQVMKTRLEADEVAAQLERCDKENKILKDEMNKEIEAARRQFQSQLADLQQLPDILKITEAKLAECQDQLQGYERKNIDLTAIISDLRSRVRDWQKGSHELTRAGARIPR

SEQ ID NO: 56723 - protein, 829 aa, Homo sapiens
MSASSSGGSPRFPSCGKNGVTSLTQKKVLRAPCGAPSVTVTKSHKRGMKGDTVNVRRSVRVKTKVPWMPPGKSSARPVGCKWENPPHCLEITPPSSEKLVSVMRLSDLSTEDDDSGHCKMNRYDKKIDSLMNAVGCLKSEVKMQKGERQMAKRFLEERKEELEEVAHELAETEHENTVLRHNIERMKEEKDFTILQKKHLQQEKECLMSKLVEAEMDGAAAAKQVMALKDTIGKLKTEKQMTCTDINTLTRQKELLLQKLSTFEETNRTLRDLLREQHCKEDSERLMEQQGALLKRLAEADSEKARLLLLLQDKDKEVEELLQEIQCEKAQAKTASELSKSMESMRGHLQAQLRSKEAENSRLCMQIKNLERSGNQHKAEVEAIMEQLKELKQKGDRDKESLKKAIRAQKERAEKSEEYAEQLHVQLADKDLYVAEALSTLESWRSRYNQVVKEKGDLELEIIVLNDRVTDLVNQQQTLEEKMREDRDSLVERLHRQTAEYSAFKLENERLKASFAPMEDKLNQAHLEVQQLKASVKNYEGMIDNYKSQVMKTRLEADEVAAQLERCDKENKILKDEMNKEIEAARRQFQSQLADLQQLPDILKITEAKLAECQDQLQGYERKNIDLTAIISDLRSRIEHQGDKLEMAREKHQASQKENKQLSLKVDELERKLEATSAQNIEFLQVIAKREEAIHQSQLRLEEKTRECGTLARQLESAIEDARRQVEQTKEHALSKERAAQNKILDLETQLSRTKTELSQLRRSRDDADRRYQSRLQDLKDRLEQSESTNRSMQNYVQFLKSSYANVFGDGPYSTFLTSSPIRSRSPPA

SEQ ID NO: 56724 - protein, 701 aa, Homo sapiens
MGELPTGCRKRRRKRGGAAARARLHPPRRLHGTTLASDFNDFIRRRFWAQPCRSWFPSCGKNGVTSLTQKKVLRAPCGAPSVTVTKSHKRGMKGDTVNVRRSVRVKTKVPWMPPGKSSARPVGCKWENPPHCLEITPPSSEKLVSVMRLSDLSTEDDDSGHCKMNRYDKKIDSLMNAVGCLKSEVKMQKGERQMAKRFLEERKEELEEVAHELAETEHENTVLRHNIERMKEEKDFTILQKKHLQQEKECLMSKLVEAEMDGAAAAKQVMALKDTIGKLKTEKQMTCTDINTLTRQKELLLQKLSTFEETNRTLRDLLREQHCKEDSERLMEQQGALLKRLAEADSEKARLLLLLQDKDKEVEELLQEIQCEKAQAKTASELSKSMESMRGHLQAQLRSKEAENSRLCMQIKNLERSGNQHKAEVEAIMEQLKELKQKGDRDKESLKKAIRAQKERAEKSEEYAEQLHVQLADKDLYVAEALSTLESWRSRYNQVVKEKGDLELEIIVLNDRVTDLVNQQQTLEEKMREDRDSLVERLHRQTAEYSAFKLENERLKASFAPMEDKLNQAHLEVQQLKASVKNYEGMIDNYKSQVMKTRLEADEVAAQLERCDKENKILKDEMNKEIEAARRQFQSQLADLQQLPDILKITEAKLAECQDQLQGYERKNIDLTAIISDLRSRVRDWQKGSHELTRAGARIPR

SEQ ID NO: 56725 - protein, 657 aa, Homo sapiens
MADQQGPHQNRFPSCGKNGVTSLTQKKVLRAPCGAPSVTVTKSHKRGMKGDTVNVRRSVRVKTKVPWMPPGKSSARPVGCKWENPPHCLEITPPSSEKLVSVMRLSDLSTEDDDSGHCKMNRYDKKIDSLMNAVGCLKSEVKMQKGERQMAKRFLEERKEELEEVAHELAETEHENTVLRHNIERMKEEKDFTILQKKHLQQEKECLMSKLVEAEMDGAAAAKQVMALKDTIGKLKTEKQMTCTDINTLTRQKELLLQKLSTFEETNRTLRDLLREQHCKEDSERLMEQQGALLKRLAEADSEKARLLLLLQDKDKEVEELLQEIQCEKAQAKTASELSKSMESMRGHLQAQLRSKEAENSRLCMQIKNLERSGNQHKAEVEAIMEQLKELKQKGDRDKESLKKAIRAQKERAEKSEEYAEQLHVQLADKDLYVAEALSTLESWRSRYNQVVKEKGDLELEIIVLNDRVTDLVNQQQTLEEKMREDRDSLVERLHRQTAEYSAFKLENERLKASFAPMEDKLNQAHLEVQQLKASVKNYEGMIDNYKSQVMKTRLEADEVAAQLERCDKENKILKDEMNKEIEAARRQFQSQLADLQQLPDILKITEAKLAECQDQLQGYERKNIDLTAIISDLRSRVRDWQKGSHELTRAGARIPR

SEQ ID NO: 56726 - protein, 189 aa, Homo sapiens
MKDRSSTPPLHVHVDENTPVHVHIKKLPKPSATSSQKSHKRGMKGDTVNVRRSVRVKTKVKMQKGERQMAKRFLEERKEELEEVAHELAETEHENTVLRHNIERMKEEKDFTILQKKHLQQEKECLMSKLVEAEMDGAAAAKQVMALKDTIGKLKTEKQMTCTDINTLTRQKELLLQKLSTFEETNRTL

SEQ ID NO: 56727 - protein, 205 aa, Homo sapiens
MSASSSGGSPRFPSCGKNGVTSLTQKKVLRAPCGAPSVTVTKSHKRGMKGDTVNVRRSVRVKTKVKMQKGERQMAKRFLEERKEELEEVAHELAETEHENTVLRHNIERMKEEKDFTILQKKHLQQEKECLMSKLVEAEMDGAAAAKQVMALKDTIGKLKTEKQMTCTDINTLTRQKELLLQKLSTFEETNRTLRDLLREQHCKE

SEQ ID NO: 56728 - protein, 180 aa, Homo sapiens
MSASSSGGSPRFPSCGKNGVTSLTQKKVLRAPCGAPSVTVTKSHKRGMKGDTVNVRRSVRVKTKVPWMPPGKSSARPVGCKWENPPHCLEITPPSSEKLVSVMRLSDLSTEDDDSGHCKMNRYDKKIDSLMNAVGCLKSEVKMQKGERQMAKRFLEERKEELEEVAHELAETEHENTVLR

SEQ ID NO: 56729 - protein, 215 aa, Homo sapiens
MKDRSSTPPLHVHVDENTPVHVHIKKLPKPSATSSQKSHKRGMKGDTVNVRRSVRVKTKNPPHCLEITPPSSEKLVSVMRLSDLSTEDDDSGHCKMNRYDKKIDSLMNAVGCLKSEVKMQKGERQMAKRFLEERKEELEEVAHELAETEHENTVLRHNIERMKEEKDFTILQKKHLQQEKECLMSKLVEAEMDGAAAAKQVMALKDTIGKLKTVG

SEQ ID NO: 56730 - protein, 156 aa, Homo sapiens
MSASSSGGSPRFPSCGKNGVTSLTQKKVLRAPCGAPSVTVTKSHKRGMKGDTVNVRRSVRVKTKNPPHCLEITPPSSEKLVSVMRLSDLSTEDDDSGHCKMNRYDKKIDSLMNAVGCLKSEVKMQKGERQMAKRFLEERKEELEEVAHELAETEHE

SEQ ID NO: 56731 - protein, 576 aa, Homo sapiens
MKDRSSTPPLHVHVDENTPVHVHIKKLPKPSATSSQKSHKRGMKGDTVNVRRSVRVKTKVKMQKGERQMAKRFLEERKEELEEVAHELAETEHENTVLRHNIERMKEEKDFTILQKKHLQQEKECLMSKLVEAEMDGAAAAKQVMALKDTIGKLKTEKQMTCTDINTLTRQKELLLQKLSTFEETNRTLRDLLREQHCKEDSERLMEQQGALLKRLAEADSEKARLLLLLQDKDKEVEELLQEIQCEKAQAKTASELSKSMESMRGHLQAQLRSKEAENSRLCMQIKNLERSGNQHKAEVEAIMEQLKELKQKGDRDKESLKKAIRAQKERAEKSEEYAEQLHVQLADKDLYVAEALSTLESWRSRYNQVVKEKGDLELEIIVLNDRVTDLVNQQQTLEEKMREDRDSLVERLHRQTAEYSAFKLENERLKASFAPMEDKLNQAHLEVQQLKASVKNYEGMIDNYKSQVMKTRLEADEVAAQLERCDKENKILKDEMNKEIEAARRQFQSQLADLQQLPDILKITEAKLAECQDQLQGYERKNIDLTAIISDLRSRVRDWQKGSHELTRAGARIPR

SEQ ID NO: 56732 - protein, 147 aa, Homo sapiens
MKDRSSTPPLHVHVDENTPVHVHIKKLPKPSATSSQKSHKRGMKGDTVNVRRSVRVKTKVPWMPPGKSSARPVGCKWETSEETPTTGEGVPHVQAGGGGNGWGCGCQAGHGLEGYHREAENRETNDLHGHQHPDKAEGTSPAEAEHI

SEQ ID NO: 56733 - protein, 638 aa, Homo sapiens
MGRNRYPPACWFPSCGKNGVTSLTQKKVLRAPCGAPSVTVTKSHKRGMKGDTVNVRRSVRVKTKNPPHCLEITPPSSEKLVSVMRLSDLSTEDDDSGHCKMNRYDKKIDSLMNAVGCLKSEVKMQKGERQMAKRFLEERKEELEEVAHELAETEHENTVLRHNIERMKEEKDFTILQKKHLQQEKECLMSKLVEAEMDGAAAAKQVMALKDTIGKLKTEKQMTCTDINTLTRQKELLLQKLSTFEETNRTLRDLLREQHCKEDSERLMEQQGALLKRLAEADSEKARLLLLLQDKDKEVEELLQEIQCEKAQAKTASELSKSMESMRGHLQAQLRSKEAENSRLCMQIKNLERSGNQHKAEVEAIMEQLKELKQKGDRDKESLKKAIRAQKERAEKSEEYAEQLHVQLADKDLYVAEALSTLESWRSRYNQVVKEKGDLELEIIVLNDRVTDLVNQQQTLEEKMREDRDSLVERLHRQTAEYSAFKLENERLKASFAPMEDKLNQAHLEVQQLKASVKNYEGMIDNYKSQVMKTRLEADEVAAQLERCDKENKILKDEMNKEIEAARRQFQSQLADLQQLPDILKITEAKLAECQDQLQGYERKNIDLTAIISDLRSRVRDWQKGSHELTRAGARIPR

SEQ ID NO: 56734 - protein, 254 aa, Homo sapiens
MTEEVWMGTWRPHRPRGPIMALYSSPGPKYLIPPTTGFMKHTPTKLRAPAYSFRGAPMLLAENCSPGPRYNVNPKILRTGKDLGPAYSILGRYQTKTMLTPGPGDYFPEKSTKYVFDSAPSHSISARTKAFRVDSTPGPAAYMLPMVMGPNTVGKASQPSFSIKGRSKLGGFSDDLHKTPGPAAYRQTDVRVTKFKAPQYTMAARVEPPGDKTLKPGPGAHSPEKVTLTKPCAPVVTFGIKHSDYMTPLLVDVE

SEQ ID NO: 56735 - protein, 138 aa, Homo sapiens
MTEEVWMGTWRPHRPRGPIMALYSSPGPKYLIPPTTGFMKHTPTKLRAPAYSFRGAPMLLAENCSPGPRYNVNPKILRTGKDLGPAYSILGRYQTKTMLTPGPALKSAFPSWTPPDPTWSPPVLEPRGPTPRMLGSPP

SEQ ID NO: 56736 - protein, 124 aa, Homo sapiens
MTEEVWMGTWRPHRPRGPIMALYSSPGPKYLIPPTTGFMKHTPTKLRAPAYSFRGAPMLLAENCSPPNTVGKASQPSFSIKGRSKLGGFSDDLHKVTLTKPCAPVVTFGIKHSDYMTPLLVDVE

SEQ ID NO: 56737 - protein, 257 aa, Homo sapiens
MDAEYSGNEFPRSEGERDQHQRPGKERKSGEAGWGTGELGQDGRLLSSTLSLSSNRSLGQRQNSPLPFQWRITHSFRWMAQVLASELSLVAFILLLVVAFSKKWLDLSRSLFYQRWPVDVSNRIHTSAHVMSMGLLHFYKSRSCSDLENGKVTFIFSTLMLFPINIWIFELERNVSIPIGWSYFIGWLVLILYFTCAILCYFNHKSFWSLILSHPSGAVSCSSSFGSVEESPRAQTITDTPITQEGVLDPEQKDTHV

SEQ ID NO: 56738 - protein, 495 aa, Homo sapiens
MVTWLYRFLPTSNMAAKLRSLLPPDLRLQFWLHARLQKCFLSRGCGSYCAGAKASPLPGKMAMGLMCGRRELLRLLQSGRRVHSVAGPSQWLGKPLTTRLLFPAAPCCCRPHYLFLAASGPRSLSTSAISFAEVQVQAPPVVAATPSPTAVPEVASGETADVVQTAAEQSFAELGLGSYTPVGLIQNLLEFMHVDLGLPWWGAIAACTVFARCLIFPLIVTGQREAARIHNHLPEIQKFSSRIREAKLAGDHIEYYKASSEMALYQKKHGIKLYKPLILPVTQAPIFISFFIALREMANLPVPSLQTGGLWWFQDLTVSDPIYILPLAVTATMWAVLELGAETGVQSSDLQWMRNVIRMMPLITLPITMHFPTAVFMYWLSSNLFSLVQVSCLRIPAVRTVLKIPQRVVHDLDKLPPREGFLESFKKGWKNAEMTRQLREREQRMRNQLELAARGPLRQTFTHNPLLQPGKDNPPNIPSSSSKPKSKYPWHDTLG

SEQ ID NO: 56739 - protein, 419 aa, Homo sapiens
MRGTQVHSVAGPSQWLGKPLTTRLLFPAAPCCCRPHYLFLAASGPRSLSTSAISFAEVQVQAPPVVAATPSPTAVPEVASGETADVVQTAAEQSFAELGLGSYTPVGLIQNLLEFMHVDLGLPWWGAIAACTVFARCLIFPLIVTGQREAARIHNHLPEIQKFSSRIREAKLAGDHIEYYKASSEMALYQKKHGIKLYKPLILPVTQAPIFISFFIALREMANLPVPSLQTGGLWWFQDLTVSDPIYILPLAVTATMWAVLELGAETGVQSSDLQWMRNVIRMMPLITLPITMHFPTAVFMYWLSSNLFSLVQVSCLRIPAVRTVLKIPQRVVHDLDKLPPREGFLESFKKGWKNAEMTRQLREREQRMRNQLELAARGPLRQTFTHNPLLQPGKDNPPNIPSSSSKPKSKYPWHDTLG

SEQ ID NO: 56740 - protein, 243 aa, Homo sapiens
MSRLWYGKKGRRHQPINHKYTLVVSVAEYHRRIDALNTEELRTLCRRLQITTREDINSKQVATVKADLESESFRPNLSDPSELLLPDQIEKLTKHLPPRTIGYPWTLVYGTGKHGTSLKTLYRTMTGLDTPVLMVIKDSDGQVFGALASEPLKVSDGFYGTGETFVFTFCPEFEVFKWTGDNMFFIKGDMDSLAFGGGGGEFALWLDGDLYHGRSHSCKTFGNRTLSKKEDFFIQDIEIWAFE

SEQ ID NO: 56741 - protein, 839 aa, Homo sapiens
MDYLTTFTEKSGRLLRGTANRLLGFGGGGEARQVRFEDYLREPAQGDLGCGSPPHRPPAPSSPEGPDTGQKKTLDKKDGRRMSFQKPKGTIEYTVESRDSLNSIALKFDTTPNELVQLNKLFSRAVVTGQVLYVPDPEYVSSVESSPSLSPVSPLSPTSSEAEFDKTTNPDVHPTEATPSSTFTGIRPARVVSSTSEEEEAFTEKFLKINCKYITSGKGTVSGVLLVTPNNIMFDPHKNDPLVQENGCEEYGIMCPMEEVMSAAMYKEILDSKIKESLPIDIDQLSGRDFCHSKKMTGSNTEEIDSRIRDAGNDSASTAPRSTEESLSEDVFTESELSPIREELVSSDELRQDKSSGASSESVQTVNQAEVESLTVKSESTGTPGHLRSDTEHSTNEVGTLCHKTDLNNLEMAIKEDQIADNFQGISGPKEDSTSIKGNSDQDSFLHENSLHQEESQKENMPCGETAEFKQKQSVNKGKQGKEQNQDSQTEAEELRKLWKTHTMQQTKQQRENIQQVSQKEAKHKITSADGHIESSALLKEKQRHRLHKFLCLRVGKPMRKTFVSQASATMQQYAQRDKKHEYWFAVPQERTDHLYAFFIQWSPEIYAEDTGEYTREPGFIVVKKIEESETIEDSSNQAAAREWEITTREDINSKQVATVKADLESESFRPNLSDPSELLLPDQIEKLTKHLPPRTIGYPWTLVYGTGKHGTSLKTLYRTMTGLDTPVLMVIKDSDGQVFGALASEPLKVSDGFYGTGETFVFTFCPEFEVFKWTGDNMFFIKGDMDSLAFGGGGGEFALWLDGDLYHGRSHSCKTFGNRTLSKKEDFFIQDIEIWAFE

SEQ ID NO: 56742 - protein, 874 aa, Homo sapiens
MTKDKNSPGLKKKSQSVDINAPGFNPLAGAGKQTPQASKPPAPKTPIIEEEQNNAANTQKHPSRRSELKRFYTIDTGQKKTLDKKDGRRMSFQKPKGTIEYTVESRDSLNSIALKFDTTPNELVQLNKLFSRAVVTGQVLYVPDPEYVSSVESSPSLSPVSPLSPTSSEAEFDKTTNPDVHPTEATPSSTFTGIRPARVVSSTSEEEEAFTEKFLKINCKYITSGKGTVSGVLLVTPNNIMFDPHKNDPLVQENGCEEYGIMCPMEEVMSAAMYKEILDSKIKESLPIDIDQLSGRDFCHSKKMTGSNTEEIDSRIRDAGNDSASTAPRSTEESLSEDVFTESELSPIREELVSSDELRQDKSSGASSESVQTVNQAEVESLTVKSESTGTPGHLRSDTEHSTNEVGTLCHKTDLNNLEMAIKEDQIADNFQGISGPKEDSTSIKGNSDQDSFLHENSLHQEESQKENMPCGETAEFKQKQSVNKGKQGKEQNQDSQTEAEELRKLWKTHTMQQTKQQRENIQQVSQKEAKHKITSADGHIESSALLKEKQRHRLHKFLCLRVGKPMRKTFVSQASATMQQYAQRDKKHEYWFAVPQERTDHLYAFFIQWSPEIYAEDTGEYTREPGFIVVKKIEESETIEDSSNQAAAREWEVVSVAEYHRRIDALNTEELRTLCRRLQITTREDINSKQVATVKADLESESFRPNLSDPSELLLPDQIEKLTKHLPPRTIGYPWTLVYGTGKHGTSLKTLYRTMTGLDTPVLMVIKDSDGQVFGALASEPLKVSDGFYGTGETFVFTFCPEFEVFKWTGDNMFFIKGDMDSLAFGGGGGEFALWLDGDLYHGRSHSCKTFGNRTLSKKEDFFIQDIEIWAFE

SEQ ID NO: 56743 - protein, 846 aa, Homo sapiens
MSVSNLSWLKKKSQSVDINAPGFNPLAGAGKQTPQASKPPAPKTPIIEEEQNNAANTQKHPSRRSELKRFYTIDTGQKKTLDKKDGRRMSFQKPKGTIEYTVESRDSLNSIALKFDTTPNELVQLNKLFSRAVVTGQVLYVPDPEYVSSVESSPSLSPVSPLSPTSSEAEFDKTTNPDVHPTEATPSSTFTGIRPARVVSSTSEEEEAFTEKFLKINCKYITSGKGTVSGVLLVTPNNIMFDPHKNDPLVQENGCEEYGIMCPMEEVMSAAMYKEILDSKIKESLPIDIDQLSGRDFCHSKKMTGSNTEEIDSRIRDAGNDSASTAPRSTEESLSEDVFTESELSPIREELVSSDELRQDKSSGASSESVQTVNQAEVESLTVKSESTGTPGHLRSDTEHSTNEVGTLCHKTDLNNLEMAIKEDQIADNFQGISGPKEDSTSIKGNSDQDSFLHENSLHQEESQKENMPCGETAEFKQKQSVNKGKQGKEQNQDSQTEAEELRKLWKTHTMQQTKQQRENIQQVSQKEAKHKITSADGHIESSALLKEKQRHRLHKFLCLRVGKPMRKTFVSQASATMQQYAQRDKKHEYWFAVPQERTDHLYAFFIQWSPEIYAEDTGEYTREPGFIVVKKIEESETIEDSSNQAAAREWEITTREDINSKQVATVKADLESESFRPNLSDPSELLLPDQIEKLTKHLPPRTIGYPWTLVYGTGKHGTSLKTLYRTMTGLDTPVLMVIKDSDGQVFGALASEPLKVSDGFYGTGETFVFTFCPEFEVFKWTGDNMFFIKGDMDSLAFGGGGGEFALWLDGDLYHGRSHSCKTFGNRTLSKKEDFFIQDIEIWAFE

SEQ ID NO: 56744 - protein, 216 aa, Homo sapiens
MSRLWYGKKGRRHQPINHKYTLITTREDINSKQVATVKADLESESFRPNLSDPSELLLPDQIEKLTKHLPPRTIGYPWTLVYGTGKHGTSLKTLYRTMTGLDTPVLMVIKDSDGQVFGALASEPLKVSDGFYGTGETFVFTFCPEFEVFKWTGDNMFFIKGDMDSLAFGGGGGEFALWLDGDLYHGRSHSCKTFGNRTLSKKEDFFIQDIEIWAFE

SEQ ID NO: 56745 - protein, 294 aa, Homo sapiens
MQQTKQQRENIQQVSQKEAKHKITSADGHIESSALLKEKQRHRLHKFLCLRVGKPMRKTFVSQASATMQQYAQRDKKHEYWFAVPQERTDHLYAFFIQWSPEIYAEDTGEYTREPGFIVVKKIEESETIEDSSNQAAAREWELTKHLPPRTIGYPWTLVYGTGKHGTSLKTLYRTMTGLDTPVLMVIKDSDGQVFGALASEPLKVSDGFYGTGETFVFTFCPEFEVFKWTGDNMFFIKGDMDSLAFGGGGGEFALWLDGDLYHGRSHSCKTFGNRTLSKKEDFFIQDIEIWAFE

SEQ ID NO: 56746 - protein, 503 aa, Homo sapiens
MFCQRKDTGQKKTLDKKDGRRMSFQKPKGTIEYTVESRDSLNSIALKFDTTPNELVQLNKLFSRAVVTGQVLYVPDPEYVSSVESSPSLSPVSPLSPTSSEAEFDKTTNPDVHPTEATPSSTFTGIRPARVVSSTSEEEEAFTEKFLKINCKYITSGKGTVSGVLLVTPNNIMFDPHKNDPLVQENGCEEYGIMCPMEEVMSAAMYKEILDSKIKESLPIDIDQLSGRDFCHSKKMTGSNTEEIDSRIRDAGNDSASTAPRSTEESLSEDVFTESELSPIREELVSSDELRQDKSSGASSESVQTVNQAEVESLTVKSESTGTPGHLRSDTEHSTNEVGTLCHKTDLNNLEMAIKEDQIADNFQGISGPKEDSTSIKGNSDQDSFLHENSLHQEESQKENMPCGETAEFKQKQSVNKGKQGKEQNQDSQTEAEELRKLWKTHTMQQTKQQRENIQQVSQKEAKHKITSADGHIESKCYRVNEVSSSNCMVSPSFLTDSKAAVP

SEQ ID NO: 56747 - protein, 873 aa, Homo sapiens
MSVSNLSWLKKKSQSVDINAPGFNPLAGAGKQTPQASKPPAPKTPIIEEEQNNAANTQKHPSRRSELKRFYTIDTGQKKTLDKKDGRRMSFQKPKGTIEYTVESRDSLNSIALKFDTTPNELVQLNKLFSRAVVTGQVLYVPDPEYVSSVESSPSLSPVSPLSPTSSEAEFDKTTNPDVHPTEATPSSTFTGIRPARVVSSTSEEEEAFTEKFLKINCKYITSGKGTVSGVLLVTPNNIMFDPHKNDPLVQENGCEEYGIMCPMEEVMSAAMYKEILDSKIKESLPIDIDQLSGRDFCHSKKMTGSNTEEIDSRIRDAGNDSASTAPRSTEESLSEDVFTESELSPIREELVSSDELRQDKSSGASSESVQTVNQAEVESLTVKSESTGTPGHLRSDTEHSTNEVGTLCHKTDLNNLEMAIKEDQIADNFQGISGPKEDSTSIKGNSDQDSFLHENSLHQEESQKENMPCGETAEFKQKQSVNKGKQGKEQNQDSQTEAEELRKLWKTHTMQQTKQQRENIQQVSQKEAKHKITSADGHIESSALLKEKQRHRLHKFLCLRVGKPMRKTFVSQASATMQQYAQRDKKHEYWFAVPQERTDHLYAFFIQWSPEIYAEDTGEYTREPGFIVVKKIEESETIEDSSNQAAAREWEVVSVAEYHRRIDALNTEELRTLCRRLQITTREDINSKQVATVKADLESESFRPNLSDPSELLLPDQIEKLTKHLPPRTIGYPWTLVYGTGKHGTSLKTLYRTMTGLDTPVLMVIKDSDGQVFGALASEPLKVSDGFYGTGETFVFTFCPEFEVFKWTGDNMFFIKGDMDSLAFGGGGGEFALWLDGDLYHGRSHSCKTFGNRTLSKKEDFFIQDIEIWAFE

SEQ ID NO: 56748 - protein, 846 aa, Homo sapiens; identical to SEQ ID NO: 56743

SEQ ID NO: 56749 - protein, 273 aa, Homo sapiens
MTFDDLKIQTVKDQPDEKSNGKKAKGLQFLYSPWWCLAAATLGVLCLGLVVTIMVLGMQLSQVSDLLTQEQANLTHQKKKLEGQISARQQAEEASQESENELKEMIETLARKLNEKSKEQMELHHQNLNLQETLKRVANCSAPCPQDWIWHGENCYLFSSGSFNWEKSQEKCLSLDAKLLKINSTADLDFIQQAISYSSFPFWMGLSRRNPSYPWLWEDGSPLMPHLFRVRGAVSQTYPSGTCAYIQRGAVYAENCILAAFSICQKKANLRAQ

SEQ ID NO: 56750 - protein, 181 aa, Homo sapiens
MTFDDLKIQTVKDQPDEKSNGKKAKGLQFLYSPWWCLAAATLGVLCLGLVVTIMVLGMQLSQVSDLLTQEQANLTHQKKKLEGQISARQQAEEASQESENELKEMIETLARKLNEKSKEQMELHHQNLNLQETLKRVANCSGLHPASNFLFQFSILDGAVSEEPQLPMALGGRFSFDAPLI

SEQ ID NO: 56751 - protein, 189 aa, Homo sapiens
MTFDDLKIQTVKDQPDEKSNGKKAKGLQFLYSPWWCLAAATLGVLCLGLVVTIMVLGMQLSQVSDLLTQEQANLTHQKKKLEGQISARQQAEEASQESENELKEMIETLARKLNEKSKEQMELHHQNLNLQETLKRVANCSAPCPQDWIWHGENCYLFSSGSFNWEKSQEKCLSLDAKLLKINSTADLI

SEQ ID NO: 56752 - protein, 1023 aa, Homo sapiens
MFHLRTCAAKLRPLTASQTVKTFSQNRPAAARTFQQIRCYSAPVAAEPFLSGTSSNYVEEMYCAWLENPKSVHKSWDIFFRNTNAGAPPGTAYQSPLPLSRGSLAAVAHAQSLVEAQPNVDKLVEDHLAVQSLIRAYQIRGHHVAQLDPLGILDADLDSSVPADIISSTDKLGFYGLDESDLDKVFHLPTTTFIGGQESALPLREIIRRLEMAYCQHIGVEFMFINDLEQCQWIRQKFETPGIMQFTNEEKRTLLARLVRSTRFEEFLQRKWSSEKRFGLEGCEVLIPALKTIIDKSSENGVDYVIMGMPHRGRLNVLANVIRKELEQIFCQFDSKLEAADEGSGDVKYHLGMYHRRINRVTDRNITLSLVANPSHLEAADPVVMGKTKAEQFYCGDTEGKKVMSILLHGDAAFAGQGIVYETFHLSDLPSYTTHGTVHVVVNNQIGFTTDPRMARSSPYPTDVARVVNAPIFHVNSDDPEAVMYVCKVAAEWRSTFHKDVVVDLVCYRRNGHNEMDEPMFTQPLMYKQIRKQKPVLQKYAELLVSQGVVNQPEYEEEISKYDKICEEAFARSKDEKILHIKHWLDSPWPGFFTLDGQPRSMSCPSTGLTEDILTHIGNVASSVPVENFTIHGGLSRILKTRGEMVKNRTVDWALAEYMAFGSLLKEGIHIRLSGQDVERGTFSHRHHVLHDQNVDKRTCIPMNHLWPNQAPYTVCNSSLSEYGVLGFELGFAMASPNALVLWEAQFGDFHNTAQCIIDQFICPGQAKWVRQNGIVLLLPHGMEGMGPEHSSARPERFLQMCNDDPDVLPDLKEANFDINQLYDCNWVVVNCSTPGNFFHVLRRQILLPFRKPLIIFTPKSLLRHPEARSSFDEMLPGTHFQRVIPEDGPAAQNPENVKRLLFCTGKVYYDLTRERKARDMVGQVAITRIEQLSPFPFDLLLKEVQKYPNAELAWCQEEHKNQGYYDYVKPRLRTTISRAKPVWYAGRDPAAAPATGNKKTHLTELQRLLDTAFDLDVFKNFS

SEQ ID NO: 56753 - protein, 211 aa, Homo sapiens
MFHLRTCAAKLRPLTASQTVKTFSQNRPAAARTFQQIRCYSAPVAAEPFLSGTSSNYVEEMYCAWLENPKSVHKSWDIFFRNTNAGAPPGTAYQSPLPLSRGSLAAVAHAQSLVEAQPNVDKLVEDHLAVQSLIRAYQIRGHHVAQLDPLGILDADLDSSVPADIISSTDKLGFYGLDESDLDKVFHLPTTTFIGGQESALPLREIIRRLE

SEQ ID NO: 56754 - protein, 427 aa, Homo sapiens
MFHLRTCAAKLRPLTASQTVKTFSQNRPAAARTFQQIRCYSAPVAAEPFLSGTSSNYVEEMYCAWLENPKSVHKSWDIFFRNTNAGAPPGTAYQSPLPLSRGSLAAVAHAQSLVEAQPNVDKLVEDHLAVQSLIRAYQIRGHHVAQLDPLGILDADLDSSVPADIISSTDKLGFYGLDESDLDKVFHLPTTTFIGGQESALPLREIIRRLEMAYCQHIGVEFMFINDLEQCQWIRQKFETPGIMQFTNEEKRTLLARLVRSTRFEEFLQRKWSSEKRFGLEGCEVLIPALKTIIDKSSENGVDYVIMGMPHRGRLNVLANVIRKELEQIFCQFDSKLEAADEGSGDVKYHLGMYHRRINRVTDRNITLSLVANPSHLEAADPVVMGKTKAEQFYCGDTEGKKVRPRERRARQIVKAPCSSMEFRSPT

SEQ ID NO: 56755 - protein, 974 aa, Homo sapiens
MYCAWLENPKSVHKSWDIFFRNTNAGAPPGTAYQSPLPLSRGSLAAVAHAQSLVEAQPNVDKLVEDHLAVQSLIRAYQVRGHHIAKLDPLGISCVNFDDAPVTVSSNVDLAVFKERLRMLTVGGFYGLDESDLDKVFHLPTTTFIGGQESALPLREIIRRLEMAYCQHIGVEFMFINDLEQCQWIRQKFETPGIMQFTNEEKRTLLARLVRSTRFEEFLQRKWSSEKRFGLEGCEVLIPALKTIIDKSSENGVDYVIMGMPHRGRLNVLANVIRKELEQIFCQFDSKLEAADEGSGDVKYHLGMYHRRINRVTDRNITLSLVANPSHLEAADPVVMGKTKAEQFYCGDTEGKKVMSILLHGDAAFAGQGIVYETFHLSDLPSYTTHGTVHVVVNNQIGFTTDPRMARSSPYPTDVARVVNAPIFHVNSDDPEAVMYVCKVAAEWRSTFHKDVVVDLVCYRRNGHNEMDEPMFTQPLMYKQIRKQKPVLQKYAELLVSQGVVNQPEYEEEISKYDKICEEAFARSKDEKILHIKHWLDSPWPGFFTLDGQPRSMSCPSTGLTEDILTHIGNVASSVPVENFTIHGGLSRILKTRGEMVKNRTVDWALAEYMAFGSLLKEGIHIRLSGQDVERGTFSHRHHVLHDQNVDKRTCIPMNHLWPNQAPYTVCNSSLSEYGVLGFELGFAMASPNALVLWEAQFGDFHNTAQCIIDQFICPGQAKWVRQNGIVLLLPHGMEGMGPEHSSARPERFLQMCNDDPDVLPDLKEANFDINQLYDCNWVVVNCSTPGNFFHVLRRQILLPFRKPLIIFTPKSLLRHPEARSSFDEMLPGTHFQRVIPEDGPAAQNPENVKRLLFCTGKVYYDLTRERKARDMVGQVAITRIEQLSPFPFDLLLKEVQKYPNAELAWCQEEHKNQGYYDYVKPRLRTTISRAKPVWYAGRDPAAAPATGNKKTHLTELQRLLDTAFDLDVFKNFS

SEQ ID NO: 56756 - protein, 1019 aa, Homo sapiens
MFHLRTCAAKLRPLTASQTVKTFSQNRPAAARTFQQIRCYSAPVAAEPFLSGTSSNYVEEMYCAWLENPKSVHKSWDIFFRNTNAGAPPGTAYQSPLPLSRGSLAAVAHAQSLVEAQPNVDKLVEDHLAVQSLIRAYQVRGHHIAKLDPLGISCVNFDDAPVTVSSNVGFYGLDESDLDKVFHLPTTTFIGGQESALPLREIIRRLEMAYCQHIGVEFMFINDLEQCQWIRQKFETPGIMQFTNEEKRTLLARLVRSTRFEEFLQRKWSSEKRFGLEGCEVLIPALKTIIDKSSENGVDYVIMGMPHRGRLNVLANVIRKELEQIFCQFDSKLEAADEGSGDVKYHLGMYHRRINRVTDRNITLSLVANPSHLEAADPVVMGKTKAEQFYCGDTEGKKVMSILLHGDAAFAGQGIVYETFHLSDLPSYTTHGTVHVVVNNQIGFTTDPRMARSSPYPTDVARVVNAPIFHVNSDDPEAVMYVCKVAAEWRSTFHKDVVVDLVCYRRNGHNEMDEPMFTQPLMYKQIRKQKPVLQKYAELLVSQGVVNQPEYEEEISKYDKICEEAFARSKDEKILHIKHWLDSPWPGFFTLDGQPRSMSCPSTGLTEDILTHIGNVASSVPVENFTIHGGLSRILKTRGEMVKNRTVDWALAEYMAFGSLLKEGIHIRLSGQDVERGTFSHRHHVLHDQNVDKRTCIPMNHLWPNQAPYTVCNSSLSEYGVLGFELGFAMASPNALVLWEAQFGDFHNTAQCIIDQFICPGQAKWVRQNGIVLLLPHGMEGMGPEHSSARPERFLQMCNDDPDVLPDLKEANFDINQLYDCNWVVVNCSTPGNFFHVLRRQILLPFRKPLIIFTPKSLLRHPEARSSFDEMLPGTHFQRVIPEDGPAAQNPENVKRLLFCTGKVYYDLTRERKARDMVGQVAITRIEQLSPFPFDLLLKEVQKYPNAELAWCQEEHKNQGYYDYVKPRLRTTISRAKPVWYAGRDPAAAPATGNKKTHLTELQRLLDTAFDLDVFKNFS

SEQ ID NO: 56757 - protein, 807 aa, Homo sapiens
MAATELRGVVGPGPAAIAALGGGGAGPPVVGGGGGRGDAGPGSGAASGTVVAAAAGGPGPGAGGVAAAGPAPAPPTGGSGGSGAGGSGSAREGWLFKWTNYIKGYQRRWFVLSNGLLSYYRSKAEMRHTCRGTINLATANITVEDSCNFIISNGGAQTYHLKASSEVERQRWVTALELAKAKAVKMLAESDESGDEESVSQTDKTELQNTLRTLSSKVEDLSTCNDLIAKHGTALQRSLSELESLKLPAESNEKIKQVNERATLFRITSNAMINACRDFLMLAQTHSKKWQKSLQYERDQRIRLEETLEQLAKQHNHLERAFRGATVLPANTPGNVGSGKDQCCSGKGDMSDEDDENEFFDAPEIITMPENLGHKRTGSNISGASSDISLDEQYKHQLEETKKEKRTRIPYKPNYSLNLWSIMKNCIGKELSKIPMPVNFNEPLSMLQRLTEDLEYHELLDRAAKCENSLEQLCYVAAFTVSSYSTTVFRTSKPFNPLLGETFELDRLEENGYRSLCEQVSHHPPAAAHHAESKNGWTLRQEIKITSKFRGKYLSIMPLGTIHCIFHATGHHYTWKKVTTTVHNIIVGKLWIDQSGEIDIVNHKTGDKCNLKFVPYSYFSRDVARKVTGEVTDPSGKVHFALLGTWDEKMECFKVQPVIGENGGDARQRGHEAEESRVMLWKRNPLPKNAENMYYFSELALTLNAWESGTAPTDSRLRPDQRLMENGRWDEANAEKQRLEEKQRLSRKKREAEAMKATEDGTPYDPYKALWFERKKDPVTKELTHIYRGEYWECKEKQDWSSCPDIF

SEQ ID NO: 56758 - protein, 407 aa, Homo sapiens
MAATELRGVVGPGPAAIAALGGGGAGPPVVGGGGGRGDAGPGSGAALQRLTEDLEYHELLDRAAKCENSLEQLCYVAAFTVSSYSTTVFRTSKPFNPLLGETFELDRLEENGYRSLCEQVSHHPPAAAHHAESKNGWTLRQEIKITSKFRGKYLSIMPLGTIHCIFHATGHHYTWKKVTTTVHNIIVGKLWIDQSGEIDIVNHKTGDKCNLKFVPYSYFSRDVARKVTGEVTDPSGKVHFALLGTWDEKMECFKVQPVIGENGGDARQRGHEAEESRVMLWKRNPLPKNAENMYYFSELALTLNAWESGTAPTDSRLRPDQRLMENGRWDEANAEKQRLEEKQRLSRKKREAEAMKATEDGTPYDPYKALWFERKKDPVTKELTHIYRGEYWECKEKQDWSSCPDIF

SEQ ID NO: 56759 - protein, 916 aa, Homo sapiens
MGKAAAPSRGGGCGGRSRGLSSLFTVVPCLSCHTAAPGMSASTSGSGPEPKPQPQPVPEPERGPLSEQVSEAVSEAVPRSEPVSETTSEPEPGAGQPSELLQGSRPGSESSSGVGAGPFTKAASEPLSRAVGSATFLRPESGSLPALKPLPLLRPGQAKTPLGVPMSGTGTTSSAPLALLPLDSFEGWLLKWTNYLKGYQRRWFVLGNGLLSYYRNQGEMAHTCRGTINLSTAHIDTEDSCGILLTSGARSYHLKASSEVDRQQWITALELAKAKAVRVMNTHSDDSGDDDEATTPADKSELHHTLKNLSLKLDDLSTCNDLIAKHGAALQRSLTELDGLKIPSESGEKLKVVNERATLFRITSNAMINACRDFLELAEIHSRKWQRALQYEQEQRVHLEETIEQLAKQHNSLERAFHSAPGRPANPSKSFIEGSLLTPKGEDSEEDEDTEYFDAMEDSTSFITVITEAKEDSRKAEGSTGTSSVDWSSADNVLDGASLVPKGSSKVKRRVRIPNKPNYSLNLWSIMKNCIGRELSRIPMPVNFNEPLSMLQRLTEDLEYHHLLDKAVHCTSSVEQMCLVAAFSVSSYSTTVHRIAKPFNPMLGETFELDRLDDMGLRSLCEQVSHHPPSAAHYVFSKHGWSLWQEITISSKFRGKYISIMPLGAIHLEFQASGNHYVWRKSTSTVHNIIVGKLWIDQSGDIEIVNHKTNDRCQLKFLPYSYFSKEAARKVTGVVSDSQGKAHYVLSGSWDEQMECSKVMHSSPSSPSSDGKQKTVYQTLSAKLLWKKYPLPENAENMYYFSELALTLNEHEEGVAPTDSRLRPDQRLMEKGRWDEANTEKQRLEEKQRLSRRRRLEACGPGSSCSSEEEKEADAYTPLWFEKRLDPLTGEMACVYKGGYWEAKEKQDWHMCPNIF

SEQ ID NO: 56760 - protein, 874 aa, Homo sapiens
MGKAAAPSRGGGCGGRSRGLSSLFTVVPCLSCHTAAPGMSASTSGSGPEPKPQPQPVPEPERGPLSEQVSEAVSEAVPRSEPVSETTSEPEPGAGQPSELLQGSRPGSESSSGVGAGPFTKAASEPLSRAVGSATFLRPESGSLPALKPLPLLRPGQAKTPLGVPMSGTGTTSSAPLALLPLDSFEGWLLKWTNYLKGYQRRWFVLGNGLLSYYRNQGEMAHTCRGTINLSTAHIDTEDSCGILLTSGARSYHLKASSEVDRQQWITALELAKAKAVRVMNTHSDDSGDDDEATTPADKSELHHTLKNLSLKLDDLSTCNDLIAKHGAALQRSLTELDGLKIPSESGEKLKVVNERATLFRITSNAMINACRDFLELAEIHSRKWQRALQYEQEQRVHLEETIEQLAKQHNSLERAFHSAPGRPANPSKSFIEGSLLTPKGEDSEEDEDTEYFDAMEDSTSFITVITEAKEDSRKAEGSTGTSSVDWSSADNVNFNEPLSMLQRLTEDLEYHHLLDKAVHCTSSVEQMCLVAAFSVSSYSTTVHRIAKPFNPMLGETFELDRLDDMGLRSLCEQVSHHPPSAAHYVFSKHGWSLWQEITISSKFRGKYISIMPLGAIHLEFQASGNHYVWRKSTSTVHNIIVGKLWIDQSGDIEIVNHKTNDRCQLKFLPYSYFSKEAARKVTGVVSDSQGKAHYVLSGSWDEQMECSKVMHSSPSSPSSDGKQKTVYQTLSAKLLWKKYPLPENAENMYYFSELALTLNEHEEGVAPTDSRLRPDQRLMEKGRWDEANTEKQRLEEKQRLSRRRRLEACGPGSSCSSEEGEAGREGRPGGEERGARVGVPQGRIPGEQATSPPTSPLCLPSREGGGCLHATVV

SEQ ID NO: 56761 - protein, 750 aa, Homo sapiens
MHRQRTRTMSSLAAKRLGMNRRPAGSGGGGGEAATWGHRFWRPQERPTDRNQGEMAHTCRGTINLSTAHIDTEDSCGILLTSGARSYHLKASSEVDRQQWITALELAKAKAVRVMNTHSDDSGDDDEATTPADKSELHHTLKNLSLKLDDLSTCNDLIAKHGAALQRSLTELDGLKIPSESGEKLKVVNERATLFRITSNAMINACRDFLELAEIHSRKWQRALQYEQEQRVHLEETIEQLAKQHNSLERAFHSAPGRPANPSKSFIEGSLLTPKGEDSEEDEDTEYFDAMEDSTSFITVITEAKEDRKAEGSTGTSSVDWSSADNVLDGASLVPKGSSKVKRRVRIPNKPNYSLNLWSIMKNCIGRELSRIPMPVNFNEPLSMLQRLTEDLEYHHLLDKAVHCTSSVEQMCLVAAFSVSSYSTTVHRIAKPFNPMLGETFELDRLDDMGLRSLCEQVSHHPPSAAHYVFSKHGWSLWQEITISSKFRGKYISIMPLGAIHLEFQASGNHYVWRKSTSTVHNIIVGKLWIDQSGDIEIVNHKTNDRCQLKFLPYSYFSKEAARKVTGVVSDSQGKAHYVLSGSWDEQMECSKVMHSSPSSPSSDGKQKTVYQTLSAKLLWKKYPLPENAENMYYFSELALTLNEHEEGVAPTDSRLRPDQRLMEKGRWDEANTEKQRLEEKQRLSRRRRLEACGPGSSCSSEEEKEADAYTPLWFEKRLDPLTGEMACVYKGGYWEAKEKQDWHMCPNIF

SEQ ID NO: 56762 - protein, 659 aa, Homo sapiens
MKGRGCWDTASVRSFCSSGCLNKFKKDDSGDDDEATTPADKSELHHTLKNLSLKLDDLSTCNDLIAKHGAALQRSLTELDGLKIPSESGEKLKVVNERATLFRITSNAMINACRDFLELAEIHSRKWQRALQYEQEQRVHLEETIEQLAKQHNSLERAFHSAPGRPANPSKSFIEGSLLTPKGEDSEEDEDTEYFDAMEDSTSFITVITEAKEDSRKAEGSTGTSSVDWSSADNVLDGASLVPKGSSKVKRRVRIPNKPNYSLNLWSIMKNCIGRELSRIPMPVNFNEPLSMLQRLTEDLEYHHLLDKAVHCTSSVEQMCLVAAFSVSSYSTTVHRIAKPFNPMLGETFELDRLDDMGLRSLCEQVSHHPPSAAHYVFSKHGWSLWQEITISSKFRGKYISIMPLGAIHLEFQASGNHYVWRKSTSTVHNIIVGKLWIDQSGDIEIVNHKTNDRCQLKFLPYSYFSKEAARKVTGVVSDSQGKAHYVLSGSWDEQMECSKVMHSSPSSPSSDGKQKTVYQTLSAKLLWKKYPLPENAENMYYFSELALTLNEHEEGVAPTDSRLRPDQRLMEKGRWDEANTEKQRLEEKQRLSRRRRLEACGPGSSCSSEEAEKEADAYTPLWFEKRLDPLTGEMACVYKGGYWEAKEKQDWHMCPNIF

SEQ ID NO: 56763 - protein, 460 aa, Homo sapiens
MEDSTSFITVITEAKEDRKAEGSTGTSSVDWSSADNVLDGASLVPKGSSKVKRRVRIPNKPNYSLNLWSIMKNCIGRELSRIPMPVNFNEPLSMLQRLTEDLEYHHLLDKAVHCTSSVEQMCLVAAFSVSSYSTTVHRIAKPFNPMLGETFELDRLDDMGLRSLCEQVSHHPPSAAHYVFSKHGWSLWQEITISSKFRGKYISIMPLGAIHLEFQASGNHYVWRKSTSTVHNIIVGKLWIDQSGDIEIVNHKTNDRCQLKFLPYSYFSKEAARKVTGVVSDSQGKAHYVLSGSWDEQMECSKVMHSSPSSPSSDGKQKTVYQTLSAKLLWKKYPLPENAENMYYFSELALTLNEHEEGVAPTDSRLRPDQRLMEKGRWDEANTEKQRLEEKQRLSRRRRLEACGPGSSCSSEEEKEADAYTPLWFEKRLDPLTGEMACVYKGGYWEAKEKQDWHMCPNIF

SEQ ID NO: 56764 - protein, 764 aa, Homo sapiens
MERAVQGTDGGGGSNSSSRSSSRATSAGSSPSCSLAGRGVSSRSAAAGLGGGGSRSSPGSVAASPSGGGGRRREPALEGVLSKYTNLLQGWQNRYFVLDFEAGILQYFVNEQSKHQKPRGVLSLSGAIVSLSDEAPHMLVVYSANGEMFKLRAADAKEKQFWVTQLRACAKYHMEMNSKSAPSSRSRSLTLLPHGTPNSASPCSQRHLSVGAPGVVTITHHKSPAAARRAKSQYSGQLHEVREMMNQVEGQQKNLVHAIESLPGSGPLTALDQDLLLLKATSAATLSCLGECLNLLQQSVHQAGQPSQKPGASENILGWHGSKSHSTEQLKNGTLGSLPSASANITWAILPNSAEDEQTSQPEPEPNSGSELVLSEDEKSDNEDKEETELGVMEDQRSIILHLISQLKLGMDLTKVVLPTFILEKRSLLEMYADFMAHPDLLLAITAGATPEERVICFVEYYLTAFHEGRKGALAKKPYNPIIGETFHCSWEVPKDRVKPKRTASRSPASCHEHPMADDPSKSYKLRFVAEQVSHHPPISCFYCECEEKRLCVNTHVWTKSKFMGMSVGVSMIGEGVLRLLEHGEEYVFTLPSAYARSILTIPWVELGGKVSINCAKTGYSATVIFHTKPFYGGKVHRVTAEVKHNPTNTIVCKAHGEWNGTLEFTYNNGETKVIDTTTLPVYPKKIRPLEKQGPMESRNLWREVTRYLRLGDIDAATEQKRHLEEKQRVEERKRENLRTPWKPKYFIQEGDGWVYFNPLWKAH

SEQ ID NO: 56765 - protein, 700 aa, Homo sapiens
MERAVQGTDGGGGSNSSSRSSSRATSAGSSPSCSLAGRGVSSRSAAAGLGGGGSRSSPGSVAASPSGGGGRRREPALEGVLSKYTNLLQGWQNRYFVLDFEAGILQYFVNEQSKHQKPRGVLSLSGAIVSLSDEAPHMLVVYSANGEMFKLRAADAKEKQFWVTQLRACAKYHMEMNSKMMNQVEGQQKNLVHAIESLPGSGPLTALDQDLLLLKATSAATLSCLGECLNLLQQSVHQAGQPSQKPGASENILGWHGSKSHSTEQLKNGTLGSLPSASANITWAILPNSAEDEQTSQPEPEPNSGSELVLSEDEKSDNEDKEETELGVMEDQRSIILHLISQLKLGMDLTKVVLPTFILEKRSLLEMYADFMAHPDLLLAITAGATPEERVICFVEYYLTAFHEGRKGALAKKPYNPIIGETFHCSWEVPKDRVKPKRTASRSPASCHEHPMADDPSKSYKLRFVAEQVSHHPPISCFYCECEEKRLCVNTHVWTKSKFMGMSVGVSMIGEGVLRLLEHGEEYVFTLPSAYARSILTIPWVELGGKVSINCAKTGYSATVIFHTKPFYGGKVHRVTAEVKHNPTNTIVCKAHGEWNGTLEFTYNNGETKVIDTTTLPVYPKKIRPLEKQGPMESRNLWREVTRYLRLGDIDAATEQKRHLEEKQRVEERKRENLRTPWKPKYFIQEGDGWVYFNPLWKAH

SEQ ID NO: 56766 - protein, 747 aa, Homo sapiens
MQGGEPVSTMKVSESEGKLEGQATAVTPNKNSSCGGGISSSSSSRGGSAKGWQYSDHMENVYGYLMKYTNLVTGWQYRFFVLNNEAGLLEYFVNEQSRNQKPRGTLQLAGAVISPSDEDSHTFTVNAASGEQYKLRATDAKERQHWVSRLQICTQHHTEAIGKNNPPLKSRSFSLASSSNSPISQRRPSQNAISFFNVGHSKLQSLSKRTNLPPDHLVEVREMMSHAEGQQRDLIRRIECLPTSGHLSSLDQDLLMLKATSMATMNCLNDCFHILQLQHASHQKGSLPSGTTIEWLEPKISLSNHYKNGADQPFATDQSKPVAVPEEQPVAESGLLAREPEEINADDEIEDTCDHKEDDLGAVEEQRSVILHLLSQLKLGMDLTRVVLPTFILEKRSLLEMYADFMSHPDLFIAITNGATAEDRMIRFVEYYLTSFHEGRKGAIAKKPYNPIIGETFHCSWKMPKSEVASSVFSSSSTQGVTNHAPLSGESLTQVGSDCYTVRFVAEQVSHHPPVSGFYAECTERKMCVNAHVWTKSKFLGMSIGVTMVGEGILSLLEHGEEYTFSLPCAYARSILTVPWVELGGKVSVNCAKTGYSASITFHTKPFYGGKLHRVTAEVKHNITNTVVCRVQGEWNSVLEFTYSNGETKYVDLTKLAVTKKRVRPLEKQDPFESRRLWKNVTDSLRESEIDKATEHKHTLEERQRTEERHRTETGTPWKTKYFIKEGDGWVYHKPLWKIIPTTQPAE

SEQ ID NO: 56767 - protein, 950 aa, Homo sapiens
MNTEAEQQLLHHARNGNAEEVRQLLETMARNEVIADINCKGRSKSNLGWTPLHLACYFGHRQVVQDLLKAGAEVNVLNDMGDTPLHRAAFTGRKELVMLLLEYNADTTIVNGSGQTAKEVTHAEEIRSMLEAVERTQQRKLEELLLAAAREGKTTELTALLNRPNPPDVNCSDQLGNTPLHCAAYRAHKQCALKLLRSGADPNLKNKNDQKPLDLAQGAEMKHILVGNKVIYKALKRYEGPLWKSSRFFGWRLFWVVLEHGVLSWYRKQPDAVHNIYRQGCKHLTQAVCTVKSTDSCLFFIKCFDDTIHGFRVPKNSLQQSREDWLEAIEEHSAYSTHYCSQDQLTDEEEEDTVSAADLKKSLEKAQSCQQRLDREISNFLKMIKECDMAKEMLPSFLQKVEVVSEASRETCVALTDCLNLFTKQEGVRNFKLEQEQEKNKILSEALETLATEHHELEQSLVKGSPPASILSEDEFYDALSDSESERSLSRLEAVTARSFEEEGEHLGSRKHRMSEEKDCGGGDALSNGIKKHRTSLPSPMFSRNDFSIWSILRKCIGMELSKITMPVIFNEPLSFLQRLTEYMEHTYLIHKASSLSDPVERMQCVAAFAVSAVASQWERTGKPFNPLLGETYELVRDDLGFRLISEQVSHHPPISAFHAEGLNNDFIFHGSIYPKLKFWGKSVEAEPKGTITLELLEHNEAYTWTNPTCCVHNIIVGKLWIEQYGNVEIINHKTGDKCVLNFKPCGLFGKELHKVEGYIQDKSKKKLCALYGKWTECLYSVDPATFDAYKKNDKKNTEEKKNSKQMSTSEELDEMPVPDSESVFIIPGSVLLWRIAPRPPNSAQMYNFTSFAMVLNEVDKDMESVIPKTDCRLRPDIRAMENGEIDQASEEKKRLEEKQRAARKNRSKSEEDWKTRWFHQGPNPYNGAQDWIYSGSYWDRNYFNLPDIY

SEQ ID NO: 56768 - protein, 568 aa, Homo sapiens
MIKECDMAKEMLPSFLQKVEVVSEASRETCVALTDCLNLFTKQEGVRNFKLEQEQEKNKILSEALETLATEHHELEQSLVKGSPPASILSEDEFYDALSDSESERSLSRLEAVTARSFEEEGEHLGSRKHRMSEEKDCGGGDALSNGIKKHRTSLPSPMFSRNDFSIWSILRKCIGMELSKITMPVIFNEPLSFLQRLTEYMEHTYLIHKASSLSDPVERMQCVAAFAVSAVASQWERTGKPFNPLLGETYELVRDDLGFRLISEQVSHHPPISAFHAEGLNNDFIFHGSIYPKLKFWGKSVEAEPKGTITLELLEHNEAYTWTNPTCCVHNIIVGKLWIEQYGNVEIINHKTGDKCVLNFKPCGLFGKELHKVEGYIQDKSKKKLCALYGKWTECLYSVDPATFDAYKKNDKKNTEEKKNSKQMSTSEELDEMPVPDSESVFIIPGSVLLWRIAPRPPNSAQMYNFTSFAMVLNEVDKDMESVIPKTDCRLRPDIRAMENGEIDQASEEKKRLEEKQRAARKNRSKSEEDWKTRWFHQGPNPYNGAQDWIYSGSYWDRNYFNLPDIY

SEQ ID NO: 56769 - protein, 100 aa, Homo sapiens
MNTEAEQQLLHHARNGNAEEVRQLLETMARNEVIADINCKGRSKSNLGWTPLHLACYFGHRQVVQDLLKAGAEVNVLNDMGDTPLHRAAFTGRKICSQGS

SEQ ID NO: 56770 - protein, 437 aa, Homo sapiens
MSEEKDCGGGDALSNGIKKHRTSLPSPMFSRNDFSIWSILRKCIGMELSKITMPVIFNEPLSFLQRLTEYMEHTYLIHKASSLSDPVERMQCVAAFAVSAVASQWERTGKPFNPLLGETYELVRDDLGFRLISEQVSHHPPISAFHAEGLNNDFIFHGSIYPKLKFWGKSVEAEPKGTITLELLEHNEAYTWTNPTCCVHNIIVGKLWIEQYGNVEIINHKTGDKCVLNFKPCGLFGKELHKVEGYIQDKSKKKLCALYGKWTECLYSVDPATFDAYKKNDKKNTEEKKNSKQMSTSEELDEMPVPDSESVFIIPGSVLLWRIAPRPPNSAQMYNFTSFAMVLNEVDKDMESVIPKTDCRLRPDIRAMENGEIDQASEEKKRLEEKQRAARKNRSKSEEDWKTRWFHQGPNPYNGAQDWIYSGSYWDRNYFNLPDIY

SEQ ID NO: 56771 - protein, 114 aa, Homo sapiens
MQSVAAFAVSAVASQWERTGKPFNPLLGETYELIREDLGFRFISEQVSHHPPISAFHSEGLNHDFLFHGSIYPKLKFWGKSVEAEPRGTITLELLNVNQRHLRAKHKSPTNAGR

SEQ ID NO: 56772 - protein, 480 aa, Homo sapiens
MNGEEEFFDAVTGFDSDNSSGEFSEANQKVTGMIDLDTSKNNRIGKTGERPSQENGIQKHRTSLPAPMFSRSDFSVWTILKKCVGLELSKITMPIAFNEPLSFLQRITEYMEHVYLIHRASCQPQPLERMQSVAAFAVSAVASQWERTGKPFNPLLGETYELIREDLGFRFISEQVSHHPPISAFHSEGLNHDFLFHGSIYPKLKFWGKSVEAEPRGTITLELLKHNEAYTWTNPTCCVHNVIIGKLWIEQYGTVEILNHRTGHKCVLHFKPCGLFGKELHKVEGHIQDKNKKKLFMIYGKWTECLWGIDPVSYESFKKQERRGDHLRKAKLDEDSGKADSDVADDVPVAQETVQVIPGSKLLWRINTRPPNSAQMYNFTSFTVSLNELETGMEKTLPPTDCRLRPDIRGMENGNMDLASQEKERLEEKQREARRERAKEEAEWQTRWFYPGNNPYTGTPDWLYAGDYFERNFSDCPDIY

SEQ ID NO: 56773 - protein, 468 aa, Homo sapiens
MNGEEEFFDAVTEANQKVTGMIDLDTSKNNRIGKTGERPSQENGIQKHRTSLPAPMFSRSDFSVWTILKKCVGLELSKITMPIAFNEPLSFLQRITEYMEHVYLIHRASCQPQPLERMQSVAAFAVSAVASQWERTGKPFNPLLGETYELIREDLGFRFISEQVSHHPPISAFHSEGLNHDFLFHGSIYPKLKFWGKSVEAEPRGTITLELLKHNEAYTWTNPTCCVHNVIIGKLWIEQYGTVEILNHRTGHKCVLHFKPCGLFGKELHKVEGHIQDKNKKKLFMIYGKWTECLWGIDPVSYESFKKQERRGDHLRKAKLDEDSGKADSDVADDVPVAQETVQVIPGSKLLWRINTRPPNSAQMYNFTSFTVSLNELETGMEKTLPPTDCRLRPDIRGMENGNMDLASQEKERLEEKQREARRERAKEEAEWQTRWFYPGNNPYTGTPDWLYAGDYFERNFSDCPDIY

SEQ ID NO: 56774 - protein, 370 aa, Homo sapiens
MPIAFNEPLSFLQRITEYMEHVYLIHRASCQPQPLERMQSVAAFAVSAVASQWERTGKPFNPLLGETYELIREDLGFRFISEQVSHHPPISAFHSEGLNHDFLFHGSIYPKLKFWGKSVEAEPRGTITLELLKHNEAYTWTNPTCCVHNVIIGKLWIEQYGTVEILNHRTGHKCVLHFKPCGLFGKELHKVEGHIQDKNKKKLFMIYGKWTECLWGIDPVSYESFKKQERRGDHLRKAKLDEDSGKADSDVADDVPVAQETVQVIPGSKLLWRINTRPPNSAQIWPARRRSGWRRSREKHGGSGPRRRQSGRRGGSTQAITPTLGPPTGCMQGITLSGISPTAQISTEGLEGPGARDRRLTRLDFLEWPL

SEQ ID NO: 56775 - protein, 112 aa, Homo sapiens
SVAAFAVSAVASQWERTGKPFNPLLGETYELIREDLGFRFISEQVSHHPPISAFHSEGLNHDFLFHGSIYPKLKFWGKSVEAEPRGTITLELLNVNQRHLRAKHKSPTNAGR

SEQ ID NO: 56776 - protein, 887 aa, Homo sapiens
MMSDEKNLGVSQKLVSPSRSTSSCSSKQGSRQDSWEVVEGLRGEMNYTQEPPVQKGFLLKKRKWPLKGWHKRFFYLDKGILKYAKSQTDIEREKLHGCIDVGLSVMSVKKSSKCIDLDTEEHIYHLKVKSEEVFDEWVSKLRHHRMYRQNEIAMFPHEVNHFFSGSTITDSSSGVFDSISSRKRSSISKQNLFQTGSNVSFSCGGETRVPLWLQSSEDMEKCSKDLAHCHAYLVEMSQLLQSMDVLHRTYSAPAINAIQGGSFESPKKEKRSHRRWRSRAIGKDAKGTLQVPKPFSGPVRLHSSNPNLSTLDFGEEKNYSDGSETSSEFSKMQEDLCHIAHKVYFTLRSAFNIMSAEREKLKQLMEQDASSSPSAQVIGLKNALSSALAQNTDLKERLRRIHAESLLLDSPAVAKSGDNLAEENSRDENRALVHQLSNESRLSITDSLSEFFDAQEVLLSPSSSENEISDDDSYVSDISDNLSLDNLSNDLDNERQTLGPVLDSGREAKSRRRTCLPAPCPSSSNISLWNILRNNIGKDLSKVAMPVELNEPLNTLQRLCEELEYSELLDKAAQIPSPLERMVYVAAFAISAYASSYYRAGSKPFNPVLGETYECIREDKGFQFFSEQVSHHPPISACHAESRNFVFWQDVRWKNKFWGKSMEIVPIGTTHVTLPVFGDHFEWNKVTSCIHNILSGQRWIEHYGEIVIKNLHDDSCYCKVNFIKAKYWSTNAHEIEGTVFDRSGKAVHRLFGKWHESIYCGGGSSSACVWRANPMPKGYEQYYSFTQFALELNEMDPSSKSLLPPTDTRFRPDQRFLEEGNLEEAEIQKQRIEQLQRERRRVLEENHVEHQPRFFRKSDDDSWVSNGTYLELRKDLGFSKLDHPVLW

SEQ ID NO: 56777 - protein, 856 aa, Homo sapiens
MMSDEKNLGVSQKLVSPSRSTSSCSSKQGSRQDSWEVVEGLRGEMNYTQEPPVQKGFLLKKRKWPLKGWHKRFFYLDKGILKYAKSQTDIEREKLHGCIDVGLSVMSVKKSSKCIDLDTEEHIYHLKVKSEEVFDEWVSKLRHHRMYRQNEIAMFPHEVNHFFSGSTITDSSSGVFDSISSRKRSSISKQNLFQTGSNVSFSCGGETRVPLWLQSSEDMEKCSKDLAHCHAYLVEMSQLLQSMDVLHRTYSAPAINAIQVPKPFSGPVRLHSSNPNLSTLDFGEEKNYSDGSETSSEFSKMQEDLCHIAHKVYFTLRSAFNIMSAEREKLKQLMEQDASSSPSAQVIGLKNALSSALAQNTDLKERLRRIHAESLLLDSPAVAKSGDNLAEENSRDENRALVHQLSNESRLSITDSLSEFFDAQEVLLSPSSSENEISDDDSYVSDISDNLSLDNLSNDLDNERQTLGPVLDSGREAKSRRRTCLPAPCPSSSNISLWNILRNNIGKDLSKVAMPVELNEPLNTLQRLCEELEYSELLDKAAQIPSPLERMVYVAAFAISAYASSYYRAGSKPFNPVLGETYECIREDKGFQFFSEQVSHHPPISACHAESRNFVFWQDVRWKNKFWGKSMEIVPIGTTHVTLPVFGDHFEWNKVTSCIHNILSGQRWIEHYGEIVIKNLHDDSCYCKVNFIKAKYWSTNAHEIEGTVFDRSGKAVHRLFGKWHESIYCGGGSSSACVWRANPMPKGYEQYYSFTQFALELNEMDPSSKSLLPPTDTRFRPDQRFLEEGNLEEAEIQKQRIEQLQRERRRVLEENHVEHQPRFFRKSDDDSWVSNGTYLELRKDLGFSKLDHPVLW

SEQ ID NO: 56778 - protein, 851 aa, Homo sapiens
MMSDEKNLGVSQKLVSPSRSTSSCSSKQGSRQDSWEVVEGLRGEMNYTQEPPVQKGFLLKKRKWPLKGWHKRFFYLDKGILKYAKSQTDIEREKLHGCIDVGLSVMSVKKSSKCIDLDTEEHIYHLKVKSEEVFDEWVSKLRHHRMYRQNEIAMFPHEVNHFFSGSTITDSSSGVFDSISSRKRSSISKQNLFQTGSNVSFSCGGETRVPLWLQSSEDMEKCSKDLAHCHAYLVEMSQLLQSMDVLHRTYSAPAINAIQGGSFESPKKEKRSHRRWRSRAIGKDAKGTLQVPKPFSGPVRLHSSNPNLSTLDFGEEKNYSDGSETSSEFSKMQEDLCHIAHKVYFTLRSAFNIMSAEREKLKQLMEQDASSSPSAQVIGLKNALSSENSRDENRALVHQLSNESRLSITDSLSEFFDAQEVLLSPSSSENEISDDDSYVSDISDNLSLDNLSNDLDNERQTLGPVLDSGREAKSRRRTCLPAPCPSSSNISLWNILRNNIGKDLSKVAMPVELNEPLNTLQRLCEELEYSELLDKAAQIPSPLERMVYVAAFAISAYASSYYRAGSKPFNPVLGETYECIREDKGFQFFSEQVSHHPPISACHAESRNFVFWQDVRWKNKFWGKSMEIVPIGTTHVTLPVFGDHFEWNKVTSCIHNILSGQRWIEHYGEIVIKNLHDDSCYCKVNFIKAKYWSTNAHEIEGTVFDRSGKAVHRLFGKWHESIYCGGGSSSACVWRANPMPKGYEQYYSFTQFALELNEMDPSSKSLLPPTDTRFRPDQRFLEEGNLEEAEIQKQRIEQLQRERRRVLEENHVEHQPRFFRKSDDDSWVSNGTYLELRKDLGFSKLDHPVLW

SEQ ID NO: 56779 - protein, 851 aa, Homo sapiens; identical to SEQ ID NO: 56778

SEQ ID NO: 56780 - protein, 856 aa, Homo sapiens; identical to SEQ ID NO: 56777

SEQ ID NO: 56781 - protein, 820 aa, Homo sapiens
MMSDEKNLGVSQKLVSPSRSTSSCSSKQGSRQDSWEVVEGLRGEMNYTQEPPVQKGFLLKKRKWPLKGWHKRFFYLDKGILKYAKSQTDIEREKLHGCIDVGLSVMSVKKSSKCIDLDTEEHIYHLKVKSEEVFDEWVSKLRHHRMYRQNEIAMFPHEVNHFFSGSTITDSSSGVFDSISSRKRSSISKQNLFQTGSNVSFSCGGETRVPLWLQSSEDMEKCSKDLAHCHAYLVEMSQLLQSMDVLHRTYSAPAINAIQVPKPFSGPVRLHSSNPNLSTLDFGEEKNYSDGSETSSEFSKMQEDLCHIAHKVYFTLRSAFNIMSAEREKLKQLMEQDASSSPSAQVIGLKNALSSENSRDENRALVHQLSNESRLSITDSLSEFFDAQEVLLSPSSSENEISDDDSYVSDISDNLSLDNLSNDLDNERQTLGPVLDSGREAKSRRRTCLPAPCPSSSNISLWNILRNNIGKDLSKVAMPVELNEPLNTLQRLCEELEYSELLDKAAQIPSPLERMVYVAAFAISAYASSYYRAGSKPFNPVLGETYECIREDKGFQFFSEQVSHHPPISACHAESRNFVFWQDVRWKNKFWGKSMEIVPIGTTHVTLPVFGDHFEWNKVTSCIHNILSGQRWIEHYGEIVIKNLHDDSCYCKVNFIKAKYWSTNAHEIEGTVFDRSGKAVHRLFGKWHESIYCGGGSSSACVWRANPMPKGYEQYYSFTQFALELNEMDPSSKSLLPPTDTRFRPDQRFLEEGNLEEAEIQKQRIEQLQRERRRVLEENHVEHQPRFFRKSDDDSWVSNGTYLELRKDLGFSKLDHPVLW

SEQ ID NO: 56782 - protein, 112 aa, Homo sapiens
MMSDEKNLGVSQKLVSPSRSTSSCSSKQGSRQDSWEVVEGLRGEMNYTQEPPVQKGFLLKKRKWPLKGWHKRFFYLDKGILKYAKSQTDIEREKLHGCIDVGLSVMSVKKSS

SEQ ID NO: 56783 - protein, 61 aa, Homo sapiens
MMSDEKNLGVSQKLVSPSRSTSSCSSKQGSRQDSWEVVEGLRGEMNYTQEPPVQKGFLLKK

SEQ ID NO: 56784 - protein, 820 aa, Homo sapiens; identical to SEQ ID NO: 56781

SEQ ID NO: 56785 - protein, 89 aa, Homo sapiens
MMSDEKNLGVSQKLVSPSRSTSSCSSKQGSRQDSWEVVEGLRGEMNYTQEPPVQKGFLLKKRKWPLKGWHKRFFYLDKGILKYAKSQTD

SEQ ID NO: 56786 - protein, 879 aa, Homo sapiens
MKEEAFLRRRFSLCPPSSTPQKVDPRKLTRNLLLSGDNELYPLSPGKDMEPNGPSLPRDEGPPTPSSATKVPPAEYRLCNGSDKECVSPTARVTKKETLKAQKENYRQEKKRATRQLLSALTDPSVVIMADSLKIRGTLKSWTKLWCVLKPGVLLIYKTPKVGQWVGTVLLHCCELIERPSKKDGFCFKLFHPLDQSVWAVKGPKGESVGSITQPLPSSYLIFRAASESDGRCWLDALELALRCSSLLRLGTCKPGRDGEPGTSPDASPSSLCGLPASATVHPDQDLFPLNGSSLENDAFSDKSERENPEESDTETQDHSRKTESGSDQSETPGAPVRRGTTYVEQVQEELGELGEASQVETVSEENKSLMWTLLKQLRPGMDLSRVVLPTFVLEPRSFLNKLSDYYYHADLLSRAAVEEDAYSRMKLVLRWYLSGFYKKPKGIKKPYNPILGETFRCCWFHPQTDSRTFYIAEQVSHHPPVSAFHVSNRKDGFCISGSITAKSRFYGNSLSALLDGKATLTFLNRAEDYTLTMPYAHCKGILYGTMTLELGGKVTIECAKNNFQAQLEFKLKPFFGGSTSINQISGKITSGEEVLASLSGHWDRDVFIKEEGSGSSALFWTPSGEVRRQRLRQHTVPLEEQTELESERLWQHVTRAISKGDQHRATQEKFALEEAQRQRARERQESLMPWKPQLFHLDPITQEWHYRYEDHSPWDPLKDIAQFEQDGILRTLQQEAVARQTTFLGSPGPRHERSGPDQRLRKASDQPSGHSQATESSGSTPESCPELSDEEQDGDFVPGGESPCPRCRKEARRLQALHEAILSIREAQQELHRHLSAMLSSTARAAQAPTPGLLQSPRSWFLLCVFLACQLFINHILK

SEQ ID NO: 56787 - protein, 811 aa, Homo sapiens
MKEEAFLRRRFSLCPPSSTPQKVDPRKLTRNLLLSGDNELYPLSPGKDMEPNGPSLPRDEGPPTPSSATKVPPAEYRLCNGSDKECVSPTARVTKKETLKAQKENYRQEKKRATRQLLSALTDPSVVIMADSLKGPKGESVGSITQPLPSSYLIFRAASESDGRCWLDALELALRCSSLLRLGTCKPGRDGEPGTSPDASPSSLCGLPASATVHPDQDLFPLNGSSLENDAFSDKSERENPEESDTETQDHSRKTESGSDQSETPGAPVRRGTTYVEQVQEELGELGEASQVETVSEENKSLMWTLLKQLRPGMDLSRVVLPTFVLEPRSFLNKLSDYYYHADLLSRAAVEEDAYSRMKLVLRWYLSGFYKKPKGIKKPYNPILGETFRCCWFHPQTDSRTFYIAEQVSHHPPVSAFHVSNRKDGFCISGSITAKSRFYGNSLSALLDGKATLTFLNRAEDYTLTMPYAHCKGILYGTMTLELGGKVTIECAKNNFQAQLEFKLKPFFGGSTSINQISGKITSGEEVLASLSGHWDRDVFIKEEGSGSSALFWTPSGEVRRQRLRQHTVPLEEQTELESERLWQHVTRAISKGDQHRATQEKFALEEAQRQRARERQESLMPWKPQLFHLDPITQEWHYRYEDHSPWDPLKDIAQFEQDGILRTLQQEAVARQTTFLGSPGPRHERSGPDQRLRKASDQPSGHSQATESSGSTPESCPELSDEEQDGDFVPGGESPCPRCRKEARRLQALHEAILSIREAQQELHRHLSAMLSSTARAAQAPTPGLLQSPRSWFLLCVFLACQLFINHILK

SEQ ID NO: 56788 - protein, 439 aa, Homo sapiens
MDLSRVVLPTFVLEPRSFLNKLSDYYYHADLLSRAAVEEDAYSRMKLVLRWYLSGFYKKPKGIKKPYNPILGETFRCCWFHPQTDSRTFYIAEQVSHHPPVSAFHVSNRKDGFCISGSITAKSRFYGNSLSALLDGKATLTFLNRAEDYTLTMPYAHCKGILYGTMTLELGGKVTIECAKNNFQAQLEFKLKPFFGGSTSINQISGKITSGEEVLASLSGHWDRDVFIKEEGSGSSALFWTPSGEVRRQRLRQHTVPLEEQTELESERLWQHVTRAISKGDQHRATQEKFALEEAQRQRARERQESLMPWKPQLFHLDPITQEWHYRYEDHSPWDPLKDIAQFEQDGILRTLQQEAVARQTTFLGSPGPRHERSGPDQRLRKASDQPSGHSQATESSGSTPESCPELHGTGSTGTDPRPPAEPPILVPALRVPGVSAVH

SEQ ID NO: 56789 - protein, 811 aa, Homo sapiens; identical to SEQ ID NO: 56787

SEQ ID NO: 56790 - protein, 124 aa, Homo sapiens
MKEEAFLRRRFSLCPPSSTPQKVDPRKLTRNLLLSGDNELYPLSPGKDMEPNGPSLPRDEGPPTPSSATKVPPAEYRLCNGSDKECVSPTARVTKKETLKAQKENYRQEKKRATRQLLSALTDP

SEQ ID NO: 56791 - protein, 98 aa, Homo sapiens
MKEEAFLRRRFSLCPPSSTPQKVDPRKLTRNLLLSGDNELYPLSPGKDMEPNGPSLPRDEGPPTPSSATKVPPAEYRLCNGSDKECVSPTARVTKKET

SEQ ID NO: 56792 - protein, 139 aa, Homo sapiens
MKEEAFLRRRFSLCPPSSTPQKVDPRKLTRNLLLSGDNELYPLSPGKDMEPNGPSLPRDEGPPTPSSATKVPPAEYRLCNGSDKECVSPTARVTKKETLKAQKENYRQEKKRATRQLLSALTDPSVVIMADSLKIRGTL

SEQ ID NO: 56793 - protein, 90 aa, Homo sapiens
MKEEAFLRRRFSLCPPSSTPQKVDPRKLTRNLLLSGDNELYPLSPGKDMEPNGPSLPRDEGPPTPSSATKVPPAEYRLCNGSDKECVSPT

SEQ ID NO: 56794 - protein, 69 aa, Homo sapiens
MKEEAFLRRRFSLCPPSSTPQKVDPRKLTRNLLLSGDNELYPLSPGKDMEPNGPSLPRDEGPPTPSSAT

SEQ ID NO: 56795 - protein, 432 aa, Homo sapiens
YNPILGETFRCCWFHPQTDSRTFYIAEQVSHHPPVSAFHVSNRKDGFCISGSITAKSRFYGNSLSALLDGKATLTFLNRAEDYTLTMPYAHCKGILYGTMTLELGGKVTIECAKNNFQAQLEFKLKPFFGGSTSINQISGKITSGEEVLASLSGHWDRDVFIKEEGSGSSALFWTPSGEVRRQRLRQHTVPLEEQTELESERLWQHVTRAISKGDQHRATQEKFALEEAQRQRARERQESLMPWKPQLFHLDPITQEWHYRYEDHSPWDPLKDIAQFEQDGILRTLQQEAVARQTTFLGSPGPRHERSGPDQRLRKASDQPSGHSQATESSGSTPESCPELSDEEQDGDFVPGGESPCPRCRKEARRLQALHEAILSIREAQQELHRHLSAMLSSTARAAQAPTPGLLQSPRSWFLLCVFLACQLFINHILK

SEQ ID NO: 56796 - protein, 510 aa, Homo sapiens
MCVPHRQGHQEGDSQGAEGELPAGEEPRSFLNKLSDYYYHADLLSRAAVEEDAYSRMKLVLRWYLSGFYKKPKGIKKPYNPILGETFRCCWFHPQTDSRTFYIAEQVSHHPPVSAFHVSNRKDGFCISGSITAKSRFYGNSLSALLDGKATLTFLNRAEDYTLTMPYAHCKGILYGTMTLELGGKVTIECAKNNFQAQLEFKLKPFFGGSTSINQISGKITSGEEVLASLSGHWDRDVFIKEEGSGSSALFWTPSGEVRRQRLRQHTVPLEEQTELESERLWQHVTRAISKGDQHRATQEKFALEEAQRQRARERQESLMPWKPQLFHLDPITQEWHYRYEDHSPWDPLKDIAQFEQDGILRTLQQEAVARQTTFLGSPGPRHERSGPDQRLRKASDQPSGHSQATESSGSTPESCPELSDEEQDGDFVPGGESPCPRCRKEARRLQALHEAILSIREAQQELHRHLSAMLSSTARAAQAPTPGLLQSPRSWFLLCVFLACQLFINHILK

SEQ ID NO: 56797 - protein, 934 aa, Homo sapiens
MSSDEKGISPAHKTSTPTHRSASSSTSSQRDSRQSIHILERTASSSTEPSVSRQLLEPEPVPLSKEADSWEIIEGLKIGQTNVQKPDKHEGFMLKKRKWPLKGWHKRFFVLDNGMLKYSKAPLDIQKGKVHGSIDVGLSVMSIKKKARRIDLDTEEHIYHLKVKSQDWFDAWVSKLRHHRLYRQNEIVRSPRDASFHIFPSTSTAESSPAANVSVMDGKMQPNSFPWQSPLPCSNSLPATCTTGQSKVAAWLQDSEEMDRCAEDLAHCQSNLVELSKLLQNLEILQRTQSAPNFTDMQANCVDISKKDKRVTRRWRTKSVSKDTKIQLQVPFSATMSPVRLHSSNPNLCADIEFQTPPSHLTDPLESSTDYTKLQEEFCLIAQKVHSLLKSAFNSIAIEKEKLKQMVSEQDHSKGHSTQMARLRQSLSQALNQNAELRSRLNRIHSESIICDQVVSVNIIPSPDEAGEQIHVSLPLSQQVANESRLSMSESVSEFFDAQEVLLSASSSENEASDDESYISDVSDNISEDNTSVADNISRQILNGELTGGAFRNGRRACLPAPCPDTSNINLWNILRNNIGKDLSKVSMPVELNEPLNTLQHLCEEMEYSELLDKASETDDPYERMVLVAAFAVSGYCSTYFRAGSKPFNPVLGETYECIREDKGFRFFSEQVSHHPPISACHCESKNFVFWQDIRWKNKFWGKSMEILPVGTLNVMLPKYGDYYVWNKVTTCIHNILSGRRWIEHYGEVTIRNTKSSVCICKLTFVKVNYWNSNMNEVQGVVIDQEGKAVYRLFGKWHEGLYCGVAPSAKCIWRPGSMPTNYELYYGFTRFAIELNELDPVLKDLLPPTDARFRPDQRFLEEGNLEAAASEKQRVEELQRSRRRYMEENNLEHIPKFFKKVIDANQREAWVSNDTYWELRKDPGFSKVDSPVLW

SEQ ID NO: 56798 - protein, 938 aa, Homo sapiens
MHQLSLIRGNRGRSIHILERTASSSTEPSVSRQLLEPEPVPLSKEADSWEIIEGLKIGQTNVQKPDKHEGFMLKKRKWPLKGWHKRFFVLDNGMLKYSKAPLDIQKGKVHGSIDVGLSVMSIKKKARRIDLDTEEHIYHLKVKSQDWFDAWVSKLRHHRLYRQNEIVRSPRDASFHIFPSTSTAESSPAANVSVMDGKMQPNSFPWQSPLPCSNSLPATCTTGQSKVAAWLQDSEEMDRCAEDLAHCQSNLVELSKLLQNLEILQRTQSAPNFTDMQANCVDISKKDKRVTRRWRTKSVSKDTKIQLQEGPPAKGQFSTTRRRQRLAAAVATTVPFSATMSPVRLHSSNPNLCADIEFQTPPSHLTDPLESSTDYTKLQEEFCLIAQKVHSLLKSAFNSIAIEKEKLKQMVSEQDHSKGHSTQMARLRQSLSQALNQNAELRSRLNRIHSESIICDQVVSVNIIPSPDEAGEQIHVSLPLSQQVANESRLSMSESVSEFFDAQEVLLSASSSENEASDDESYISDVSDNISEDNTSVADNISRQILNGELTGGAFRNGRRACLPAPCPDTSNINLWNILRNNIGKDLSKVSMPVELNEPLNTLQHLCEEMEYSELLDKASETDDPYERMVLVAAFAVSGYCSTYFRAGSKPFNPVLGETYECIREDKGFRFFSEQVSHHPPISACHCESKNFVFWQDIRWKNKFWGKSMEILPVGTLNVMLPKYGDYYVWNKVTTCIHNILSGRRWIEHYGEVTIRNTKSSVCICKLTFVKVNYWNSNMNEVQGVVIDQEGKAVYRLFGKWHEGLYCGVAPSAKCIWRPGSMPTNYELYYGFTRFAIELNELDPVLKDLLPPTDARFRPDQRFLEEGNLEAAASEKQRVEELQRSRRRYMEENNLEHIPKFFKKVIDANQREAWVSNDTYWELRKDPGFSKVDSPVLW

SEQ ID NO: 56799 - protein, 898 aa, Homo sapiens
MSSDEKGISPAHKTSTPTHRSASSSTSSQRDSRQSIHILERTASSSTEPSVSRQLLEPEPVPLSKEADSWEIIEGLKIGQTNVQKPDKHEGFMLKKRKWPLKGWHKRFFVLDNGMLKYSKAPLDIQKGKVHGSIDVGLSVMSIKKKARRIDLDTEEHIYHLKVKSQDWFDAWVSKLRHHRLYRQNEIVRSPRDASFHIFPSTSTAESSPAANVSVMDGKMQPNSFPWQSPLPCSNSLPATCTTGQSKVAAWLQDSEEMDRCAEDLAHCQSNLVELSKLLQNLEILQRTQSAPNFTDMQANCVDISKKDKRVTRRWRTKSVSKDTKIQLQVPFSATMSPVRLHSSNPNLCADIEFQTPPSHLTDPLESSTDYTKLQEEFCLIAQKVHSLLKSAFNSIAIEKEKLKQMVSEQDHSKGHSTQMARLRQSLSQAGEQIHVSLPLSQQVANESRLSMSESVSEFFDAQEVLLSASSSENEASDDESYISDVSDNISEDNTSVADNISRQILNGELTGGAFRNGRRACLPAPCPDTSNINLWNILRNNIGKDLSKVSMPVELNEPLNTLQHLCEEMEYSELLDKASETDDPYERMVLVAAFAVSGYCSTYFRAGSKPFNPVLGETYECIREDKGFRFFSEQVSHHPPISACHCESKNFVFWQDIRWKNKFWGKSMEILPVGTLNVMLPKYGDYYVWNKVTTCIHNILSGRRWIEHYGEVTIRNTKSSVCICKLTFVKVNYWNSNMNEVQGVVIDQEGKAVYRLFGKWHEGLYCGVAPSAKCIWRPGSMPTNYELYYGFTRFAIELNELDPVLKDLLPPTDARFRPDQRFLEEGNLEAAASEKQRVEELQRSRRRYMEENNLEHIPKFFKKVIDANQREAWVSNDTYWELRKDPGFSKVDSPVLW

SEQ ID NO: 56800 - protein, 190 aa, Homo sapiens
MDGKMQPNSFPWQSPLPCSNSLPATCTTGQSKVAAWLQDSEEMDRCAEDLAHCQSNLVELSKLLQNLEILQRTQSAPNFTDMQANCVDISKKDKRVTRRWRTKSVSKDTKIQLQVPFSATMSPVRLHSSNPNLCADIEFQTPPPNHFGILSVLLQPYSLKKKKKKKKKSTPSLESRIKGAEYKIQSLTSL

SEQ ID NO: 56801 - protein, 959 aa, Homo sapiens
MSSDEKGISPAHKTSTPTHRSASSSTSSQRDSRQSIHILERTASSSTEPSVSRQLLEPEPVPLSKEADSWEIIEGLKIGQTNVQKPDKHEGFMLKKRKWPLKGWHKRFFVLDNGMLKYSKAPLDIQKGKVHGSIDVGLSVMSIKKKARRIDLDTEEHIYHLKVKSQDWFDAWVSKLRHHRLYRQNEIVRSPRDASFHIFPSTSTAESSPAANVSVMDGKMQPNSFPWQSPLPCSNSLPATCTTGQSKVAAWLQDSEEMDRCAEDLAHCQSNLVELSKLLQNLEILQRTQSAPNFTDMQANCVDISKKDKRVTRRWRTKSVSKDTKIQLQEGPPAKGQFSTTRRRQRLAAAVATTVPFSATMSPVRLHSSNPNLCADIEFQTPPSHLTDPLESSTDYTKLQEEFCLIAQKVHSLLKSAFNSIAIEKEKLKQMVSEQDHSKGHSTQMARLRQSLSQALNQNAELRSRLNRIHSESIICDQVVSVNIIPSPDEAGEQIHVSLPLSQQVANESRLSMSESVSEFFDAQEVLLSASSSENEASDDESYISDVSDNISEDNTSVADNISRQILNGELTGGAFRNGRRACLPAPCPDTSNINLWNILRNNIGKDLSKVSMPVELNEPLNTLQHLCEEMEYSELLDKASETDDPYERMVLVAAFAVSGYCSTYFRAGSKPFNPVLGETYECIREDKGFRFFSEQVSHHPPISACHCESKNFVFWQDIRWKNKFWGKSMEILPVGTLNVMLPKYGDYYVWNKVTTCIHNILSGRRWIEHYGEVTIRNTKSSVCICKLTFVKVNYWNSNMNEVQGVVIDQEGKAVYRLFGKWHEGLYCGVAPSAKCIWRPGSMPTNYELYYGFTRFAIELNELDPVLKDLLPPTDARFRPDQRFLEEGNLEAAASEKQRVEELQRSRRRYMEENNLEHIPKFFKKVIDANQREAWVSNDTYWELRKDPGFSKVDSPVLW

SEQ ID NO: 56802 - protein, 903 aa, Homo sapiens
MSSDEKGISPAHKTSTPTHRSASSSTSSQRDSRQSIHILERTASSSTEPSVSRQLLEPEPVPLSKEADSWEIIEGLKIGQTNVQKPDKHEGFMLKKRKWPLKGWHKRFFVLDNGMLKYSKAPLDIQKGKVHGSIDVGLSVMSIKKKARRIDLDTEEHIYHLKVKSQDWFDAWVSKLRHHRLYRQNEIVRSPRDASFHIFPSTSTAESSPAANVSVMDGKMQPNSFPWQSPLPCSNSLPATCTTGQSKVAAWLQDSEEMDRCAEDLAHCQSNLVELSKLLQNLEILQRTQSAPNFTDMQVPFSATMSPVRLHSSNPNLCADIEFQTPPSHLTDPLESSTDYTKLQEEFCLIAQKVHSLLKSAFNSIAIEKEKLKQMVSEQDHSKGHSTQMARLRQSLSQALNQNAELRSRLNRIHSESIICDQVVSVNIIPSPDEAGEQIHVSLPLSQQVANESRLSMSESVSEFFDAQEVLLSASSSENEASDDESYISDVSDNISEDNTSVADNISRQILNGELTGGAFRNGRRACLPAPCPDTSNINLWNILRNNIGKDLSKVSMPVELNEPLNTLQHLCEEMEYSELLDKASETDDPYERMVLVAAFAVSGYCSTYFRAGSKPFNPVLGETYECIREDKGFRFFSEQVSHHPPISACHCESKNFVFWQDIRWKNKFWGKSMEILPVGTLNVMLPKYGDYYVWNKVTTCIHNILSGRRWIEHYGEVTIRNTKSSVCICKLTFVKVNYWNSNMNEVQGVVIDQEGKAVYRLFGKWHEGLYCGVAPSAKCIWRPGSMPTNYELYYGFTRFAIELNELDPVLKDLLPPTDARFRPDQRFLEEGNLEAAASEKQRVEELQRSRRRYMEENNLEHIPKFFKKVIDANQREAWVSNDTYWELRKDPGFSKVDSPVLW

SEQ ID NO: 56803 - protein, 842 aa, Homo sapiens
MDFQERDPPFLPESAQSSKPSSAQQASELWEVVEEPRVRLGTEGVMPERQEGHLLKKRKWPLKGWHKRYFVLEDGILHYATTRQDITKGKLHGSIDVRLSVMSINKKAQRIDLDTEDNIYHLKIKSQDLFQSWVAQLRAHRLAHRLDMPRGSLPSTAHRKVPGAQLPTAATASALPGLGPREKVSSWLRDSDGLDRCSHELSECQGKLQELHRLLQSLESLHRIPSAPVIPTHQASVTTERPKKGKRTSRMWCTQSFAKDDTIGRVGRLHGSVPNLSRYLESRDSSGTRGLPPTDYAHLQRSFWALAQKVHSSLSSVLAALTMERDQLRDMHQGSELSRMGVSEASTGQRRLHSLSTSSDTTADSFSSLNPEEQEALYMKGRELTPQLSQTSILSLADSHTEFFDACEVLLSASSSENEGSEEEESCTSEITTSLSEEMLDLRGAERCQKGGCVPGRPMGPPRRRCLPAASGPGADVSLWNILRNNIGKDLSKVSMPVQLNEPLNTLQRLCEELEYSSLLDQASRIADPCERMVYIAAFAVSAYSSTYHRAGCKPFNPVLGETYECERPDRGFRFISEQVSHHPPISACHAESENFAFWQDMKWKNKFWGKSLEIVPVGTVNVSLPRFGDHFEWNKVTSCIHNVLSGQRWIEHYGEVLIRNTQDSSCHCKITFCKAKYWSSNVHEVQGAVLSRSGRVLHRLFGKWHEGLYRGPTPGGQCIWKPNSMPPDHERNFGFTQFALELNELTAELKRSLPSTDTRLRPDQRYLEEGNIQAAEAQKRRIEQLQRDRRKVMEENNIVHQARFFRRQTDSSGKEWWVTNNTYWRLRAEPGYGNMDGAVLW

SEQ ID NO: 56804 - protein, 842 aa, Homo sapiens; identical to SEQ ID NO: 56803

SEQ ID NO: 56805 - protein, 889 aa, Homo sapiens
MEGGLADGEPDRTSLLGDSKDVLGPSTVVANSDESQLLTPGKMSQRQGKEAYPTPTKDLHQPSLSPASPHSQGFERGKEDISQNKDESSLSMSKSKSESKLYNGSEKDSSTSSKLTKKESLKVQKKNYREEKKRATKELLSTITDPSVIVMADWLKIRGTLKSWTKLWCVLKPGVLLIYKTQKNGQWVGTVLLNACEIIERPSKKDGFCFKLFHPLEQSIWAVKGPKGEAVGSITQPLPSSYLIIRATSESDGRCWMDALELALKCSSLLKRTMIREGKEHDLSVSSDSTHVTFYGLLRANNLHSGDNFQLNDSEIERQHFKDQDMYSDKSDKENDQEHDESDNEVMGKSEESDTDTSERQDDSYIEPEPVEPLKETTYTEQSHEELGEAGEASQTETVSEENKSLIWTLLKQVRPGMDLSKVVLPTFILEPRSFLDKLSDYYYHADFLSEAALEENPYFRLKKVVKWYLSGFYKKPKGLKKPYNPILGETFRCLWIHPRTNSKTFYIAEQVSHHPPISAFYVSNRKDGFCLSGSILAKSKFYGNSLSAILEGEARLTFLNRGEDYVMTMPYAHCKGILYGTMTLELGGTVNITCQKTGYSAILEFKLKPFLGSSDCVNQISGKLKLGKEVLATLEGHWDSEVFITDKKTDNSEVFWNPTPDIKQWRLIRHTVKFEEQGDFESEKLWQRVTRAINAKDQTEATQEKYVLEEAQRQAARDRKTKNEEWSCKLFELDPLTGEWHYKFADTRPWDPLNDMIQFEKDGVIQTKVKHRTPMVSVPKMKHKPTRQQKKVAKGYSSPEPDIQDSSGSEAQSVKPSTRRKKGIELGDIQSSIESIKQTQEEIKRNIMALRNHLVSSTPATDYFLQQKDYFIIFLLILLQVIINFMFK

SEQ ID NO: 56806 - protein, 847 aa, Homo sapiens
MSQRQGKEAYPTPTKDLHQPSLSPASPHSQGFERGKEDISQNKDESSLSMSKSKSESKLYNGSEKDSSTSSKLTKKESLKVQKKNYREEKKRATKELLSTITDPSVIVMADWLKIRGTLKSWTKLWCVLKPGVLLIYKTQKNGQWVGTVLLNACEIIERPSKKDGFCFKLFHPLEQSIWAVKGPKGEAVGSITQPLPSSYLIIRATSESDGRCWMDALELALKCSSLLKRTMIREGKEHDLSVSSDSTHVTFYGLLRANNLHSGDNFQLNDSEIERQHFKDQDMYSDKSDKENDQEHDESDNEVMGKSEESDTDTSERQDDSYIEPEPVEPLKETTYTEQSHEELGEAGEASQTETVSEENKSLIWTLLKQVRPGMDLSKVVLPTFILEPRSFLDKLSDYYYHADFLSEAALEENPYFRLKKVVKWYLSGFYKKPKGLKKPYNPILGETFRCLWIHPRTNSKTFYIAEQVSHHPPISAFYVSNRKDGFCLSGSILAKSKFYGNSLSAILEGEARLTFLNRGEDYVMTMPYAHCKGILYGTMTLELGGTVNITCQKTGYSAILEFKLKPFLGSSDCVNQISGKLKLGKEVLATLEGHWDSEVFITDKKTDNSEVFWNPTPDIKQWRLIRHTVKFEEQGDFESEKLWQRVTRAINAKDQTEATQEKYVLEEAQRQAARDRKTKNEEWSCKLFELDPLTGEWHYKFADTRPWDPLNDMIQFEKDGVIQTKVKHRTPMVSVPKMKHKPTRQQKKVAKGYSSPEPDIQDSSGSEAQSVKPSTRRKKGIELGDIQSSIESIKQTQEEIKRNIMALRNHLVSSTPATDYFLQQKDYFIIFLLILLQVIINFMFK

SEQ ID NO: 56807 - protein, 847 aa, Homo sapiens; identical to SEQ ID NO: 56806

SEQ ID NO: 56808 - protein, 728 aa, Homo sapiens
MEGGLADGEPDRTSLLGDSKDVLGPSTVVANSDESQLLTPGKMSQRQGKEAYPTPTKDLHQPSLSPASPHSQGFERGKEDISQNKDESSLSMSKSKSESKLYNGSEKDSSTSSKLTKKESLKVQKKNYREEKKRATKELLSTITDPSVIVMADWLKIRGTLKSWTKLWCVLKPGVLLIYKTQKNGQWVGTVLLNACEIIERPSKKDGFCFKLFHPLEQSIWAVKGPKGEAVGSITQPLPSSYLIIRATSESDGRCWMDALELALKCSSLLKRTMIREGKEHDLSVSSDSTHVTFYGLLRANNLHSGDNFQLNDSEIERQHFKDQDMYSDKSDKENDQEHDESDNEVMGKSEESDTDTSERQDDSYIEPEPVEPLKETTYTEQSHEELGEAGEASQTETVSEENKSLIWTLLKQVRPGMDLSKVVLPTFILEPRSFLDKLSDYYYHADFLSEAALEENPYFRLKKVVKWYLSGFYKKPKGLKKPYNPILGETFRCLWIHPRTNSKTFYIAEQVSHHPPISAFYVSNRKDGFCLSGSILAKSKFYGNSLSAILEGEARLTFLNRGEDYVMTMPYAHCKGILYGTMTLELGGTVNITCQKTGYSAILEFKLKPFLGSSDCVNQISGKLKLGKEVLATLEGHWDSEVFITDKKTDNSEVFWNPTPDIKQWRLIRHTVKFEEQGDFESEKLWQRVTRAINAKDQTEATQEKYVLEEAQRQAARDRKTKNEKKK

SEQ ID NO: 56809 - protein, 874 aa, Homo sapiens
MEGGLADGEPDRTSANSDESQLLTPGKMSQRQGKEAYPTPTKDLHQPSLSPASPHSQGFERGKEDISQNKDESSLSMSKSKSESKLYNGSEKDSSTSSKLTKKESLKVQKKNYREEKKRATKELLSTITDPSVIVMADWLKIRGTLKSWTKLWCVLKPGVLLIYKTQKNGQWVGTVLLNACEIIERPSKKDGFCFKLFHPLEQSIWAVKGPKGEAVGSITQPLPSSYLIIRATSESDGRCWMDALELALKCSSLLKRTMIREGKEHDLSVSSDSTHVTFYGLLRANNLHSGDNFQLNDSEIERQHFKDQDMYSDKSDKENDQEHDESDNEVMGKSEESDTDTSERQDDSYIEPEPVEPLKETTYTEQSHEELGEAGEASQTETVSEENKSLIWTLLKQVRPGMDLSKVVLPTFILEPRSFLDKLSDYYYHADFLSEAALEENPYFRLKKVVKWYLSGFYKKPKGLKKPYNPILGETFRCLWIHPRTNSKTFYIAEQVSHHPPISAFYVSNRKDGFCLSGSILAKSKFYGNSLSAILEGEARLTFLNRGEDYVMTMPYAHCKGILYGTMTLELGGTVNITCQKTGYSAILEFKLKPFLGSSDCVNQISGKLKLGKEVLATLEGHWDSEVFITDKKTDNSEVFWNPTPDIKQWRLIRHTVKFEEQGDFESEKLWQRVTRAINAKDQTEATQEKYVLEEAQRQAARDRKTKNEEWSCKLFELDPLTGEWHYKFADTRPWDPLNDMIQFEKDGVIQTKVKHRTPMVSVPKMKHKPTRQQKKVAKGYSSPEPDIQDSSGSEAQSVKPSTRRKKGIELGDIQSSIESIKQTQEEIKRNIMALRNHLVSSTPATDYFLQQKDYFIIFLLILLQVIINFMFK

SEQ ID NO: 56810 - protein, 53 aa, Homo sapiens
MEGGLADGEPDRTSLLGDSKDVLGPSTNSDESQLLTPGKMSQRQGKEAYPTPT

SEQ ID NO: 56811 - protein, 76 aa, Homo sapiens
MSQRQGKEAYPTPTKDLHQPSLSPASPHSQGFERGKEDISQNKDESSLSMSKSKSESKLYNGSEKDSSTSSKLTKK

SEQ ID NO: 56812 - protein, 58 aa, Homo sapiens
MEGGLADGEPDRTSLLGDSKDVLGPSTVVANSDESQLLTPGKMSQRQGKEAYPTPTKD

SEQ ID NO: 56813 - protein, 111 aa, Homo sapiens
MSQRQGKEAYPTPTKDLHQPSLSPASPHSQGFERGKEDISQNKDESSLSMSKSKSESKLYNGSEKDSSTSSKLTKKESLKVQKKNYREEKKRATKELLSTITDPSVIVMAD

SEQ ID NO: 56814 - protein, 741 aa, Homo sapiens
MPYRRVTSGRLLSLAAPKMASIMEGPLSKWTNVMKGWQYRWFVLDYNAGLLSYYTSKDKMMRGSRRGCVRLRGAVIGIDDEDDSTFTITVDQKTFHFQARDADEREKWIHALEETILRHTLQLQGLDSGFVPSVQDFDKKLTEADAYLQILIEQLKLFDDKLQNCKEDEQRKKIETLKETTNSMVESIKHCIVLLQIAKSTINPVDAIYQPSPLEPVISTMPSQTVLPPEPVQLCKSEQRPSSLPVGPVLATLGHHQTPTPNSTGSGHSPPSSSLTSPSHVNLSPNTVPEFSYSSSEDEFYDADEFHQSGSSPKRLIDSSGSASVLTHSSSGNSLKRPDTTESLNSSLSNGTSDADLFDSHDDRDDDAEAGSVEEHKSVIMHLLSQVRLGMDLTKVVLPTFILERRSLLEMYADFFAHPDLFVSISDQKDPKDRMVQVVKWYLSAFHAGRKGSVAKKPYNPILGEIFQCHWTLPNDTEENTELVSEGPVPWVSKNSVTFVAEQVSHHPPISAFYAECFNKKIQFNAHIWTKSKFLGMSIGVHNIGQGCVSCLDYDEHYILTFPNGYGRSILTVPWVELGGECNINCSKTGYSANIIFHTKPFYGGKKHRITAEIFSPNDKKSFCSIEGEWNGVMYAKYATGENTVFVDTKKLPIIKKKVRKLEDQNEYESRSLWKDVTFNLKIRDIDAATEAKHRLEERQRAEARERKEKEIQWETRLFHEDGECWVYDEPLLKRLGAAKH

SEQ ID NO: 56815 - protein, 626 aa, Homo sapiens
MAFLLATCGGLDSGFVPSVQDFDKKLTEADAYLQILIEQLKLFDDKLQNCKEDEQRKKIETLKETTNSMVESIKHCIVLLQIAKSTINPVDAIYQPSPLEPVISTMPSQTVLPPEPVQLCKSEQRPSSLPVGPVLATLGHHQTPTPNSTGSGHSPPSSSLTSPSHVNLSPNTVPEFSYSSSEDEFYDADEFHQSGSSPKRLIDSSGSASVLTHSSSGNSLKRPDTTESLNSSLSNGTSDADLFDSHDDRDDDAEAGSVEEHKSVIMHLLSQVRLGMDLTKVVLPTFILERRSLLEMYADFFAHPDLFVSISDQKDPKDRMVQVVKWYLSAFHAGRKGSVAKKPYNPILGEIFQCHWTLPNDTEENTELVSEGPVPWVSKNSVTFVAEQVSHHPPISAFYAECFNKKIQFNAHIWTKSKFLGMSIGVHNIGQGCVSCLDYDEHYILTFPNGYGRSILTVPWVELGGECNINCSKTGYSANIIFHTKPFYGGKKHRITAEIFSPNDKKSFCSIEGEWNGVMYAKYATGENTVFVDTKKLPIIKKKVRKLEDQNEYESRSLWKDVTFNLKIRDIDAATEAKHRLEERQRAEARERKEKEIQWETRLFHEDGECWVYDEPLLKRLGAAKH

SEQ ID NO: 56816 - protein, 754 aa, Homo sapiens
MPYRRVTSGRLLSLAAPKMASIMEGPLSKWTNVMKGWQYRWFVLDYNAGLLSYYTSKDKMMRGSRRGCVRLRGAVIGIDDEDDSTFTITVDQKTFHFQARDADEREKWIHALEETILRHTLQLQGLDSGFVPSVQDFDKKLTEADAYLQILIEQLKLFDDKLQNCKEDEQRKKIETLKETTNSMVESIKHCIVLLQIAKDQSNAEKHADGMISTINPVDAIYQPSPLEPVISTMPSQTVLPPEPVQLCKSEQRPSSLPVGPVLATLGHHQTPTPNSTGSGHSPPSSSLTSPSHVNLSPNTVPEFSYSSSEDEFYDADEFHQSGSSPKRLIDSSGSASVLTHSSSGNSLKRPDTTESLNSSLSNGTSDADLFDSHDDRDDDAEAGSVEEHKSVIMHLLSQVRLGMDLTKVVLPTFILERRSLLEMYADFFAHPDLFVSISDQKDPKDRMVQVVKWYLSAFHAGRKGSVAKKPYNPILGEIFQCHWTLPNDTEENTELVSEGPVPWVSKNSVTFVAEQVSHHPPISAFYAECFNKKIQFNAHIWTKSKFLGMSIGVHNIGQGCVSCLDYDEHYILTFPNGYGRSILTVPWVELGGECNINCSKTGYSANIIFHTKPFYGGKKHRITAEIFSPNDKKSFCSIEGEWNGVMYAKYATGENTVFVDTKKLPIIKKKVRKLEDQNEYESRSLWKDVTFNLKIRDIDAATEAKHRLEERQRAEARERKEKEIQWETRLFHEDGECWVYDEPLLKRLGAAKH

SEQ ID NO: 56817 - protein, 723 aa, Homo sapiens
MASIMEGPLSKWTNVMKGWQYRWFVLDYNAGLLSYYTSKDKMMRGSRRGCVRLRGAVIGIDDEDDSTFTITVDQKTFHFQARDADEREKWIHALEETILRHTLQLQGLDSGFVPSVQDFDKKLTEADAYLQILIEQLKLFDDKLQNCKEDEQRKKIETLKETTNSMVESIKHCIVLLQIAKSTINPVDAIYQPSPLEPVISTMPSQTVLPPEPVQLCKSEQRPSSLPVGPVLATLGHHQTPTPNSTGSGHSPPSSSLTSPSHVNLSPNTVPEFSYSSSEDEFYDADEFHQSGSSPKRLIDSSGSASVLTHSSSGNSLKRPDTTESLNSSLSNGTSDADLFDSHDDRDDDAEAGSVEEHKSVIMHLLSQVRLGMDLTKVVLPTFILERRSLLEMYADFFAHPDLFVSISDQKDPKDRMVQVVKWYLSAFHAGRKGSVAKKPYNPILGEIFQCHWTLPNDTEENTELVSEGPVPWVSKNSVTFVAEQVSHHPPISAFYAECFNKKIQFNAHIWTKSKFLGMSIGVHNIGQGCVSCLDYDEHYILTFPNGYGRSILTVPWVELGGECNINCSKTGYSANIIFHTKPFYGGKKHRITAEIFSPNDKKSFCSIEGEWNGVMYAKYATGENTVFVDTKKLPIIKKKVRKLEDQNEYESRSLWKDVTFNLKIRDIDAATEAKHRLEERQRAEARERKEKEIQWETRLFHEDGECWVYDEPLLKRLGAAKH

SEQ ID NO: 56818 - protein, 736 aa, Homo sapiens
MASIMEGPLSKWTNVMKGWQYRWFVLDYNAGLLSYYTSKDKMMRGSRRGCVRLRGAVIGIDDEDDSTFTITVDQKTFHFQARDADEREKWIHALEETILRHTLQLQGLDSGFVPSVQDFDKKLTEADAYLQILIEQLKLFDDKLQNCKEDEQRKKIETLKETTNSMVESIKHCIVLLQIAKDQSNAEKHADGMISTINPVDAIYQPSPLEPVISTMPSQTVLPPEPVQLCKSEQRPSSLPVGPVLATLGHHQTPTPNSTGSGHSPPSSSLTSPSHVNLSPNTVPEFSYSSSEDEFYDADEFHQSGSSPKRLIDSSGSASVLTHSSSGNSLKRPDTTESLNSSLSNGTSDADLFDSHDDRDDDAEAGSVEEHKSVIMHLLSQVRLGMDLTKVVLPTFILERRSLLEMYADFFAHPDLFVSISDQKDPKDRMVQVVKWYLSAFHAGRKGSVAKKPYNPILGEIFQCHWTLPNDTEENTELVSEGPVPWVSKNSVTFVAEQVSHHPPISAFYAECFNKKIQFNAHIWTKSKFLGMSIGVHNIGQGCVSCLDYDEHYILTFPNGYGRSILTVPWVELGGECNINCSKTGYSANIIFHTKPFYGGKKHRITAEIFSPNDKKSFCSIEGEWNGVMYAKYATGENTVFVDTKKLPIIKKKVRKLEDQNEYESRSLWKDVTFNLKIRDIDAATEAKHRLEERQRAEARERKEKEIQWETRLFHEDGECWVYDEPLLKRLGAAKH

SEQ ID NO: 56819 - protein, 571 aa, Homo sapiens
MVESIKHCIVLLQIAKDQSNAEKHADGMISTINPVDAIYQPSPLEPVISTMPSQTVLPPEPVQLCKSEQRPSSLPVGPVLATLGHHQTPTPNSTGSGHSPPSSSLTSPSHVNLSPNTVPEFSYSSSEDEFYDADEFHQSGSSPKRLIDSSGSASVLTHSSSGNSLKRPDTTESLNSSLSNGTSDADLFDSHDDRDDDAEAGSVEEHKSVIMHLLSQVRLGMDLTKVVLPTFILERRSLLEMYADFFAHPDLFVSISDQKDPKDRMVQVVKWYLSAFHAGRKGSVAKKPYNPILGEIFQCHWTLPNDTEENTELVSEGPVPWVSKNSVTFVAEQVSHHPPISAFYAECFNKKIQFNAHIWTKSKFLGMSIGVHNIGQGCVSCLDYDEHYILTFPNGYGRSILTVPWVELGGECNINCSKTGYSANIIFHTKPFYGGKKHRITAEIFSPNDKKSFCSIEGEWNGVMYAKYATGENTVFVDTKKLPIIKKKVRKLEDQNEYESRSLWKDVTFNLKIRDIDAATEAKHRLEERQRAEARERKEKEIQWETRLFHEDGECWVYDEPLLKRLGAAKH

SEQ ID NO: 56820 - protein, 746 aa, Homo sapiens
MASIMEGPLSKWTNVMKGWQYRWFVLDYNAGLLSYYTSKDKMMRGSRRGCVRLRGAVIGIDDEDDSTFTITVDQKTFHFQARDADEREKWIHALEETILRHTLQLQISTTLAFFQSSGISPVLEFSKIIGLDSGFVPSVQDFDKKLTEADAYLQILIEQLKLFDDKLQNCKEDEQRKKIETLKETTNSMVESIKHCIVLLQIAKSTINPVDAIYQPSPLEPVISTMPSQTVLPPEPVQLCKSEQRPSSLPVGPVLATLGHHQTPTPNSTGSGHSPPSSSLTSPSHVNLSPNTVPEFSYSSSEDEFYDADEFHQSGSSPKRLIDSSGSASVLTHSSSGNSLKRPDTTESLNSSLSNGTSDADLFDSHDDRDDDAEAGSVEEHKSVIMHLLSQVRLGMDLTKVVLPTFILERRSLLEMYADFFAHPDLFVSISDQKDPKDRMVQVVKWYLSAFHAGRKGSVAKKPYNPILGEIFQCHWTLPNDTEENTELVSEGPVPWVSKNSVTFVAEQVSHHPPISAFYAECFNKKIQFNAHIWTKSKFLGMSIGVHNIGQGCVSCLDYDEHYILTFPNGYGRSILTVPWVELGGECNINCSKTGYSANIIFHTKPFYGGKKHRITAEIFSPNDKKSFCSIEGEWNGVMYAKYATGENTVFVDTKKLPIIKKKVRKLEDQNEYESRSLWKDVTFNLKIRDIDAATEAKHRLEERQRAEARERKEKEIQWETRLFHEDGECWVYDEPLLKRLGAAKH

SEQ ID NO: 56821 - protein, 719 aa, Homo sapiens
MASIMEGPLSKWTNVMKGWQYRWFVLDYNAGLLSYYTGAVIGIDDEDDSTFTITVDQKTFHFQARDADEREKWIHALEETILRHTLQLQGLDSGFVPSVQDFDKKLTEADAYLQILIEQLKLFDDKLQNCKEDEQRKKIETLKETTNSMVESIKHCIVLLQIAKDQSNAEKHADGMISTINPVDAIYQPSPLEPVISTMPSQTVLPPEPVQLCKSEQRPSSLPVGPVLATLGHHQTPTPNSTGSGHSPPSSSLTSPSHVNLSPNTVPEFSYSSSEDEFYDADEFHQSGSSPKRLIDSSGSASVLTHSSSGNSLKRPDTTESLNSSLSNGTSDADLFDSHDDRDDDAEAGSVEEHKSVIMHLLSQVRLGMDLTKVVLPTFILERRSLLEMYADFFAHPDLFVSISDQKDPKDRMVQVVKWYLSAFHAGRKGSVAKKPYNPILGEIFQCHWTLPNDTEENTELVSEGPVPWVSKNSVTFVAEQVSHHPPISAFYAECFNKKIQFNAHIWTKSKFLGMSIGVHNIGQGCVSCLDYDEHYILTFPNGYGRSILTVPWVELGGECNINCSKTGYSANIIFHTKPFYGGKKHRITAEIFSPNDKKSFCSIEGEWNGVMYAKYATGENTVFVDTKKLPIIKKKVRKLEDQNEYESRSLWKDVTFNLKIRDIDAATEAKHRLEERQRAEARERKEKEIQWETRLFHEDGECWVYDEPLLKRLGAAKH

SEQ ID NO: 56822 - protein, 558 aa, Homo sapiens
MVESIKHCIVLLQIAKSTINPVDAIYQPSPLEPVISTMPSQTVLPPEPVQLCKSEQRPSSLPVGPVLATLGHHQTPTPNSTGSGHSPPSSSLTSPSHVNLSPNTVPEFSYSSSEDEFYDADEFHQSGSSPKRLIDSSGSASVLTHSSSGNSLKRPDTTESLNSSLSNGTSDADLFDSHDDRDDDAEAGSVEEHKSVIMHLLSQVRLGMDLTKVVLPTFILERRSLLEMYADFFAHPDLFVSISDQKDPKDRMVQVVKWYLSAFHAGRKGSVAKKPYNPILGEIFQCHWTLPNDTEENTELVSEGPVPWVSKNSVTFVAEQVSHHPPISAFYAECFNKKIQFNAHIWTKSKFLGMSIGVHNIGQGCVSCLDYDEHYILTFPNGYGRSILTVPWVELGGECNINCSKTGYSANIIFHTKPFYGGKKHRITAEIFSPNDKKSFCSIEGEWNGVMYAKYATGENTVFVDTKKLPIIKKKVRKLEDQNEYESRSLWKDVTFNLKIRDIDAATEAKHRLEERQRAEARERKEKEIQWETRLFHEDGECWVYDEPLLKRLGAAKH

SEQ ID NO: 56823 - protein, 32 aa, Homo sapiens
MVESIKHCIVLLQIAKDQSNAEKHADGMIVSL

SEQ ID NO: 56824 - protein, 558 aa, Homo sapiens; identical to SEQ ID NO: 56822

SEQ ID NO: 56825 - protein, 655 aa, Homo sapiens
MGCCCCWLVFTEARDADEREKWIHALEETILRHTLQLQGLDSGFVPSVQDFDKKLTEADAYLQILIEQLKLFDDKLQNCKEDEQRKKIETLKETTNSMVESIKHCIVLLQIAKSTINPVDAIYQPSPLEPVISTMPSQTVLPPEPVQLCKSEQRPSSLPVGPVLATLGHHQTPTPNSTGSGHSPPSSSLTSPSHVNLSPNTVPEFSYSSSEDEFYDADEFHQSGSSPKRLIDSSGSASVLTHSSSGNSLKRPDTTESLNSSLSNGTSDADLFDSHDDRDDDAEAGSVEEHKSVIMHLLSQVRLGMDLTKVVLPTFILERRSLLEMYADFFAHPDLFVSISDQKDPKDRMVQVVKWYLSAFHAGRKGSVAKKPYNPILGEIFQCHWTLPNDTEENTELVSEGPVPWVSKNSVTFVAEQVSHHPPISAFYAECFNKKIQFNAHIWTKSKFLGMSIGVHNIGQGCVSCLDYDEHYILTFPNGYGRSILTVPWVELGGECNINCSKTGYSANIIFHTKPFYGGKKHRITAEIFSPNDKKSFCSIEGEWNGVMYAKYATGENTVFVDTKKLPIIKKKVRKLEDQNEYESRSLWKDVTFNLKIRDIDAATEAKHRLEERQRAEARERKEKEIQWETRLFHEDGECWVYDEPLLKRLGAAKH

SEQ ID NO: 56826 - protein, 109 aa, Homo sapiens
MVESIKHCIVLLQIAKSTINPVDAIYQPSPLEPVISTMPSQTVLPPEPVQLCKSEQRPSSLPVGPVLATLGHHQTPTPNSTGSGHSPPSSSLTSPSHVNLSPNTVPEFS

SEQ ID NO: 56827 - protein, 389 aa, Homo sapiens
MEGALAANWSAEAANASAAPPGAEGNRTAGPPRRNEALARVEVAVLCLILLLALSGNACVLLALRTTRQKHSRLFFFMKHLSIADLVVAVFQVLPQLLWDITFRFYGPDLLCRLVKYLQVVGMFASTYLLLLMSLDRCLAICQPLRSLRRRTDRLAVLATWLGCLVASAPQVHIFSLREVADGVFDCWAVFIQPWGPKAYITWITLAVYIVPVIVLAACYGLISFKIWQNLRLKTAAAAAAEAPEGAAAGDGGRVALARVSSVKLISKAKIRTVKMTFIIVLAFIVCWTPFFFVQMWSVWDANAPKEASAFIIVMLLASLNSCCNPWIYMLFTGHLFHELVQRFLCCSASYLKGRRLGETSASKKSNSSSFVLSHRSSSQRSCSQPSTA

SEQ ID NO: 56828 - protein, 43 aa, Homo sapiens
MEGALAANWSAEAANASAAPPGAEGNRTAGPPRRNEALARVEV

SEQ ID NO: 56829 - protein, 92 aa, Homo sapiens
MEGALAANWSAEAANASAAPPGAEGNRTAGPPRRNEALARVEVAVLCLILLLALSGNACVLLALRTTRQKHSRLFFFMKHLSIADLVVAVFQ

SEQ ID NO: 56830 - protein, 125 aa, Homo sapiens
MAGPSLACCLLGLLALTSACYIQNCPLGGKRAAPDLDVRKCLPCGPGGKGRCFGPNICCAEELGCFVGTAEALRCQEENYLPSPCQSGQKACGSGGRCAVLGLCCSPDGCHADPACDAEATFSQR

SEQ ID NO: 56831 - protein, 146 aa, Homo sapiens
MGFLRRLIYRRRPMIYVESSEESSDEQPDEVESPTQSQDSTPAEEREDEGASAAQGQEPEADSQELVQPKTGCELGDGPDTKRVCLRNEEQMKLPAEGPEPEADSQEQVHPKTGCERGDGPDVQELGLPNPEEVKTPEEDEGQSQP

SEQ ID NO: 56832 - protein, 111 aa, Homo sapiens
MSELLRARSQSSERGNDQESSQPVGSVIVQEPTEEKRQEEEPPTDNQGIAPSGEIENQAVPAFQGPDMEAFQQELALLKIEDEPGDGPDVREGIMPTFDLTKVLEAGDAQP

SEQ ID NO: 56833 - protein, 64 aa, Homo sapiens
MSELLRARSQSSERGNDQESSQPVGSVIVQEPTEEKRQEEEPPTDNQGIAPSGEIENQAVPAFQ

SEQ ID NO: 56834 - protein, 113 aa, Homo sapiens
MSGHQRTRSRSRERRDDQDSNHPVGAVVAQELPSNDQLQQEEPPIESQDYTPGQERDEGALDFQVLGLAAYLWELTRSKTGGERGDGPNVKGEFLPNLEPVKIPEAGEGQPSV

SEQ ID NO: 56835 - protein, 113 aa, Homo sapiens; identical to SEQ ID NO: 56834

SEQ ID NO: 56836 - protein, 102 aa, Homo sapiens
MSARVRSRSRGRGDGQEAPDVVAFVAPGESQQEEPPTDNQDIEPGQEREGTPPIEERKVEGDCQEMDLEKTRSERGDGSDVKEKTPPNPKHAKTKEAGDGQP

SEQ ID NO: 56837 - protein, 102 aa, Homo sapiens; identical to SEQ ID NO: 56836

SEQ ID NO: 56838 - protein, 524 aa, Homo sapiens
MSDNGELEDKPPAPPVRMSSTIFSTGGKDPLSANHSLKPLPSVPEEKKPRHKIISIFSGTEKGSKKKEKERPEISPPSDFEHTIHVGFDAVTGEFTGMPEQWARLLQTSNITKLEQKKNPQAVLDVLKFYDSNTVKQKYLSFTPPEKDGFPSGTPALNAKGTEAPAVVTEEEDDDEETAPPVIAPRPDHTKSIYTRSVIDPVPAPVGDSHVDGAAKSLDKQKKKTKMTDEEIMEKLRTIVSIGDPKKKYTRYEKIGQGASGTVFTATDVALGQEVAIKQINLQKQPKKELIINEILVMKELKNPNIVNFLDSYLVGDELFVVMEYLAGGSLTDVVTETCMDEAQIAAVCRECLQALEFLHANQVIHRDIKSDNVLLGMEGSVKLTDFGFCAQITPEQSKRSTMVGTPYWMAPEVVTRKAYGPKVDIWSLGIMAIEMVEGEPPYLNENPLRALYLIATNGTPELQNPEKLSPIFRDFLNRCLEMDVEKRGSAKELLQHPFLKLAKPLSSLTPLIMAAKEAMKSNR

SEQ ID NO: 56839 - protein, 559 aa, Homo sapiens
MSDGLDNEEKPPAPPLRMNSNNRDSSALNHSSKPLPMAPEEKNKKARLRSIFPGGGDKTNKKKEKERPEISLPSDFEHTIHVGFDAVTGEFTPDLYGSQMCPGKLPEGIPEQWARLLQTSNITKLEQKKNPQAVLDVLKFYDSKETVNNQKYMSFTSGDKSAHGYIAAHPSSTKTASEPPLAPPVSEEEDEEEEEEEDENEPPPVIAPRPEHTKSIYTRSVVESIASPAVPNKEVTPPSAENANSSTLYRNTDRQRKKSKMTDEEILEKLRSIVSVGDPKKKYTRFEKIGQGASGTVYTALDIATGQEVAIKQMNLQQQPKKELIINEILVMRENKNPNIVNYLDSYLVGDELWVVMEYLAGGSLTDVVTETCMDEGQIAAVCRECLQALDFLHSNQVIHRDIKSDNILLGMDGSVKLTDFGFCAQITPEQSKRSTMVGTPYWMAPEVVTRKAYGPKVDIWSLGIMAIEMVEGEPPYLNENPLRALYLIATNGTPELQNPERLSAVFRDFLNRCLEMDVDRRGSAKELLQHPFLKLAKPLSSLTPLIIAAKEAIKNSSR

SEQ ID NO: 56840 - protein, 580 aa, Homo sapiens
MSDGLDNEEKPPAPPLRMNSNNRDSSALNHSSKPLPMAPEEKNKKARLRSIFPGGGDKTNKKKEKERPEISLPSDFEHTIHVGFDAVTGEFTNSPFQTSRPVTVASSQSEGKMPDLYGSQMCPGKLPEGIPEQWARLLQTSNITKLEQKKNPQAVLDVLKFYDSKETVNNQKYMSFTSGDKSAHGYIAAHPSSTKTASEPPLAPPVSEEEDEEEEEEEDENEPPPVIAPRPEHTKSIYTRSVVESIASPAVPNKEVTPPSAENANSSTLYRNTDRQRKKSKMTDEEILEKLRSIVSVGDPKKKYTRFEKIGQGASGTVYTALDIATGQEVAIKQMNLQQQPKKELIINEILVMRENKNPNIVNYLDSYLVGDELWVVMEYLAGGSLTDVVTETCMDEGQIAAVCRECLQALDFLHSNQVIHRDIKSDNILLGMDGSVKLTDFGFCAQITPEQSKRSTMVGTPYWMAPEVVTRKAYGPKVDIWSLGIMAIEMVEGEPPYLNENPLRALYLIATNGTPELQNPERLSAVFRDFLNRCLEMDVDRRGSAKELLQHPFLKLAKPLSSLTPLIIAAKEAIKNSSR

SEQ ID NO: 56841 - protein, 544 aa, Homo sapiens
MSDGLDNEEKPPAPPLRMNSNNRDSSALNHSSKPLPMAPEEKNKKARLRSIFPGGGDKTNKKKEKERPEISLPSDFEHTIHVGFDAVTGEFTGIPEQWARLLQTSNITKLEQKKNPQAVLDVLKFYDSKETVNNQKYMSFTSGDKSAHGYIAAHPSSTKTASEPPLAPPVSEEEDEEEEEEEDENEPPPVIAPRPEHTKSIYTRSVVESIASPAVPNKEVTPPSAENANSSTLYRNTDRQRKKSKMTDEEILEKLRSIVSVGDPKKKYTRFEKIGQGASGTVYTALDIATGQEVAIKQMNLQQQPKKELIINEILVMRENKNPNIVNYLDSYLVGDELWVVMEYLAGGSLTDVVTETCMDEGQIAAVCRECLQALDFLHSNQVIHRDIKSDNILLGMDGSVKLTDFGFCAQITPEQSKRSTMVGTPYWMAPEVVTRKAYGPKVDIWSLGIMAIEMVEGEPPYLNENPLRALYLIATNGTPELQNPERLSAVFRDFLNRCLEMDVDRRGSAKELLQHPFLKLAKPLSSLTPLIIAAKEAIKNSSR

SEQ ID NO: 56842 - protein, 559 aa, Homo sapiens; identical to SEQ ID NO: 56839

SEQ ID NO: 56843 - protein, 565 aa, Homo sapiens
MSDGLDNEEKPPAPPLRMNSNNRDSSALNHSSKPLPMAPEEKNKKARLRSIFPGGGDKTNKKKEKERPEISLPSDFEHTIHVGFDAVTGEFTNSPFQTSRPVTVASSQSEGKMGIPEQWARLLQTSNITKLEQKKNPQAVLDVLKFYDSKETVNNQKYMSFTSGDKSAHGYIAAHPSSTKTASEPPLAPPVSEEEDEEEEEEEDENEPPPVIAPRPEHTKSIYTRSVVESIASPAVPNKEVTPPSAENANSSTLYRNTDRQRKKSKMTDEEILEKLRSIVSVGDPKKKYTRFEKIGQGASGTVYTALDIATGQEVAIKQMNLQQQPKKELIINEILVMRENKNPNIVNYLDSYLVGDELWVVMEYLAGGSLTDVVTETCMDEGQIAAVCRECLQALDFLHSNQVIHRDIKSDNILLGMDGSVKLTDFGFCAQITPEQSKRSTMVGTPYWMAPEVVTRKAYGPKVDIWSLGIMAIEMVEGEPPYLNENPLRALYLIATNGTPELQNPERLSAVFRDFLNRCLEMDVDRRGSAKELLQHPFLKLAKPLSSLTPLIIAAKEAIKNSSR

SEQ ID NO: 56844 - protein, 544 aa, Homo sapiens; identical to SEQ ID NO: 56841

SEQ ID NO: 56845 - protein, 181 aa, Homo sapiens
MSDGLDNEEKPPAPPLRMNSNNRDSSALNHSSKPLPMAPEEKNKKARLRSIFPGGGDKTNKKKEKERPEISLPSDFEHTIHVGFDAVTGEFTNSPFQTSRPVTVASSQSEGKMPDLYGSQMCPGKLPEGIPEQWARLLQTSNITKLEQKKNPQAVLDVLKFYDSKETVNNQKYMSFTSGDK

SEQ ID NO: 56846 - protein, 544 aa, Homo sapiens; identical to SEQ ID NO: 56841

SEQ ID NO: 56847 - protein, 580 aa, Homo sapiens; identical to SEQ ID NO: 56840

SEQ ID NO: 56848 - protein, 565 aa, Homo sapiens; identical to SEQ ID NO: 56843

SEQ ID NO: 56849 - protein, 681 aa, Homo sapiens
MFRKKKKKRPEISAPQNFQHRVHTSFDPKEGKFVGLPPQWQNILDTLRRPKPVVDPSRITRVQLQPMKTVVRGSAMPVDGYISGLLNDIQKLSVISSNTLRGRSPTSRRRAQSLGLLGDEHWATDPDMYLQSPQSERTDPHGLYLSCNGGTPAGHKQMPWPEPQSPRVLPNGLAAKAQSLGPAEFQGASQRCLQLGACLQSSPPGASPPTGTNRHGMKAAKHGSEEARPQSCLVGSATGRPGGEGSPSPKTRESSLKRRLFRSMFLSTAATAPPSSSKPGPPPQSKPNSSFRPPQKDNPPSLVAKAQSLPSDQPVGTFSPLTTSDTSSPQKSLRTAPATGQLPGRSSPAGSPRTWHAQISTSNLYLPQDPTVAKGALAGEDTGVVTHEQFKAALRMVVDQGDPRLLLDSYVKIGEGSTGIVCLAREKHSGRQVAVKMMDLRKQQRRELLFNEVVIMRDYQHFNVVEMYKSYLVGEELWVLMEFLQGGALTDIVSQVRLNEEQIATVCEAVLQALAYLHAQGVIHRDIKSDSILLTLDGRVKLSDFGFCAQISKDVPKRKSLVGTPYWMAPEVISRSLYATEVDIWSLGIMVIEMVDGEPPYFSDSPVQAMKRLRDSPPPKLKNSHKVSPVLRDFLERMLVRDPQERATAQELLDHPFLLQTGLPECLVPLIQLYRKQTSTC

SEQ ID NO: 56850 - protein, 681 aa, Homo sapiens; identical to SEQ ID NO: 56849

SEQ ID NO: 56851 - protein, 681 aa, Homo sapiens; identical to SEQ ID NO: 56849

SEQ ID NO: 56852 - protein, 122 aa, Homo sapiens
MFRKKKKKRPEISAPQNFQHRVHTSFDPKEGKFVGLPPQWQNILDTLRRPKPVVDPSRITRVQLQPMKTVVRGSAMPVDGYISGLLNDIQKLSVISSNTLRGRSPTSRRRAQSLGLLGDEHW

SEQ ID NO: 56853 - protein, 123 aa, Homo sapiens
MFRKKKKKRPEISAPQNFQHRVHTSFDPKEGKFVGLPPQWQNILDTLRRPKPVVDPSRITRVQLQPMKTVVRGSAMPVDGYISGLLNDIQKLSVISSNTLRGRSPTSRRRAQSLGLLGDEHWA

SEQ ID NO: 56854 - protein, 109 aa, Homo sapiens
MFRKKKKKRPEISAPQNFQHRVHTSFDPKEGKFVGLPPQWQNILDTLRRPKPVVDPSRITRVQLQPMKTVVRGSAMPVDGYISGLLNDIQKLSVISSNTLRGRSPTSRR

SEQ ID NO: 56855 - protein, 112 aa, Homo sapiens
MFRKKKKKRPEISAPQNFQHRVHTSFDPKEGKFVGLPPQWQNILDTLRRPKPVVDPSRITRVQLQPMKTVVRGSAMPVDGYISGLLNDIQKLSVISSNTLRGRSPTSRRRAQ

SEQ ID NO: 56856 - protein, 681 aa, Homo sapiens; identical to SEQ ID NO: 56849

SEQ ID NO: 56857 - protein, 284 aa, Homo sapiens
MFRKKKKKRPEISAPQNFQHRVHTSFDPKEGKFVGLPPQWQNILDTLRRPKPVVDPSRITRVQLQPMKTVVRGSAMPVDGYISGLLNDIQKLSVISSNTLRGRSPTSRRRAQSLGLLGDEHWATDPDMYLQSPQSERTDPHGLYLSCNGGTPAGHKQMPWPEPQSPRVLPNGLAAKAQSLGPAEFQGASQRCLQLGACLQSSPPGASPPTGTNRHGMKAAKHGSEEARPQSCLVGSATGRPGGEGSPSPKTRESSLKRRLFRSMFLSTAATAPPSSSKPGPPPQ

SEQ ID NO: 56858 - protein, 105 aa, Homo sapiens
MFRKKKKKRPEISAPQNFQHRVHTSFDPKEGKFVGLPPQWQNILDTLRRPKPVVDPSRITRVQLQPMKTVVRGSAMPVDGYISGLLNDIQKLSVISSNTLRGRSP

SEQ ID NO: 56859 - protein, 146 aa, Homo sapiens
MINMGDSHVDTSSTVSEAVAEEVSLFSMTDMILFSLIVGLLTYWFLFRKKKEEVPEFTKIQTLTSSVRESSFVEKMKKTGRNIIVFYGSQTGTAEEFANRLSKDAHRYGMRGMSADPEEYDLADLSSLPEIDNALVVFCMATYGEG

SEQ ID NO: 56860 - protein, 172 aa, Homo sapiens
MINMGDSHVDTSSTVSEAVAEEVSLFSMTDMILFSLIVGLLTYWFLFRKKKEEVPEFTKIQTLTSSVRESSFVEKMKKTGRNIIVFYGSQTGTAEEFANRLSKDAHRYGMRGMSADPEEYDLADLSSLPEIDNALVVFCMATYGEGDPTDNAQDFYDWLQETDVDLSGVKFA

SEQ ID NO: 56861 - protein, 62 aa, Homo sapiens
MINMGDSHVDTSSTVSEAVAEEVSLFSMTDMILFSLIVGLLTYWFLFRKKKEEVPEFTKIQT

SEQ ID NO: 56862 - protein, 368 aa, Homo sapiens
MGKYVDKRLEQLGAQRIFELGLGDDDGNLEEDFITWREQFWPAVCEHFGVEATGEESSIRQYELVVHTDIDAAKVYMGEMGRLKSYENQKPPFDAKNPFLAAVTTNRKLNQGTERHLMHLELDISDSKIRYESGDHVAVYPANDSALVNQLGKILGADLDVVMSLNNLDEESNKKHPFPCPTSYRTALTYYLDITNPPRTNVLYELAQYASEPSEQELLRKMASSSGEGKELYLSWVVEARRHILAILQDCPSLRPPIDHLCELLPRLQARYYSIASSSKVHPNSVHICAVVVEYETKAGRINKGVATNWLRAKEPAGENGGRALAVPTSTSVGMHGTWPGMCRTPSTTSWLSSGPWSTRRRWTTSRN

SEQ ID NO: 56863 - protein, 39 aa, Homo sapiens
MINMGDSHVDTSSTVSEAVAEEVSLFSMTDMILFSLIVG

SEQ ID NO: 56864 - protein, 166 aa, Homo sapiens
MINMGDSHVDTSSTVSEAVAEEVSLFSMTDMILFSLIVGLLTYWFLFRKKKEEVPEFTKIQTLTSSVRESSFVEKMKKTGRNIIVFYGSQTGTAEEFANRLSKDAHRYGMRGMSADPEEYDLADLSSLPEIDNALVVFCMATYGEGDPTDNAQDFYDWLQETDVDL

SEQ ID NO: 56865 - protein, 188 aa, Homo sapiens
MINMGDSHVDTSSTVSEAVAEEVSLFSMTDMILFSLIVGLLTYWFLFRKKKEEVPEFTKIQTLTSSVRESSFVEKMKKTGRNIIVFYGSQTGTAEEFANRLSKDAHRYGMRGMSADPEEYDLADLSSLPEIDNALVVFCMATYGEGDPTDNAQDFYDWLQETDVDLSGVKFAVFGLGNKTYEHFNAMG

SEQ ID NO: 56866 - protein, 62 aa, Homo sapiens; identical to SEQ ID NO: 56861

SEQ ID NO: 56867 - protein, 573 aa, Homo sapiens
MGSRWPAVPPWGLQIHVSERQPSRPPPCPQQPGQATCETLSSAPDPSTTRMSPPCPQPQSAPGGIGCWRLKVFGLGNKTYEHFNAMGKYVDKRLEQLGAQRIFELGLGDDDGNLEEDFITWREQFWPAVCEHFGVEATGEESSIRQYELVVHTDIDAAKVYMGEMGRLKSYENQKPPFDAKNPFLAAVTTNRKLNQGTERHLMHLELDISDSKIRYESGDHVAVYPANDSALVNQLGKILGADLDVVMSLNNLDEESNKKHPFPCPTSYRTALTYYLDITNPPRTNVLYELAQYASEPSEQELLRKMASSSGEGKELYLSWVVEARRHILAILQDCPSLRPPIDHLCELLPRLQARYYSIASSSKVHPNSVHICAVVVEYETKAGRINKGVATNWLRAKEPAGENGGRALVPMFVRKSQFRLPFKATTPVIMVGPGTGVAPFIGFIQERAWLRQQGKEVGETLLYYGCRRSDEDYLYREELAQFHRDGALTQLNVAFSREQSHKVYVQHLLKQDREHLWKLIEGGAHIYVCGTPSSCPGMHGTWPGMCRTPSTTSWLSSGPWSTRRRWTTSRN

SEQ ID NO: 56868 - protein, 140 aa, Homo sapiens
MINMGDSHVDTSSTVSEAVAEEVSLFSMTDMILFSLIVGLLTYWFLFRKKKEEVPEFTKIQTLTSSVRESSFVEKMKKTGRNIIVFYGSQTGTAEEFANRLSKDAHRYGMRGMSADPEEYDLADLSSLPEIDNALVVFCM

SEQ ID NO: 56869 - protein, 680 aa, Homo sapiens
MINMGDSHVDTSSTVSEAVAEEVSLFSMTDMILFSLIVGLLTYWFLFRKKKEEVPEFTKIQTLTSSVRESSFVEKMKKTGRNIIVFYGSQTGTAEEFANRLSKDAHRYGMRGMSADPEEYDLADLSSLPEIDNALVVFCMATYGEGDPTDNAQDFYDWLQETDVDLSGVKFAVFGLGNKTYEHFNAMGKYVDKRLEQLGAQRIFELGLGDDDGNLEEDFITWREQFWPAVCEHFGVEATGEESSIRQYELVVHTDIDAAKVYMGEMGRLKSYENQKPPFDAKNPFLAAVTTNRKLNQGTERHLMHLELDISDSKIRYESGDHVAVYPANDSALVNQLGKILGADLDVVMSLNNLDEESNKKHPFPCPTSYRTALTYYLDITNPPRTNVLYELAQYASEPSEQELLRKMASSSGEGKELYLSWVVEARRHILAILQDCPSLRPPIDHLCELLPRLQARYYSIASSSKVHPNSVHICAVVVEYETKAGRINKGVATNWLRAKEPAGENGGRALVPMFVRKSQFRLPFKATTPVIMVGPGTGVAPFIGFIQERAWLRQQGKEVGETLLYYGCRRSDEDYLYREELAQFHRDGALTQLNVAFSREQSHKVYVQHLLKQDREHLWKLIEGGAHIYVCGDARNMARDVQNTFYDIVAELGAMEHAQAVDYIKKLMTKGRYSLDVWS

SEQ ID NO: 56870 - protein, 488 aa, Homo sapiens
MPRTSTTGCRRQTWISLGSSSRLEEDFITWREQFWPAVCEHFGVEATGEESSIRQYELVVHTDIDAAKVYMGEMGRLKSYENQKPPFDAKNPFLAAVTTNRKLNQGTERHLMHLELDISDSKIRYESGDHVAVYPANDSALVNQLGKILGADLDVVMSLNNLDEESNKKHPFPCPTSYRTALTYYLDITNPPRTNVLYELAQYASEPSEQELLRKMASSSGEGKELYLSWVVEARRHILAILQDCPSLRPPIDHLCELLPRLQARYYSIASSSKVHPNSVHICAVVVEYETKAGRINKGVATNWLRAKEPAGENGGRALVPMFVRKSQFRLPFKATTPVIMVGPGTGVAPFIGFIQERAWLRQQGKEVGETLLYYGCRRSDEDYLYREELAQFHRDGALTQLNVAFSREQSHKVYVQHLLKQDREHLWKLIEGGAHIYVCGDARNMARDVQNTFYDIVAELGAMEHAQAVDYIKKLMTKGRYSLDVWS

SEQ ID NO: 56871 - protein, 133 aa, Homo sapiens
MLSPEAERVLRYLVEVEELAEEVLADKRQIVDLDTKRNQNREGLRALQKDLSLSEDVMVCFGNMFIKMPHPETKEMIEKDQDHLDKEIEKLRKQLKVKVNRLFEAQGKPELKGFNLNPLNQDELKALKVILKG

SEQ ID NO: 56872 - protein, 534 aa, Homo sapiens
MKFTLGLGSRAWRVSWEGAAAAAAGPGAGGSALRCRAQRVSSPRLGRRGSRLSGALPLCLSRGGGGAQALPDCAGPSPGHPGHPGARQLAGPLAMEQTYGEVNQLGGVFVNGRPLPNAIRLRIVELAQLGIRPCDISRQLRVSHGCVSKILARYNETGSILPGAIGGSKPRVTTPNVVKHIRDYKQGDPGIFAWEIRDRLLADGVCDKYNVPSVSSISRILRNKIGSLAQPGPYEASKQPPSQPTLPYNHIYQYPYPSPVSPTGAKMGSHPGVPGTAGHVSIPRSWPSAHSVSNILGIRTFMEQTGALAGSEGTAYSPKMEDWAGVNRTAFPATPAVNGLEKPALEADIKYTQSASTLSAVGGFLPACAYPASNQHGVYSAPGGGYLAPGPPWPPAQGPPLAPPGAGVAVHGGELAAAMTFKHPSREGSLPAPAARPRTPSVAYTDCPSRPRPPRGSSPRTRARRERQADPGAQVCAAAPAIGTGRIGGLAEEEASAGPRGARPASPQAQPCLWPDPPHFLYWSGFLGFSELGF

SEQ ID NO: 56873 - protein, 394 aa, Homo sapiens
MDMHCKADPFSAMHPGHGGVNQLGGVFVNGRPLPDVVRQRIVELAHQGVRPCDISRQLRVSHGCVSKILGRYYETGSIKPGVIGGSKPKVATPKVVDKIAEYKRQNPTMFAWEIRDRLLAEGICDNDTVPSVSSINRIIRTKVQQPFHPTPDGAGTGVTAPGHTIVPSTASPPVSSASNDPVGSYSINGILGIPRSNGEKRKRDEDVSEGSVPNGDSQSGVDSLRKHLRADTFTQQQLEALDRVFERPSYPDVFQASEHIKSEQGNEYSLPALTPGLDEVKSSLSASTNPELGSNVSGTQTYPVVTGRDMASTTLPGYPPHVPPTGQGSYPTSTLAGMVPGSEFSGNPYSHPQYTAYNEAWRFSNPALLSSPYYYSAAPRGSAPAAAAAAYDRH

SEQ ID NO: 56874 - protein, 396 aa, Homo sapiens
MDMHCKADPFSAMHPGHGGVNQLGGVFVNGRPLPDVVRQRIVELAHQGVRPCDISRQLRVSHGCVSKILGRYYETGSIKPGVIGGSKPKVATPKVVDKIAEYKRQNPTMFAWEIRDRLLAEGICDNDTVPSVSSINRIIRTKVQQPFHPTPDGAGTGVTAPGHTIVPSTASPPVSSASNDPVGSYSINGILGIPRSNGEKRKRDEDVSEGSVPNGDSQSGVDSLRKHLRADTFTQQQLEALDRVFERPSYPDVFQASEHIKSEQGNEYSLPALTPGLDEVKSSLSASTNPELGSNVSGTQTYPVVTGRDMASTTLPGYPPHVPPTGQGSYPTSTLAGMVPEAAVGPSSSLMSKPGRKLAEVPPCVQPTGASSPATRTATPSTRPTTRLGDSATPPY

SEQ ID NO: 56875 - protein, 329 aa, Homo sapiens
MFAWEIRDRLLAEGICDNDTVPSVSSINRIIRTKVQQPFHPTPDGAGTGVTAPGHTIVPSTASPPVSSASNDPVGSYSINGILGIPRSNGEKRKRDEVEVYTDPAHIRGGGGLHLVWTLRDVSEGSVPNGDSQSGVDSLRKHLRADTFTQQQLEALDRVFERPSYPDVFQASEHIKSEQGNEYSLPALTPGLDEVKSSLSASTNPELGSNVSGTQTYPVVTGRDMASTTLPGYPPHVPPTGQGSYPTSTLAGMVPGSEFSGNPYSHPQYTAYNEAWRFSNPALLSSPYYYSAAPRGSLPLLPLPMTATSYRGDHIKLQADSFGLHIVPV

SEQ ID NO: 56876 - protein, 419 aa, Homo sapiens
MDMHCKADPFSAMHPGHGGVNQLGGVFVNGRPLPDVVRQRIVELAHQGVRPCDISRQLRVSHGCVSKILGRYYETGSIKPGVIGGSKPKVATPKVVDKIAEYKRQNPTMFAWEIRDRLLAEGICDNDTVPSVSSINRIIRTKVQQPFHPTPDGAGTGVTAPGHTIVPSTASPPVSSASNDPVGSYSINGILGIPRSNGEKRKRDEVEVYTDPAHIRGGGGLHLVWTLRDVSEGSVPNGDSQSGVDSLRKHLRADTFTQQQLEALDRVFERPSYPDVFQASEHIKSEQGNEYSLPALTPGLDEVKSSLSASTNPELGSNVSGTQTYPVVTGRDMASTTLPGYPPHVPPTGQGSYPTSTLAGMVPEAAVGPSSSLMSKPGRKLAEVPPCVQPTGASSPATRTATPSTRPTTRLGDSATPPY

SEQ ID NO: 56877 - protein, 214 aa, Homo sapiens
MDMHCKADPFSAMHPGHGGVNQLGGVFVNGRPLPDVVRQRIVELAHQGVRPCDISRQLRVSHGCVSKILGRYYETGSIKPGVIGGSKPKVATPKVVDKIAEYKRQNPTMFAWEIRDRLLAEGICDNDTVPSVSSINRIIRTKVQQPFHPTPDGAGTGVTAPGHTIVPSTASPPVSSASNDPVGSYSINGILGIPRSNGEKRKRDEVEVYTDPAH

SEQ ID NO: 56878 - protein, 417 aa, Homo sapiens
MDMHCKADPFSAMHPGHGGVNQLGGVFVNGRPLPDVVRQRIVELAHQGVRPCDISRQLRVSHGCVSKILGRYYETGSIKPGVIGGSKPKVATPKVVDKIAEYKRQNPTMFAWEIRDRLLAEGICDNDTVPSVSSINRIIRTKVQQPFHPTPDGAGTGVTAPGHTIVPSTASPPVSSASNDPVGSYSINGILGIPRSNGEKRKRDEVEVYTDPAHIRGGGGLHLVWTLRDVSEGSVPNGDSQSGVDSLRKHLRADTFTQQQLEALDRVFERPSYPDVFQASEHIKSEQGNEYSLPALTPGLDEVKSSLSASTNPELGSNVSGTQTYPVVTGRDMASTTLPGYPPHVPPTGQGSYPTSTLAGMVPGSEFSGNPYSHPQYTAYNEAWRFSNPALLSSPYYYSAAPRGSAPAAAAAAYDRH

SEQ ID NO: 56879 - protein, 206 aa, Homo sapiens
MTTLAGAVPRMMRPGPGQNYPRSGFPLEVSTPLGQGRVNQLGGVFINGRPLPNHIRHKIVEMAHHGIRPCVISRQLRVSHGCVSKILCRYQETGSIRPGAIGGSKPKQVTTPDVEKKIEEYKRENPGMFSWEIRDKLLKDAVCDRNTVPSVSSISRILRSKFGKGEEEEADLERKEAEESEKKAKHSIDGILSERGKALVSGVSSH

SEQ ID NO: 56880 - protein, 407 aa, Homo sapiens
MTTLAGAVPRMMRPGPGQNYPRSGFPLEVSTPLGQGRVNQLGGVFINGRPLPNHIRHKIVEMAHHGIRPCVISRQLRVSHGCVSKILCRYQETGSIRPGAIGGSKPKQVTTPDVEKKIEEYKRENPGMFSWEIRDKLLKDAVCDRNTVPSVSSISRILRSKFGKGEEEEADLERKEAEESEKKAKHSIDGILSERASAPQSDEGSDIDSEPDLPLKRKQRRSRTTFTAEQLEELERAFERTHYPDIYTREELAQRAKLTEARVQVWFSNRRARWRKQAGANQLMAFNHLIPGGFPPTAMPTLPTYQLSETSYQPTSIPQAVSDPSSTVHRPQPLPPSTVHQSTIPSNPDSSSAYCLPSTRHGFSSYTDSFVPPSGPSNPMNPTIGNGLSPQVPFIISSQISLGFKSF

SEQ ID NO: 56881 - protein, 403 aa, Homo sapiens
MTTLAGAVPRMMRPGPGQNYPRSGFPLEVSTPLGQGRVNQLGGVFINGRPLPNHIRHKIVEMAHHGIRPCVISRQLRVSHGCVSKILCRYQETGSIRPGAIGGSKPKQVTTPDVEKKIEEYKRENPGMFSWEIRDKLLKDAVCDRNTVPSVSSISRILRSKFGKGEEEEADLERKEAEESEKKAKHSIDGILSERASAPQSDEGSDIDSEPDLPLKRKQRRSRTTFTAEQLEELERAFERTHYPDIYTREELAQRAKLTEARVQVWFSNRRARWRKQAGANQLMAFNHLIPGGFPPTAMPTLPTYQLSETSYQPTSIPQAVSDPSSTVHRPQPLPPSTVHQSTIPSNPDSSSAYCLPSTRHGFSSYTDSFVPPSGPSNPMNPTIGNGLSPQVPFIISSQISRK

SEQ ID NO: 56882 - protein, 479 aa, Homo sapiens
MTTLAGAVPRMMRPGPGQNYPRSGFPLEVSTPLGQGRVNQLGGVFINGRPLPNHIRHKIVEMAHHGIRPCVISRQLRVSHGCVSKILCRYQETGSIRPGAIGGSKPKQVTTPDVEKKIEEYKRENPGMFSWEIRDKLLKDAVCDRNTVPSVSSISRILRSKFGKGEEEEADLERKEAEESEKKAKHSIDGILSERASAPQSDEGSDIDSEPDLPLKRKQRRSRTTFTAEQLEELERAFERTHYPDIYTREELAQRAKLTEARVQVWFSNRRARWRKQAGANQLMAFNHLIPGGFPPTAMPTLPTYQLSETSYQPTSIPQAVSDPSSTVHRPQPLPPSTVHQSTIPSNPDSSSAYCLPSTRHGFSSYTDSFVPPSGPSNPMNPTIGNGLSPQVMGLLTNHGGVPHQPQTDYALSPLTGGLEPTTTVSASCSQRLDHMKSLDSLPTSQSYCPPTYSTTGYSMDPVTGYQYGQYGQSKPWTF

SEQ ID NO: 56883 - protein, 505 aa, Homo sapiens
MTTLAGAVPRMMRPGPGQNYPRSGFPLEVSTPLGQGRVNQLGGVFINGRPLPNHIRHKIVEMAHHGIRPCVISRQLRVSHGCVSKILCRYQETGSIRPGAIGGSKPKQVTTPDVEKKIEEYKRENPGMFSWEIRDKLLKDAVCDRNTVPSVSSISRILRSKFGKGEEEEADLERKEAEESEKKAKHSIDGILSERASAPQSDEGSDIDSEPDLPLKRKQRRSRTTFTAEQLEELERAFERTHYPDIYTREELAQRAKLTEARVQVWFSNRRARWRKQAGANQLMAFNHLIPGGFPPTAMPTLPTYQLSETSYQPTSIPQAVSDPSSTVHRPQPLPPSTVHQSTIPSNPDSSSAYCLPSTRHGFSSYTDSFVPPSGPSNPMNPTIGNGLSPQVMGLLTNHGGVPHQPQTDYALSPLTGGLEPTTTVSASCSQRLDHMKSLDSLPTSQSYCPPTYSTTGYSMDPVTGYQYGQYGQSAFHYLKPDIAWFQILLNTFDKSSGEEEDLEQ

SEQ ID NO: 56884 - protein, 484 aa, Homo sapiens
MTTLAGAVPRMMRPGPGQNYPRSGFPLEVSTPLGQGRVNQLGGVFINGRPLPNHIRHKIVEMAHHGIRPCVISRQLRVSHGCVSKILCRYQETGSIRPGAIGGSKPKQVTTPDVEKKIEEYKRENPGMFSWEIRDKLLKDAVCDRNTVPSVSSISRILRSKFGKGEEEEADLERKEAEESEKKAKHSIDGILSERASAPQSDEGSDIDSEPDLPLKRKQRRSRTTFTAEQLEELERAFERTHYPDIYTREELAQRAKLTEARVQVWFSNRRARWRKQAGANQLMAFNHLIPGGFPPTAMPTLPTYQLSETSYQPTSIPQAVSDPSSTVHRPQPLPPSTVHQSTIPSNPDSSSAYCLPSTRHGFSSYTDSFVPPSGPSNPMNPTIGNGLSPQVMGLLTNHGGVPHQPQTDYALSPLTGGLEPTTTVSASCSQRLDHMKSLDSLPTSQSYCPPTYSTTGYSMDPVTGYQYGQYGQSAFHYLKPDIA

SEQ ID NO: 56885 - protein, 483 aa, Homo sapiens
MTTLAGAVPRMMRPGPGQNYPRSGFPLEVSTPLGQGRVNQLGGVFINGRPLPNHIRHKIVEMAHHGIRPCVISRQLRVSHGCVSKILCRYQETGSIRPGAIGGSKPKVTTPDVEKKIEEYKRENPGMFSWEIRDKLLKDAVCDRNTVPSVSSISRILRSKFGKGEEEEADLERKEAEESEKKAKHSIDGILSERASAPQSDEGSDIDSEPDLPLKRKQRRSRTTFTAEQLEELERAFERTHYPDIYTREELAQRAKLTEARVQVWFSNRRARWRKQAGANQLMAFNHLIPGGFPPTAMPTLPTYQLSETSYQPTSIPQAVSDPSSTVHRPQPLPPSTVHQSTIPSNPDSSSAYCLPSTRHGFSSYTDSFVPPSGPSNPMNPTIGNGLSPQVMGLLTNHGGVPHQPQTDYALSPLTGGLEPTTTVSASCSQRLDHMKSLDSLPTSQSYCPPTYSTTGYSMDPVTGYQYGQYGQSAFHYLKPDIA

SEQ ID NO: 56886 - protein, 215 aa, Homo sapiens
MTTLAGAVPRMMRPGPGQNYPRSGFPLEVSTPLGQGRVNQLGGVFINGRPLPNHIRHKIVEMAHHGIRPCVISRQLRVSHGCVSKILCRYQETGSIRPGAIGGSKPKQVTTPDVEKKIEEYKRENPGMFSWEIRDKLLKDAVCDRNTVPSVSSISRILRSKFGKGEEEEADLERKEAEESEKKAKHSIDGILSERGKRWRLGRRTCWVTWRASAS

SEQ ID NO: 56887 - protein, 273 aa, Homo sapiens
MHQDGISSMNQLGGLFVNGRPLPLDTRQQIVRLAVSGMRPCDISRILKVSNGCVSKILGRYYRTGVLEPKGIGGSKPRLATPPVVARIAQLKGECPALFAWEIQRQLCAEGLCTQDKTPSVSSINRVLRALQEDQGLPCTRLRSPAVLAPAVLTPHSGSETPRGTHPGTGHRNRTIFSPSQAEALEKEFQRGQYPDSVARGKLATATSLPEDTVRVWFSNRRAKWRRQEKLKWEMQLPAVPWQCAHSSPACPGTTGSLLLSAVLGNSTRKVSE

SEQ ID NO: 56888 - protein, 343 aa, Homo sapiens
MNQLGGLFVNGRPLPLDTRQQIVRLAVSGMRPCDISRILKVSNGCVSKILGRYYRTGVLEPKGIGGSKPRLATPPVVARIAQLKGECPALFAWEIQRQLCAEGLCTQDKTPSVSSINRVLRALQEDQGLPCTRLRSPAVLAPAVLTPHSGSETPRGTHPGTGHRNRTIFSPSQAEALEKEFQRGQYPDSVARGKLATATSLPEDTVRVWFSNRRAKWRRQEKLKWEMQLPGASQGLTVPRVAPGIISAQQSPGSVPTAALPALEPLGPSCYQLCWATAPERCLSDTPPKACLKPCWGHLPPQPNSLDSGLLCLPCPSSHCHLASLSGSQALLWPGCPLLYGLE

SEQ ID NO: 56889 - protein, 348 aa, Homo sapiens
MHQDGISSMNQLGGLFVNGRPLPLDTRQQIVRLAVSGMRPCDISRILKVSNGCVSKILGRYYRTGVLEPKGIGGSKPRLATPPVVARIAQLKGECPALFAWEIQRQLCAEGLCTQDKTPSVSSINRVLRALQEDQGLPCTRLRSPAVLAPAVLTPHSGSETPRGTHPGTGHRNRTIFSPSQAEALEKEFQRGQYPDSVARGKLATATSLPEDTVRVWFSNRRAKWRRQEKLKWEMQLPGASQGLTVPRVAPGIISAQQSPGSVPTAALPALEPLGPSCYQLCWATAPERCLSDTPPKACLKPCWDCGSFLLPVIAPSCVDVAWPCLDASLAHHLIGGAGKATPTHFSH

SEQ ID NO: 56890 - protein, 520 aa, Homo sapiens
MAALPGTVPRMMRPAPGQNYPRTGFPLEVSTPLGQGRVNQLGGVFINGRPLPNHIRHKIVEMAHHGIRPCVISRQLRVSHGCVSKILCRYQETGSIRPGAIGGSKPRQVATPDVEKKIEEYKRENPGMFSWEIRDRLLKDGHCDRSTVPSGLVSSISRVLRIKFGKKEEEDEADKKEDDGEKKAKHSIDGILGDKGNRLDEGSDVESEPDLPLKRKQRRSRTTFTAEQLEELEKAFERTHYPDIYTREELAQRTKLTEARVQVWFSNRRARWRKQAGANQLAAFNHLLPGGFPPTGMPTLPPYQLPDSTYPTTTISQDGGSTVHRPQPLPPSTMHQGGLAAAAAAADTSSAYGARHSFSSYSDSFMNPAAPSNHMNPVSNGLSPQVMSILGNPSAVPPQPQADFSISPLHGGLDSATSISASCSQRADSIKPGDSLPTSQAYCPPTYSTTGYSVDPVAGYQYGQYGQSECLVPWASPVPIPSPTPRASCLFMESYKVVSGWGMSISQMEKLKSSQMEQFT

SEQ ID NO: 56891 - protein, 518 aa, Homo sapiens
MAALPGTVPRMMRPAPGQNYPRTGFPLEVSTPLGQGRVNQLGGVFINGRPLPNHIRHKIVEMAHHGIRPCVISRQLRVSHGCVSKILCRYQETGSIRPGAIGGSKPRQVATPDVEKKIEEYKRENPGMFSWEIRDRLLKDGHCDRSTVPSVSSISRVLRIKFGKKEEEDEADKKEDDGEKKAKHSIDGILGDKGNRLDEGSDVESEPDLPLKRKQRRSRTTFTAEQLEELEKAFERTHYPDIYTREELAQRTKLTEARVQVWFSNRRARWRKQAGANQLAAFNHLLPGGFPPTGMPTLPPYQLPDSTYPTTTISQDGGSTVHRPQPLPPSTMHQGGLAAAAAAADTSSAYGARHSFSSYSDSFMNPAAPSNHMNPVSNGLSPQVMSILGNPSAVPPQPQADFSISPLHGGLDSATSISASCSQRADSIKPGDSLPTSQAYCPPTYSTTGYSVDPVAGYQYGQYGQSECLVPWASPVPIPSPTPRASCLFMESYKVVSGWGMSISQMEKLKSSQMEQFT

SEQ ID NO: 56892 - protein, 505 aa, Homo sapiens
MAALPGTVPRMMRPAPGQNYPRTGFPLEVSTPLGQGRVNQLGGVFINGRPLPNHIRHKIVEMAHHGIRPCVISRQLRVSHGCVSKILCRYQETGSIRPGAIGGSKPRQVATPDVEKKIEEYKRENPGMFSWEIRDRLLKDGHCDRSTVPSGLVSSISRVLRIKFGKKEEEDEADKKEDDGEKKAKHSIDGILGDKGNRLDEGSDVESEPDLPLKRKQRRSRTTFTAEQLEELEKAFERTHYPDIYTREELAQRTKLTEARVQVWFSNRRARWRKQAGANQLAAFNHLLPGGFPPTGMPTLPPYQLPDSTYPTTTISQDGGSTVHRPQPLPPSTMHQGGLAAAAAAADTSSAYGARHSFSSYSDSFMNPAAPSNHMNPVSNGLSPQVMSILGNPSAVPPQPQADFSISPLHGGLDSATSISASCSQRADSIKPGDSLPTSQAYCPPTYSTTGYSVDPVAGYQYGQYGQTAVDYLAKNVSLSTQRRMKLGEHSAVLGLLPVETGQAY

SEQ ID NO: 56893 - protein, 341 aa, Homo sapiens
MEPAFGEVNQLGGVFVNGRPLPNAIRLRIVELAQLGIRPCDISRQLRVSHGCVSKILARYNETGSILPGAIGGSKPRVTTPTVVKHIRTYKQRDPGIFAWEIRDRLLADGVCDKYNVPSVSSISRILRNKIGNLAQQGHYDSYKQHQPTPQPALPYNHIYSYPSPITAAAAKVPTPPGVPAIPGSVAMPRTWPSSHSVTDILGIRSITDQVSDSSPYHSPKVEEWSSLGRNNFPAAAPHAVNGLEKGALEQEAKYGQAPNGLPAVGSFVSASSMAPYPTPAQVSPYMTYSAAPSGYVAGHGWQHAGGTSLSPHNCDIPASLAFKGMQAAREGSHSVTASAL

SEQ ID NO: 56894 - protein, 341 aa, Homo sapiens; identical to SEQ ID NO: 56893

SEQ ID NO: 56895 - protein, 60 aa, Homo sapiens
SDSSPYHSPKVEEWSSLGRNNFPAAAPHAVNGLEKGALEQEAKYGQIQNFFLLMISRLKF

SEQ ID NO: 56896 - protein, 303 aa, Homo sapiens
MGRPLLLPLLPLLLPPAFLQPSGSTGSGPSYLYGVTQPKHLSASMGGSVEIPFSFYYPWELATAPDVRISWRRGHFHRQSFYSTRPPSIHKDYVNRLFLNWTEGQKSGFLRISNLQKQDQSVYFCRVELDTRSSGRQQWQSIEGTKLSITQAVTTTTQRPSSMTTTWRLSSTTTTTGLRVTQGKRRSDSWHISLETAVGVAVAVTVLGIMILGLICLLRWRRRKGQQRTKATTPAREPFQNTEEPYENIRNEGQNTDPKLNPKDDGIVYASLALSSSTSPRAPPSHRPLKSPQNETLYSVLKA

SEQ ID NO: 56897 - protein, 230 aa, Homo sapiens
MGRPLLLPLLPLLLPPAFLQPSGSTGSGPSYLYGVTQPKHLSASMGGSVEIPFSFYYPWELATAPDVRISWRRGHFHRQSFYSTRPPSIHKDYVNRLFLNWTEGQKSGFLRISNLQKQDQSVYFCRVELDTRSSGRQQWQSIEGTKLSITQGQQRTKATTPAREPFQNTEEPYENIRNEGQNTDPKLNPKDDGIVYASLALSSSTSPRAPPSHRPLKSPQNETLYSVLKA

SEQ ID NO: 56898 - protein, 175 aa, Homo sapiens
MGRPLLLPLLPLLLPPAFLQPSGSTGSGPSYLYGVTQPKHLSASMGGSVEIPFSFYYPWELATAPDVRISWRRGHFHRQSFYSTRPPSIHKDYVNRLFLNWTEGQKSGFLRISNLQKQDQSVYFCRVELDTRSSGRQQWQSIEGTKLSITQGNPSKTQRSHMRISGMKDKIQIPS

SEQ ID NO: 56899 - protein, 163 aa, Homo sapiens
MGRPLLLPLLPLLLPPAFLQPSGSTGSGPSYLYGVTQPKHLSASMGGSVEIPFSFYYPWELATAPDVRISWRRGHFHRQSFYSTRPPSIHKDYVNRLFLNWTEGQKSGFLRISNLQKQDQSVYFCRVELDTRSSGRQQWQSIEGTKLSITQGQQRTKATTPAR

SEQ ID NO: 56900 - protein, 227 aa, Homo sapiens
MGRPLLLPLLLLLQPPAFLQPGGSTGSGPSYLYGVTQPKHLSASMGGSVEIPFSFYYPWELAIVPNVRISWRRGHFHGQSFYSTRPPSIHKDYVNRLFLNWTEGQESGFLRISNLRKEDQSVYFCRVELDTRRSGRQQLQSIKGTKLTITQAVTTTTTWRPSSTTTIAGLRVTESKGHSESWHLSLDTAIRVALAVAVLKTVILGLLCLLLLWWRRRKGSRAPSSDF

SEQ ID NO: 56901 - protein, 332 aa, Homo sapiens
MGRASYGGSPVGHQSSSDHPRAKTCRSPVRDGPRTLCGVPTVALSLHFLREASSGSRTCGRRTSLCTSAKSSWTYRSALRQPLHRAPLLPGQLCWSPRPLEKNKAMGRPLLLPLLLLLQPPAFLQPGGSTGSGPSYLYGVTQPKHLSASMGGSVEIPFSFYYPWELAIVPNVRISWRRGHFHGQSFYSTRPPSIHKDYVNRLFLNWTEGQESGFLRISNLRKEDQSVYFCRVELDTRRSGRQQLQSIKGTKLTITQAVTTTTTWRPSSTTTIAGLRVTESKGHSESWHLSLDTAIRVALAVAVLKTVILGLLCLLLLWWRRRKGSRAPSSDF

SEQ ID NO: 56902 - protein, 127 aa, Homo sapiens
MGRPLLLPLLLLLQPPAFLQPGGSTGSGPSYLYGVTQPKHLSASMGGSVEIPFSFYYPWELAIVPNVRISWRRGHFHGQSFYSTRPPSIHKDYVNRLFLNWTEGQESGFLRISNLRKEDQSVYFCRV

SEQ ID NO: 56903 - protein, 227 aa, Homo sapiens; identical to SEQ ID NO: 56900

SEQ ID NO: 56904 - protein, 127 aa, Homo sapiens; identical to SEQ ID NO: 56902

SEQ ID NO: 56905 - protein, 60 aa, Homo sapiens
MGRPLLLPLLLLLQPPAFLQPGLCEPALSELDRGSGERLPQDLKPAEGGPVCVFLPSRAG

SEQ ID NO: 56906 - protein, 121 aa, Homo sapiens
MGRPLLLPLLLLLQPPAFLQPGGSTGSGPSYLYGVTQPKHLSASMGGSVEIPFSFYYPWELAIVPNVRISWRRGHFHGQSFYSTRPPSIHKDYVNRLFLNWTEGQESGFLRISNLRKEDQS

SEQ ID NO: 56907 - protein, 127 aa, Homo sapiens; identical to SEQ ID NO: 56902

SEQ ID NO: 56908 - protein, 227 aa, Homo sapiens; identical to SEQ ID NO: 56900

SEQ ID NO: 56909 - protein, 149 aa, Homo sapiens
MGRPLLLPLLLLLQPPAFLQPGLCEPALSELDRGSGERLPQDLKPAEGGPVCVFLPSRAGHPEIREAAVAVHQGDQTHHHPGCHNHHHLEAQQHNHHSRPQGHRKQRALRIMAPKSGHCHQGCIGCRCAQNCHFGTAVPPPPVVEEKER

SEQ ID NO: 56910 - protein, 271 aa, Homo sapiens
MGRASYGGSPVGHQSSSDHPRAKTCRSPVRDGPRTLCGVPTVALSLHFLREASSGSRTCGRRTSLCTSAKSSWTYRSGRLSWQSIKGTHLTITQALRQPLHRAPLLPGQLCWSPRPLEKNKAMGRPLLLPLLLLLQPPAFLQPGLCEPALSELDRGSGERLPQDLKPAEGGPVCVFLPSRAGHPEIREAAVAVHQGDQTHHHPGCHNHHHLEAQQHNHHSRPQGHRKQRALRIMAPKSGHCHQGCIGCRCAQNCHFGTAVPPPPVVEEKER

SEQ ID NO: 56911 - protein, 227 aa, Homo sapiens; identical to SEQ ID NO: 56900

SEQ ID NO: 56912 - protein, 108 aa, Homo sapiens
MGRASYGGSPVGHQSSSDHPRAKTCRSPVRDGPRTLCGVPTVALSLHFLREASSGSRTCGRRTSLCTSAKSSWTYRSGRLSWQSIKGTHLTITQALRQPLHRAPLLPG

SEQ ID NO: 56913 - protein, 127 aa, Homo sapiens; identical to SEQ ID NO: 56902

SEQ ID NO: 56914 - protein, 245 aa, Homo sapiens
MTSSYGHVLERQPALGGRLDSPGNLDTLQAKKNFSVSHLLDLEEAGDMVAAQADENVGEAGRSLLESPGLTSGSDTPQQDNDQLNSEEKKKRKQRRNRTTFNSSQLQALERVFERTHYPDAFVREDLARRVNLTEARVQVWFQNRRAKFRRNERAMLANKNASLLKSYSGDVTAVEQPIVPRPAPRPTDYLSWGTASPYSAMATYSATCANNSPAQGINMANSIANLRLKAKEYSLQRNQVPTVN

SEQ ID NO: 56915 - protein, 217 aa, Homo sapiens
MTSSYGHVLERQPALGGRLDSPGNLDTLQAKKNFSVSHLLDLEEAGDMVAAQADENVGEAGRSLLESPGLTSGSDTPQQDNDQLNSEEKKKRKQRRNRTTFNSSQLQALERVFERTHYPDAFVREDLARRVNLTEARVQVWFQNRRAKFRRNERAMLANKNASLLKSYSGDVTAVEQPIVPRPAPRPTDYLSWGTASPYRSSSLPRCCLHEGLHNGF

SEQ ID NO: 56916 - protein, 253 aa, Homo sapiens
MDSAAAAFALDKPALGPGPPPPPPALGPGDCAQARKNFSVSHLLDLEEVAAAGRLAARPGARAEAREGAAREPSGGSSGSEAAPQDGECPSPGRGSAAKRKKKQRRNRTTFNSSQLQALERVFERTHYPDAFVREELARRVNLSEARVQVWFQNRRAKFRRNERAMLASRSASLLKSYSQEAAIEQPVAPRPTALSPDYLSWTASSPYSTVPPYSPGSSGPATPGVNMANSIASLRLKAKEFSLHHSQVPTVN

SEQ ID NO: 56917 - protein, 284 aa, Homo sapiens
MDYSYLNSYDSCVAAMEASAYGDFGACSQPGGFQYSPLRPAFPAAGPPCPALGSSNCALGALRDHQPAPYSAVPYKFFPEPSGLHEKRKQRRIRTTFTSAQLKELERVFAETHYPDIYTREELALKIDLTEARVQVWFQNRRAKFRKQERAASAKGAAGAAGAKKGEARCSSEDDDSKESTCSPTPDSTASLPPPPAPGLASPRLSPSPLPVALGSGPGPGPGPQPLKGALWAGVAGGGGGGPGAGAAELLKAWQPAESGPGPFSGVLSSFHRKPGPALKTNLF

SEQ ID NO: 56918 - protein, 314 aa, Homo sapiens
MYKMEYSYLNSSAYESCMAGMDTSSLASAYADFSSCSQASGFQYNPIRTTFGATSGCPSLTPGSCSLGTLRDHQSSPYAAVPYKLFTDHGGLNEKRKQRRIRTTFTSAQLKELERVFAETHYPDIYTREELALKIDLTEARVQVWFQNRRAKFRKQERAAAAAAAAAKNGSSGKKSDSSRDDESKEAKSTDPDSTGGPGPNPNPTPSCGANGGGGGGPSPAGAPGAAGPGGPGGEPGKGGAAAAAAAAAAAAAAAAAAAAGGLAAAGGPGQGWAPGPGPITSIPDSLGGPFASVLSSLQRPNGAKAALVKSSMF

SEQ ID NO: 56919 - protein, 314 aa, Homo sapiens
MDAFKGGMSLERLPEGLRPPPPPPHDMGPAFHLARPADPREPLENSASESSDTELPEKERGGEPKGPEDSGAGGTGCGGADDPAKKKKQRRQRTHFTSQQLQELEATFQRNRYPDMSMREEIAVWTNLTEPRVRVWFKNRRAKWRKRERNQQLDLCKGGYVPQFSGLVQPYEDVYAAGYSYNNWAAKSLAPAPLSTKSFTFFNSMSPLSSQSMFSAPSSISSMTMPSSMGPGAVPGMPNSGLNNINNLTGSSLNSAMSPGACPYGTPASPYSVYRDTCNSSLASLRLKSKQHSSFGYGGLQGPASGLNACQYNS

SEQ ID NO: 56920 - protein, 114 aa, Homo sapiens
MDAFKGGMSLERLPEGLRPPPPPPHDMGPAFHLARPADPREPLENSASESSDTELPEKERGGEPKGPEDSGAGGTGCGGADDPAKKKKQRRQRTHFTSQQLQELEATFQRNRYP

SEQ ID NO: 56921 - protein, 314 aa, Homo sapiens; identical to SEQ ID NO: 56919

SEQ ID NO: 56922 - protein, 131 aa, Homo sapiens
MDAFKGGMSLERLPEGLRPPPPPPHDMGPAFHLARPADPREPLENSASESSDTELPEKERGGEPKGPEDSGAGGTGCGGADDPAKKKKQRRQRTHFTSQQLQELEATFQRNRYPDMSMREEIAVWTNLTEP

SEQ ID NO: 56923 - protein, 324 aa, Homo sapiens
MNCMKGPLHLEHRAAGTKLSAVSSSSCHHPQPLAMASVLAPGQPRSLDSSKHRLEVHTISDTSSPEAAEKDKSQQGKNEDVGAEDPSKKKRQRRQRTHFTSQQLQELEATFQRNRYPDMSTREEIAVWTNLTEARVRVWFKNRRAKWRKRERNQQAELCKNGFGPQFNGLMQPYDDMYPGYSYNNWAAKGLTSASLSTKSFPFFNSMNVNPLSSQSMFSPPNSISSMSMSSSMVPSAVTGVPGSSLNSLNNLNNLSSPSLNSAVPTPACPYAPPTPPYVYRDTCNSSLASLRLKAKQHSSFGYASVQNPASNLSACQYAVDRPV

SEQ ID NO: 56924 - protein, 317 aa, Homo sapiens
METNCRKLVSACVQLGVQPAAVECLFSKDSEIKKVEFTDSPESRKEAASSKFFPRQHPGANEKDKSQQGKNEDVGAEDPSKKKRQRRQRTHFTSQQLQELEATFQRNRYPDMSTREEIAVWTNLTEARVRVWFKNRRAKWRKRERNQQAELCKNGFGPQFNGLMQPYDDMYPGYSYNNWAAKGLTSASLSTKSFPFFNSMNVNPLSSQSMFSPPNSISSMSMSSSMVPSAVTGVPGSSLNSLNNLNNLSSPSLNSAVPTPACPYAPPTPPYVYRDTCNSSLASLRLKAKQHSSFGYASVQNPASNLSACQYAVDRPV

SEQ ID NO: 56925 - protein, 271 aa, Homo sapiens
METNCRKLVSACVQLEKDKSQQGKNEDVGAEDPSKKKRQRRQRTHFTSQQLQELEATFQRNRYPDMSTREEIAVWTNLTEARVRVWFKNRRAKWRKRERNQQAELCKNGFGPQFNGLMQPYDDMYPGYSYNNWAAKGLTSASLSTKSFPFFNSMNVNPLSSQSMFSPPNSISSMSMSSSMVPSAVTGVPGSSLNSLNNLNNLSSPSLNSAVPTPACPYAPPTPPYVYRDTCNSSLASLRLKAKQHSSFGYASVQNPASNLSACQYAVDRPV

SEQ ID NO: 56926 - protein, 317 aa, Homo sapiens; identical to SEQ ID NO: 56924

SEQ ID NO: 56927 - protein, 290 aa, Homo sapiens
METNCRKLVSACVQLGVQPAAVECLFSKDSEIKKVEFTDSPESRKEAASSKFFPRQHPGANEKDKSQQGKNEDVGAEDPSKKKRQRRQRTHFTSQQLQELEATFQRNRYPDMSTREEIAVWTNLTEARVRVWFKNRRAKWRKRERNQQAELCKNGFGPQFNGLMQPYDDMYPGYSYNNWAAKGLTSASLSTKSFPFFNSMNVNPLSSQSMFSPPNSISSMSMSSSMVPSAVTGVPGSSLNSLNNLNNLSSPSLNSAVPTPACPYAPPTPPYVYRDTCNSSLASLRLKAKQ

SEQ ID NO: 56928 - protein, 118 aa, Homo sapiens
METNCRKLVSACVQLEKDKSQQGKNEDVGAEDPSKKKRQRRQRTHFTSQQLQELEATFQRNRYPDMSTREEIAVWTNLTEARVRVWFKNRRAKWRKRERNQQAELCKNGFGPQFNGLM

SEQ ID NO: 56929 - protein, 302 aa, Homo sapiens
MEFGLLSEAEARSPALSLSDAGTPHPQLPEHGCKGQEHSDSEKASASLPGGSPEDGSLKKKQRRQRTHFTSQQLQELEATFQRNRYPDMSTREEIAVWTNLTEARVRVWFKNRRAKWRKRERSQQAELCKGSFAAPLGGLVPPYEEVYPGYSYGNWPPKALAPPLAAKTFPFAFNSVNVGPLASQPVFSPPSSIAASMVPSAAAAPGTVPGPGALQGLGGGPPGLAPAAVSSGAVSCPYASAAAAAAAAASSPYVYRDPCNSSLASLRLKAKQHASFSYPAVHGPPPAANLSPCQYAVERPV

SEQ ID NO: 56930 - protein, 302 aa, Homo sapiens; identical to SEQ ID NO: 56929

SEQ ID NO: 56931 - protein, 392 aa, Homo sapiens
MELVAGCYEQVLFGFAVHPEPEACGDHEQWTLVADFTHHAHTASLSAVAVNSRFVVTGSKDETIHIYDMKKKIEHGALVHHSGTITCLKFYGNRHLISGAEDGLICIWDAKKWECLKSIKAHKGQVTFLSIHPSGKLALSVGTDKTLRTWNLVEGRSAFIKNIKQNAHIVEWSPRGEQYVVIIQNKIDIYQLDTASISGTITNEKRISSVKFLSESVLAVAGDEEVIRFFDCDSLVCLCEFKAHENRVKDMFSFEIPEHHVIVSASSDGFIKMWKLKQDKKVPPSLLCEINTNARLTCLGVWLDKVADMKESLPPAAEPSPVSKEQSKIGKKEPGDTVHKEEKRSKPNTKKRGLTGDSKKATKESGLISTKKRKMVEMLEKKRKKKKIKTMQ

SEQ ID NO: 56932 - protein, 1123 aa, Homo sapiens
MSGTSSHESFYDSLSDMQEESKNTDFFPGLSAFLSQEEINKSLDLARRAIADSETEDFDSEKEISQIFSTSPASLCEHPSHKETKLGEHASRRPQDNRSTPVQPLAEKQTKSISSPVSKRKPAMSPLLTRPSYIRSLRKAEKRGAKTPSTNVKPKTPHQRKGGPQSQLCDKAANLIEELTSIFKAAKPRNRSPNGESSSPDSGYLSPKNQPSALLSASASQSPMEDQGEMEREVKSPGARHCYQDNQDLAVPHNRKSHPQPHSALHFPAAPRFIQKLRSQEVAEGSRVYLECRVTGNPTPRVRWFCEGKELHNTPDIQIHCEGGDLHTLIIAEAFEDDTGRYTCLATNPSGSDTTSAEVFIEGASSTDSDSESLAFKSRAGAMPQAQKKTTSVSLTIGSSSPKTGVTTAVIQPLSVPVQQVHSPTSYLCRPDGTTTAYFPPVFTKELQNTAVAEGQVVVLECRVRGAPPLQVQWFRQGSEIQDSPDFRILQKKPRSTAEPEEICTLVIAETFPEDAGIFTCSARNDYGSATSTAQLVVTSANTENCSYESMGESNNDHFQHFPPPPPILETSSLELASKKPSEIQQVNNPELGLSRAALQMQFNAAERETNGVHPSRGVNGLINGKANSNKSLPTPAVLLSPTKEPPPLLAKPKLGFPKKASRTARIASDEEIQGTKDAVIQDLERKLRFKEDLLNNGQPRLTYEERMARRLLGADSATVFNIQEPEEETANQDIGSPHASVGSPLDGQKEYKVSSCEQRLISEIEYRLERSPVDESGDEVQYGDVPVENGMAPFFEMKLKHYKIFEGMPVTFTCRVAGNPKPKIYWFKDGKQISPKSDHYTIQRDLDGTCSLHTTASTLDDDGNYTIMAANPQGRISCTGRLMVQAVNQRGRSPRSPSGHPHVRRPRSRSRDSGDENEPIQERFFRPHFLQAPGDLTVQEGKLCRMDCKVSGLPTPDLSWQLDGKPVRPDSAHKMLVRENGVHSLIIEPVTSRDAGIYTCIATNRAGQNSFSLELVVAAKEAHKPPVFIEKLQNTGVADGYPVRLECRVLGVPPPQIFWKKENESLTHSTDRVSMHQDNHGYICLLIQGATKEDAGWYTVSAKNEAGIVSCTARLDVYISRH

SEQ ID NO: 56933 - protein, 672 aa, Homo sapiens
MSALASRSAPAMQSSGSFNYARPKQFIAAQNLGPASGHGTPASSPSSSSLPSPMSPTPRQFGRAPVPPFAQPFGAEPEAPWGSSSPSPPPPPPPVFSPTAAFPVPDVFPLPPPPPPLPSPGQASHCSSPATRFGHSQTPAAFLSALLPSQPPPAAVNALGLPKGVTPAGFPKKASRTARIASDEEIQGTKDAVIQDLERKLRFKEDLLNNGQPRLTYEERMARRLLGADSATVFNIQEPEEETANQEYKVSSCEQRLISEIEYRLERSPVDESGDEVQYGDVPVENGMAPFFEMKLKHYKIFEGMPVTFTCRVAGNPKPKIYWFKDGKQISPKSDHYTIQRDLDGTCSLHTTASTLDDDGNYTIMAANPQGRISCTGRLMVQAVNQRGRSPRSPSGHPHVRRPRSRSRDSGDENEPIQERFFRPHFLQAPGDLTVQEGKLCRMDCKVSGLPTPDLSWQLDGKPVRPDSAHKMLVRENGVHSLIIEPVTSRDAGIYTCIATNRAGQNSFSLELVVAAKEAHKPPVFIEKLQNTGVADGYPVRLECRVLGVPPPQIFWKKENESLTHSTDRVSMHQDNHGYICLLIQGATKEDAGWYTVSAKNEAGIVSCTARLDVYTQWHQQSQSTKPKKVRPSASRYAALSDQGLDIKAAFQPEANPSHLTLNTALVESEDL

SEQ ID NO: 56934 - protein, 777 aa, Homo sapiens
MPQAQKKTTSVSLTIGSSSPKTGVTTAVIQPLSVPVQQVHSPTSYLCRPDGTTTAYFPPVFTKELQNTAVAEGQVVVLECRVRGAPPLQVQWFRQGSEIQDSPDFRILQKKPRSTAEPEEICTLVIAETFPEDAGIFTCSARNDYGSATSTAQLVVTSANTENCSYESMGESNNDHFQHFPPPPPILETSSLELASKKPSEIQQVNNPELGLSRAALQMQFNAAERETNGVHPSRGVNGLINGKANSNKSLPTPAVLLSPTKEPPPLLAKPKLGFPKKASRTARIASDEEIQGTKDAVIQDLERKLRFKEDLLNNGQPRLTYEERMARRLLGADSATVFNIQEPEEETANQEYKVSSCEQRLISEIEYRLERSPVDESGDEVQYGDVPVENGMAPFFEMKLKHYKIFEGMPVTFTCRVAGNPKPKIYWFKDGKQISPKSDHYTIQRDLDGTCSLHTTASTLDDDGNYTIMAANPQGRISCTGRLMVQAVNQRGRSPRSPSGHPHVRRPRSRSRDSGDENEPIQERFFRPHFLQAPGDLTVQEGKLCRMDCKVSGLPTPDLSWQLDGKPVRPDSAHKMLVRENGVHSLIIEPVTSRDAGIYTCIATNRAGQNSFSLELVVAAKEAHKPPVFIEKLQNTGVADGYPVRLECRVLGVPPPQIFWKKENESLTHSTDRVSMHQDNHGYICLLIQGATKEDAGWYTVSAKNEAGIVSCTARLDVYTQWHQQSQSTKPKKVRPSASRYAALSDQGLDIKAAFQPEANPSHLTLNTALVESEDL

SEQ ID NO: 56935 - protein, 1106 aa, Homo sapiens
MSGTSSHESFYDSLSDMQEESKNTDFFPGLSAFLSQEEINKSLDLARRAIADSETEDFDSEKEISQIFSTSPASLCEHPSHKETKLGEHASRRPQDNRSTPVQPLAEKQTKSISSPVSKRKPAMSPLLTRPSYIRSLRKAEKRGAKTPSTNVKPKTPHQRKGGPQSQLCDKAANLIEELTSIFKAAKPRNRSPNGESSSPDSGYLSPKNQPSALLSASASQSPMEDQGEMEREVKSPGARHCYQDNQDLAVPHNRKSHPQPHSALHFPAAPRFIQKLRSQEVAEGSRVYLECRVTGNPTPRVRWFCEGKELHNTPDIQIHCEGGDLHTLIIAEAFEDDTGRYTCLATNPSGSDTTSAEVFIEGASSTDSDSESLAFKSRAGAMPQAQKKTTSVSLTIGSSSPKTGVTTAVIQPLSVPVQQVHSPTSYLCRPDGTTTAYFPPVFTKELQNTAVAEGQVVVLECRVRGAPPLQVQWFRQGSEIQDSPDFRILQKKPRSTAEPEEICTLVIAETFPEDAGIFTCSARNDYGSATSTAQLVVTSANTENCSYESMGESNNDHFQHFPPPPPILETSSLELASKKPSEIQQVNNPELGLSRAALQMQFNAAERETNGVHPSRGVNGLINGKANSNKSLPTPAVLLSPTKEPPPLLAKPKLGFPKKASRTARIASDEEIQGTKDAVIQDLERKLRFKEDLLNNGQPRLTYEERMARRLLGADSATVFNIQEPEEETANQEYKVSSCEQRLISEIEYRLERSPVDESGDEVQYGDVPVENGMAPFFEMKLKHYKIFEGMPVTFTCRVAGNPKPKIYWFKDGKQISPKSDHYTIQRDLDGTCSLHTTASTLDDDGNYTIMAANPQGRISCTGRLMVQAVNQRGRSPRSPSGHPHVRRPRSRSRDSGDENEPIQERFFRPHFLQAPGDLTVQEGKLCRMDCKVSGLPTPDLSWQLDGKPVRPDSAHKMLVRENGVHSLIIEPVTSRDAGIYTCIATNRAGQNSFSLELVVAAKEAHKPPVFIEKLQNTGVADGYPVRLECRVLGVPPPQIFWKKENESLTHSTDRVSMHQDNHGYICLLIQGATKEDAGWYTVSAKNEAGIVSCTARLDVYISRH

SEQ ID NO: 56936 - protein, 410 aa, Homo sapiens
MSPLLTRPSYIRSLRKAEKRGAKTPSTNVKPKTPHQRKGGPQSQLCDKAANLIEELTSIFKAAKPRNRSPNGESSSPDSGYLSPKNQPSALLSASASQSPMEDQGEMEREVKSPGARHCYQDNQDLAVPHNRKSHPQPHSALHFPAAPRFIQKLRSQEVAEGSRVYLECRVTGNPTPRVRWFCEGKELHNTPDIQIHCEGGDLHTLIIAEAFEDDTGRYTCLATNPSGSDTTSAEVFIEGASSTDSDSESLAFKSRAGAMPQAQKKTTSVSLTIGSSSPKTGVTTAVIQPLSVPVQQVHSPTSYLCRPDGTTTAYFPPVFTKELQNTAVAEGQVVVLECRVRGAPPLQVQWFRQGSEIQDSPDFRILQKKPRSTAEPDVLYVFVRVRCHQMKIQYYNLAHLISSWLSSFL

SEQ ID NO: 56937 - protein, 1001 aa, Homo sapiens
MPQAQKKTTSVSLTIGSSSPKTGVTTAVIQPLSVPVQQVHSPTSYLCRPDGTTTAYFPPVFTKELQNTAVAEGQVVVLECRVRGAPPLQVQWFRQGSEIQDSPDFRILQKKPRSTAEPEEICTLVIAETFPEDAGIFTCSARNDYGSATSTAQLVVTSANTENCSYESMGESNNDHFQHFPPPPPILETSSLELASKKPSEIQQVNNPELGLSRAALQMQFNAAERETNGVHPSRGVNGLINGKANSNKSLPTPAVLLSPTKEPPPLLAKPKLDPLKLQQLQNQIRLEQEAGARQPPPAPRSAPPSPPFPPPPAFPELAACTPPASPEPMSALASRSAPAMQSSGSFNYARPKQFIAAQNLGPASGHGTPASSPSSSSLPSPMSPTPRQFGRAPVPPFAQPFGAEPEAPWGSSSPSPPPPPPPVFSPTAAFPVPDVFPLPPPPPPLPSPGQASHCSSPATRFGHSQTPAAFLSALLPSQPPPAAVNALGLPKGVTPAGFPKKASRTARIASDEEIQGTKDAVIQDLERKLRFKEDLLNNGQPRLTYEERMARRLLGADSATVFNIQEPEEETANQEYKVSSCEQRLISEIEYRLERSPVDESGDEVQYGDVPVENGMAPFFEMKLKHYKIFEGMPVTFTCRVAGNPKPKIYWFKDGKQISPKSDHYTIQRDLDGTCSLHTTASTLDDDGNYTIMAANPQGRISCTGRLMVQAVNQRGRSPRSPSGHPHVRRPRSRSRDSGDENEPIQERFFRPHFLQAPGDLTVQEGKLCRMDCKVSGLPTPDLSWQLDGKPVRPDSAHKMLVRENGVHSLIIEPVTSRDAGIYTCIATNRAGQNSFSLELVVAAKEAHKPPVFIEKLQNTGVADGYPVRLECRVLGVPPPQIFWKKENESLTHSTDRVSMHQDNHGYICLLIQGATKEDAGWYTVSAKNEAGIVSCTARLDVYTQWHQQSQSTKPKKVRPSASRYAALSDQGLDIKAAFQPEANPSHLTLNTALVESEDL

SEQ ID NO: 56938 - protein, 160 aa, Homo sapiens
  VARIANT 1: note = MOD_RES - Any amino acid
XGKPVRPDSAHKMLVRENGVHSLIIEPVTSRDAGIYTCIATNRAGQNSFSLELVVAAKEAHKPPVFIEKLQNTGVADGYPVRLECRVLGVPPPQIFWKKENESLTHSTDRVSMHQDNHGYICLLIQGATKEDAGWYTVSAKNEAGIVSCTARLDVYISRH

SEQ ID NO: 56939 - protein, 512 aa, Homo sapiens
KNTDFFPGLSAFLSQEEINKSLDLARRAIADSETEDFDSEKEISQIFSTSPASLCEHPSHKETKLGEHASRRPQDNRSTPVQPLAEKQTKSISSPVSKRKPAMSPLLTRPSYIRSLRKAEKRGAKTPSTNVKPKTPHQRKGGPQSQLCDKAANLIEELTSIFKAAKPRNRSPNGESSSPDSGYLSPKNQPSALLSASASQSPMEDQGEMEREVKSPGARHCYQDNQDLAVPHNRKSHPQPHSALHFPAAPRFIQKLRSQEVAEGSRVYLECRVTGNPTPRVRWFCEGKELHNTPDIQIHCEGGDLHTLIIAEAFEDDTGRYTCLATNPSGSDTTSAEVFIEGASSTDSDSESLAFKSRAGAMPQAQKKTTSVSLTIGSSSPKTGVTTAVIQPLSVPVQQVHSPTSYLCRPDGTTTAYFPPVFTKELQNTAVAEGQVVVLECRVRGAPPLQVQWFRQGSEIQDSPDFRILQKKPRSTAEPDVLYVFVRVRCHQMKIQYYNLAHLISSWLSSFL

SEQ ID NO: 56940 - protein, 28 aa, Homo sapiens
MSGTSSHESFYDSLSDMQEESKNTDFFP

SEQ ID NO: 56941 - protein, 172 aa, Homo sapiens
MSVPGPSSPDGALTRPPYCLEAGEPTPGLSDTSPDEGLIEDLTIEDKAVEQLAEGLLSHYLPDLQRSKQALQELTQNQVVLLDTLEQEISKFKECHSMLDINALFAEAKHYHAKLVNIRKEMLMLHEKTSKLKKRALKLQQKRQKEELEREQQREKEFEREKQLTARPAKRM

SEQ ID NO: 56942 - protein, 271 aa, Homo sapiens
MASPGCLWLLAVALLPWTCASRALQHLDPPAPLPLVIWHGMGSRYVAQTGLELLASSNPPASSYQSAGMIGDSCCNPLSMGAIKKMVEKKIPGIYVLSLEIGKTLMEDVENSFFLNVNSQVTTVCQALAKDPKLQQGYNAMGFSQGGQFLRAVAQRCPSPPMINLISVGGQHQGVFGLPRCPGESSHICDFIRKTLNAGAYSKVVQERLVQAEYWHDPIKEDVYRNHSIFLADINQERGINESYKKNLMALKKFVMVKFLNDSIVDPVDSE

SEQ ID NO: 56943 - protein, 306 aa, Homo sapiens
MASPGCLWLLAVALLPWTCASRALQHLDPPAPLPLVIWHGMGDSCCNPLSMGAIKKMVEKKIPGIYVLSLEIGKTLMEDVENSFFLNVNSQVTTVCQALAKDPKLQQGYNAMGFSQGGQFLRAVAQRCPSPPMINLISVGGQHQGVFGLPRCPGESSHICDFIRKTLNAGAYSKVVQERLVQAEYWHDPIKEDVYRNHSIFLADINQERGINESYKKNLMALKKFVMVKFLNDSIVDPVDSEWFGFYRSGQAKETIPLQETSLYTQDRLGLKEMDNAGQLVFLATEGDHLQLSEEWFYAHIIPFLG

SEQ ID NO: 56944 - protein, 203 aa, Homo sapiens
MASPGCLWLLAVALLPWTCASRALQHLDPPAPLPLVIWHGMGVFGLPRCPGESSHICDFIRKTLNAGAYSKVVQERLVQAEYWHDPIKEDVYRNHSIFLADINQERGINESYKKNLMALKKFVMVKFLNDSIVDPVDSEWFGFYRSGQAKETIPLQETSLYTQDRLGLKEMDNAGQLVFLATEGDHLQLSEEWFYAHIIPFLG

SEQ ID NO: 56945 - protein, 306 aa, Homo sapiens; identical to SEQ ID NO: 56943

SEQ ID NO: 56946 - protein, 302 aa, Homo sapiens
MLGLCGQRLPAAWVLLLLPFLPLLLLAAPAPHRASYKPVIVVHGLFDSSYSFRHLLEYINETHPGTVVTVLDLFDGRESLRPLWEQVQGFREAVVPIMAKAPQGVHLICYSQGGLVCRALLSVMDDHNVDSFISLSSPQMGQYGDTDYLKWLFPTSMRSNLYRICYSPWGQEFSICNYWHDPHHDDLYLNASSFLALINGERDHPNATVWRKNFLRVGHLVLIGGPDDGVITPWQSSFFGFYDANETVLEMEEQLVYLRDSFGLKTLLARGAIVRCPMAGISHTAWHSNRTLYETCIEPWLS

SEQ ID NO: 56947 - protein, 308 aa, Homo sapiens
MKSCGSMLGLCGQRLPAAWVLLLLPFLPLLLLAAPAPHRASYKPVIVVHGLFDSSYSFRHLLEYINETHPGTVVTVLDLFDGRESLRPLWEQVQGFREAVVPIMAKAPQGVHLICYSQGGLVCRALLSVMDDHNVDSFISLSSPQMGQYGDTDYLKWLFPTSMRSNLYRICYSPWGQEFSICNYWHDPHHDDLYLNASSFLALINGERDHPNATVWRKNFLRVGHLVLIGGPDDGVITPWQSSFFGFYDANETVLEMEEQLVYLRDSFGLKTLLARGAIVRCPMAGISHTAWHSNRTLYETCIEPWLS

SEQ ID NO: 56948 - protein, 302 aa, Homo sapiens; identical to SEQ ID NO: 56946

SEQ ID NO: 56949 - protein, 302 aa, Homo sapiens; identical to SEQ ID NO: 56946

SEQ ID NO: 56950 - protein, 308 aa, Homo sapiens
MKSCGSMLGLWGQRLPAAWVLLLLPFLPLLLLAAPAPHRESYKPVIVVHGLFDSSYSFRHLLEYINETHPGTVVTVLDLFDGRESLRPLWEQVQGFREAVVPIMAKAPQGVHLICYSQGGLVCRALLSVMDDHNVDSFISLSSPQMGQYGDTDYLKWLFPTSMRSNLYRICYSPWGQEFSICNYWHDPHHDDLYLNASSFLALINGERDHPNATVWRKNFLRVGHLVLIGGPDDGVITPWQSSFFGFYDANETVLEMEEQLVYLRDSFGLKTLLARGAIVRCPMAGISHTAWHSNRTLYETCIEPWLS

SEQ ID NO: 56951 - protein, 308 aa, Homo sapiens
MKSCGSMLGLWGQRLPAAWVLLLLPFLPLLLLAAPAPHRASYKPVIVVHGLFDSSYSFRHLLEYINETHPGTVVTVLDLFDGRESLRPLWEQVQGFREAVVPIMAKAPQGVHLICYSQGGLVCRALLSVMDDHNVDSFISLSSPQMGQYGDTDYLKWLFPTSMRSNLYRICYSPWGQEFSICNYWHDPHHDDLYLNASSFLALINGERDHPNATVWRKNFLRVGHLVLIGGPDDGVITPWQSSFFGFYDANETVLEMEEQLVYLRDSFGLKTLLARGAIVRCPMAGISHTAWHSNRTLYETCIEPWLS

SEQ ID NO: 56952 - protein, 302 aa, Homo sapiens; identical to SEQ ID NO: 56946

SEQ ID NO: 56953 - protein, 302 aa, Homo sapiens
MLGLWGQRLPAAWVLLLLPFLPLLLLAAPAPHRESYKPVIVVHGLFDSSYSFRHLLEYINETHPGTVVTVLDLFDGRESLRPLWEQVQGFREAVVPIMAKAPQGVHLICYSQGGLVCRALLSVMDDHNVDSFISLSSPQMGQYGDTDYLKWLFPTSMRSNLYRICYSPWGQEFSICNYWHDPHHDDLYLNASSFLALINGERDHPNATVWRKNFLRVGHLVLIGGPDDGVITPWQSSFFGFYDANETVLEMEEQLVYLRDSFGLKTLLARGAIVRCPMAGISHTAWHSNRTLYETCIEPWLS

SEQ ID NO: 56954 - protein, 302 aa, Homo sapiens; identical to SEQ ID NO: 56953

SEQ ID NO: 56955 - protein, 302 aa, Homo sapiens; identical to SEQ ID NO: 56953

SEQ ID NO: 56956 - protein, 302 aa, Homo sapiens
MLGLWGQRLPAAWVLLLLPFLPLLLLAAPAPHRASYKPVIVVHGLFDSSYSFRHLLEYINETHPGTVVTVLDLFDGRESLRPLWEQVQGFREAVVPIMAKAPQGVHLICYSQGGLVCRALLSVMDDHNVDSFISLSSPQMGQYGDTDYLKWLFPTSMRSNLYRICYSPWGQEFSICNYWHDPHHDDLYLNASSFLALINGERDHPNATVWRKNFLRVGHLVLIGGPDDGVITPWQSSFFGFYDANETVLEMEEQLVYLRDSFGLKTLLARGAIVRCPMAGISHTAWHSNRTLYETCIEPWLS

SEQ ID NO: 56957 - protein, 302 aa, Homo sapiens; identical to SEQ ID NO: 56956

SEQ ID NO: 56958 - protein, 302 aa, Homo sapiens; identical to SEQ ID NO: 56956

SEQ ID NO: 56959 - protein, 308 aa, Homo sapiens; identical to SEQ ID NO: 56951

SEQ ID NO: 56960 - protein, 93 aa, Homo sapiens
MLGLWGQRLPAAWVLLLLPFLPLLLLAAPAPHRASYKPVIVVHGLFDSSYSFRHLLEYINEGALCAGLCFLSWMITTWILSSPSPLHRWDSME

SEQ ID NO: 56961 - protein, 180 aa, Homo sapiens
MLGLCGQRLPAAWVLLLLPFLPLLLLAAPAPHRASYKPVIVVHGLFDSSYSFRHLLEYINETHPGTVVTVLDLFDGRESLRPLWEQVQGFREAVVPIMAKAPQGVHLICYSQGGLVCRALLSVMDDHNVDSFISLSSPQMGQYGDTDYLKWLFPTSMRSNLYRICYSPWGQEFSICNYWH

SEQ ID NO: 56962 - protein, 308 aa, Homo sapiens; identical to SEQ ID NO: 56951

SEQ ID NO: 56963 - protein, 200 aa, Homo sapiens
MLGLWGQRLPAAWVLLLLPFLPLLLLAAPAPHRESYKPVIVVHGLFDSSYSFRHLLEYINETHPGTVVTVLDLFDGRESLRPLWEQVQGFREAVVPIMAKAPQGVHLICYSQGGLVCRALLSVMDDHNVDSFISLSSPQMGQYGDTDYLKWLFPTSMRSNLYRICYSPWGQEFSICNYWHDPHHDDLYLNASSFLALING

SEQ ID NO: 56964 - protein, 158 aa, Homo sapiens
MLGLWGQRLPAAWVLLLLPFLPLLLLAAPAPHRESYKPVIVVHGLFDSSYSFRHLLEYINEMGQYGDTDYLKWLFPTSMRSNLYRICYSPWGQEFSICNYWHDPHHDDLYLNASSFLALINGERDHPNATVWRKNFLRVGHLVLIGGPDDGVITPWQS

SEQ ID NO: 56965 - protein, 180 aa, Homo sapiens
MLGLWGQRLPAAWVLLLLPFLPLLLLAAPAPHRASYKPVIVVHGLFDSSYSFRHLLEYINETHPGTVVTVLDLFDGRESLRPLWEQVQGFREAVVPIMAKAPQGVHLICYSQGGLVCRALLSVMDDHNVDSFISLSSPQMGQYGDTDYLKWLFPTSMRSNLYRICYSPWGQEFSICNYWH

SEQ ID NO: 56966 - protein, 158 aa, Homo sapiens
MLGLWGQRLPAAWVLLLLPFLPLLLLAAPAPHRASYKPVIVVHGLFDSSYSFRHLLEYINEMGQYGDTDYLKWLFPTSMRSNLYRICYSPWGQEFSICNYWHDPHHDDLYLNASSFLALINGERDHPNATVWRKNFLRVGHLVLIGGPDDGVITPWQS

SEQ ID NO: 56967 - protein, 180 aa, Homo sapiens; identical to SEQ ID NO: 56965

SEQ ID NO: 56968 - protein, 302 aa, Homo sapiens; identical to SEQ ID NO: 56956

SEQ ID NO: 56969 - protein, 302 aa, Homo sapiens; identical to SEQ ID NO: 56956

SEQ ID NO: 56970 - protein, 308 aa, Homo sapiens; identical to SEQ ID NO: 56951

SEQ ID NO: 56971 - protein, 93 aa, Homo sapiens; identical to SEQ ID NO: 56960

SEQ ID NO: 56972 - protein, 302 aa, Homo sapiens; identical to SEQ ID NO: 56956

SEQ ID NO: 56973 - protein, 158 aa, Homo sapiens
MLGLCGQRLPAAWVLLLLPFLPLLLLAAPAPHRASYKPVIVVHGLFDSSYSFRHLLEYINEMGQYGDTDYLKWLFPTSMRSNLYRICYSPWGQEFSICNYWHDPHHDDLYLNASSFLALINGERDHPNATVWRKNFLRVGHLVLIGGPDDGVITPWQS

SEQ ID NO: 56974 - protein, 236 aa, Homo sapiens
MLGLWGQRLPAAWVLLLLPFLPLLLLAAPAPHRESYKPVIVVHGLFDSSYSFRHLLEYINETHPGTVVTVLDLFDGRESLRPLWEQVQGFREAVVPIMAKAPQGVHLICYSQGGLVCRALLSVMDDHNVDSFISLSSPQMGQYGDTDYLKWLFPTSMRSNLYRICYSPWGQEFSICNYWHDPHHDDLYLNASSFLALINGERDHPNATVWRKNFLRVGHLVLIGGPDDGVITPWQS

SEQ ID NO: 56975 - protein, 180 aa, Homo sapiens; identical to SEQ ID NO: 56965

SEQ ID NO: 56976 - protein, 236 aa, Homo sapiens; identical to SEQ ID NO: 56974

SEQ ID NO: 56977 - protein, 200 aa, Homo sapiens
MLGLWGQRLPAAWVLLLLPFLPLLLLAAPAPHRASYKPVIVVHGLFDSSYSFRHLLEYINETHPGTVVTVLDLFDGRESLRPLWEQVQGFREAVVPIMAKAPQGVHLICYSQGGLVCRALLSVMDDHNVDSFISLSSPQMGQYGDTDYLKWLFPTSMRSNLYRICYSPWGQEFSICNYWHDPHHDDLYLNASSFLALING

SEQ ID NO: 56978 - protein, 302 aa, Homo sapiens; identical to SEQ ID NO: 56956

SEQ ID NO: 56979 - protein, 200 aa, Homo sapiens; identical to SEQ ID NO: 56977

SEQ ID NO: 56980 - protein, 242 aa, Homo sapiens
MKSCGSMLGLWGQRLPAAWVLLLLPFLPLLLLAAPAPHRESYKPVIVVHGLFDSSYSFRHLLEYINETHPGTVVTVLDLFDGRESLRPLWEQVQGFREAVVPIMAKAPQGVHLICYSQGGLVCRALLSVMDDHNVDSFISLSSPQMGQYGDTDYLKWLFPTSMRSNLYRICYSPWGQEFSICNYWHDPHHDDLYLNASSFLALINGERDHPNATVWRKNFLRVGHLVLIGGPDDGVITPWQS

SEQ ID NO: 56981 - protein, 236 aa, Homo sapiens; identical to SEQ ID NO: 56974

SEQ ID NO: 56982 - protein, 180 aa, Homo sapiens; identical to SEQ ID NO: 56965

SEQ ID NO: 56983 - protein, 158 aa, Homo sapiens; identical to SEQ ID NO: 56966

SEQ ID NO: 56984 - protein, 200 aa, Homo sapiens; identical to SEQ ID NO: 56963

SEQ ID NO: 56985 - protein, 200 aa, Homo sapiens
MLGLCGQRLPAAWVLLLLPFLPLLLLAAPAPHRASYKPVIVVHGLFDSSYSFRHLLEYINETHPGTVVTVLDLFDGRESLRPLWEQVQGFREAVVPIMAKAPQGVHLICYSQGGLVCRALLSVMDDHNVDSFISLSSPQMGQYGDTDYLKWLFPTSMRSNLYRICYSPWGQEFSICNYWHDPHHDDLYLNASSFLALING

SEQ ID NO: 56986 - protein, 146 aa, Homo sapiens
MDDHNVDSFISLSSPQMGQYGDTDYLKWLFPTSMRSNLYRICYSPWGQEFSICNYWHDPHHDDLYLNASSFLALINGERDHPNATVWRKNFLRVGHLVLIGGPDDGVITPWQSSFFGFYDANETVLEMEEQLPVGSSVKANHGVQG

SEQ ID NO: 56987 - protein, 158 aa, Homo sapiens; identical to SEQ ID NO: 56966

SEQ ID NO: 56988 - protein, 302 aa, Homo sapiens; identical to SEQ ID NO: 56956

SEQ ID NO: 56989 - protein, 302 aa, Homo sapiens; identical to SEQ ID NO: 56956

SEQ ID NO: 56990 - protein, 302 aa, Homo sapiens; identical to SEQ ID NO: 56956

SEQ ID NO: 56991 - protein, 93 aa, Homo sapiens
MLGLWGQRLPAAWVLLLLPFLPLLLLAAPAPHRESYKPVIVVHGLFDSSYSFRHLLEYINEGALCAGLCFLSWMITTWILSSPSPLHRWDSME

SEQ ID NO: 56992 - protein, 200 aa, Homo sapiens; identical to SEQ ID NO: 56977

SEQ ID NO: 56993 - protein, 200 aa, Homo sapiens; identical to SEQ ID NO: 56977

SEQ ID NO: 56994 - protein, 302 aa, Homo sapiens; identical to SEQ ID NO: 56956

SEQ ID NO: 56995 - protein, 301 aa, Homo sapiens
MLGLCGQRLPAAWVLLLLPFLPLLLLAAPAPHRASYKPVIVVHGLFDSSYSFRHLLEYINETHPGTVVTVLDLFDGRESLRPLWEQVQGFREAVVPIMAKAPQGVHLICYSQGGLVCRALLSVMDDHNVDSFISLSSPQMGQYGDTDYLKWLFPTSMRSNLYRICYSPWGQEFSICNYWHDPHHDDLYLNASSFLALINGERDHPNATVWRKNFLRVGHLVLIGGPDDGVITPWQSSFFGFYDANETVLEMEEQLPARPTHQSELLLLRLVCLKPPRRKKPACRVQRQSESWGPGLSCALS

SEQ ID NO: 56996 - protein, 158 aa, Homo sapiens; identical to SEQ ID NO: 56964

SEQ ID NO: 56997 - protein, 180 aa, Homo sapiens; identical to SEQ ID NO: 56965

SEQ ID NO: 56998 - protein, 200 aa, Homo sapiens; identical to SEQ ID NO: 56977

SEQ ID NO: 56999 - protein, 302 aa, Homo sapiens; identical to SEQ ID NO: 56956

SEQ ID NO: 57000 - protein, 302 aa, Homo sapiens; identical to SEQ ID NO: 56956

SEQ ID NO: 57001 - protein, 93 aa, Homo sapiens; identical to SEQ ID NO: 56960

SEQ ID NO: 57002 - protein, 93 aa, Homo sapiens
MLGLCGQRLPAAWVLLLLPFLPLLLLAAPAPHRASYKPVIVVHGLFDSSYSFRHLLEYINEGALCAGLCFLSWMITTWILSSPSPLHRWDSME

SEQ ID NO: 57003 - protein, 302 aa, Homo sapiens; identical to SEQ ID NO: 56956

SEQ ID NO: 57004 - protein, 302 aa, Homo sapiens; identical to SEQ ID NO: 56956

SEQ ID NO: 57005 - protein, 180 aa, Homo sapiens
MLGLWGQRLPAAWVLLLLPFLPLLLLAAPAPHRESYKPVIVVHGLFDSSYSFRHLLEYINETHPGTVVTVLDLFDGRESLRPLWEQVQGFREAVVPIMAKAPQGVHLICYSQGGLVCRALLSVMDDHNVDSFISLSSPQMGQYGDTDYLKWLFPTSMRSNLYRICYSPWGQEFSICNYWH

SEQ ID NO: 57006 - protein, 180 aa, Homo sapiens; identical to SEQ ID NO: 57005

SEQ ID NO: 57007 - protein, 93 aa, Homo sapiens; identical to SEQ ID NO: 56991

SEQ ID NO: 57008 - protein, 236 aa, Homo sapiens; identical to SEQ ID NO: 56974

SEQ ID NO: 57009 - protein, 54 aa, Homo sapiens
  VARIANT 1: note = MOD_RES - Any amino acid
XHDDLYLNASSFLALINGERDHPNATVWRKNFLRVGHLVLIGGPDDGVITPWQS

SEQ ID NO: 57010 - protein, 236 aa, Homo sapiens; identical to SEQ ID NO: 56974

SEQ ID NO: 57011 - protein, 302 aa, Homo sapiens; identical to SEQ ID NO: 56956

SEQ ID NO: 57012 - protein, 302 aa, Homo sapiens; identical to SEQ ID NO: 56956

SEQ ID NO: 57013 - protein, 302 aa, Homo sapiens; identical to SEQ ID NO: 56956

SEQ ID NO: 57014 - protein, 146 aa, Homo sapiens; identical to SEQ ID NO: 56986

SEQ ID NO: 57015 - protein, 308 aa, Homo sapiens; identical to SEQ ID NO: 56951

SEQ ID NO: 57016 - protein, 293 aa, Homo sapiens; identical to SEQ ID NO: 44786

SEQ ID NO: 57017 - protein, 301 aa, Homo sapiens
MLGLWGQRLPAAWVLLLLPFLPLLLLAAPAPHRASYKPVIVVHGLFDSSYSFRHLLEYINETHPGTVVTVLDLFDGRESLRPLWEQVQGFREAVVPIMAKAPQGVHLICYSQGGLVCRALLSVMDDHNVDSFISLSSPQMGQYGDTDYLKWLFPTSMRSNLYRICYSPWGQEFSICNYWHDPHHDDLYLNASSFLALINGERDHPNATVWRKNFLRVGHLVLIGGPDDGVITPWQSSFFGFYDANETVLEMEEQLPARPTHQSELLLLRLVCLKPPRRKKPACRVQRQSESWGPGLSCALS

SEQ ID NO: 57018 - protein, 302 aa, Homo sapiens; identical to SEQ ID NO: 56953

SEQ ID NO: 57019 - protein, 146 aa, Homo sapiens; identical to SEQ ID NO: 56986

SEQ ID NO: 57020 - protein, 293 aa, Homo sapiens; identical to SEQ ID NO: 44786

SEQ ID NO: 57021 - protein, 301 aa, Homo sapiens; identical to SEQ ID NO: 57017

SEQ ID NO: 57022 - protein, 146 aa, Homo sapiens; identical to SEQ ID NO: 56986

SEQ ID NO: 57023 - protein, 301 aa, Homo sapiens; identical to SEQ ID NO: 57017

SEQ ID NO: 57024 - protein, 146 aa, Homo sapiens; identical to SEQ ID NO: 56986

SEQ ID NO: 57025 - protein, 293 aa, Homo sapiens; identical to SEQ ID NO: 44786

SEQ ID NO: 57026 - protein, 293 aa, Homo sapiens; identical to SEQ ID NO: 44786

SEQ ID NO: 57027 - protein, 302 aa, Homo sapiens; identical to SEQ ID NO: 56956

SEQ ID NO: 57028 - protein, 146 aa, Homo sapiens; identical to SEQ ID NO: 56986

SEQ ID NO: 57029 - protein, 302 aa, Homo sapiens; identical to SEQ ID NO: 56956

SEQ ID NO: 57030 - protein, 146 aa, Homo sapiens; identical to SEQ ID NO: 56986

SEQ ID NO: 57031 - protein, 301 aa, Homo sapiens; identical to SEQ ID NO: 57017

SEQ ID NO: 57032 - protein, 301 aa, Homo sapiens
MLGLWGQRLPAAWVLLLLPFLPLLLLAAPAPHRESYKPVIVVHGLFDSSYSFRHLLEYINETHPGTVVTVLDLFDGRESLRPLWEQVQGFREAVVPIMAKAPQGVHLICYSQGGLVCRALLSVMDDHNVDSFISLSSPQMGQYGDTDYLKWLFPTSMRSNLYRICYSPWGQEFSICNYWHDPHHDDLYLNASSFLALINGERDHPNATVWRKNFLRVGHLVLIGGPDDGVITPWQSSFFGFYDANETVLEMEEQLPARPTHQSELLLLRLVCLKPPRRKKPACRVQRQSESWGPGLSCALS

SEQ ID NO: 57033 - protein, 301 aa, Homo sapiens; identical to SEQ ID NO: 57017

SEQ ID NO: 57034 - protein, 302 aa, Homo sapiens; identical to SEQ ID NO: 56956

SEQ ID NO: 57035 - protein, 1201 aa, Homo sapiens
MNFEGLDPGLAEYAPAMHSALDPVLDAHLNPSLLQNVELDPEGVALEALPVQESVHIMEGVYSELHSVVAEVGVPVSVSHFDLHEEMLWVGSHGGHATSFFGPALERYSSFQVNGSDDIRQIQSLENGILFLTKNNLKYMARGGLIIFDYLLDENEDMHSLLLTDSSTLLVGGLQNHIIEIDLNTVQETQKYAVETPGVTIMRQTNRFFFCGHTSGKVSLRDLRTFKVEHEFDAFSGSLSDFDVHGNLLAACGFSSRLTGLACDRFLKVYDLRMMRAITPLQVHVDPAFLRFIPTYTSRLAIISQSGQCQFCEPTGLANPADIFHVNPVGPLLMTFDVSASKQALAFGDSEGCVHLWTDSPEPSFNPYSRETEFALPCLVDSLPPLDWSQDLLPLSLIPVPLTTDTLLSDWPAANSAPAPRRAPPVDAEILRTMKKVGFIGYAPNPRTRLRNQIPYRLKESDSEFDSFSQVTESPVGREEEPHLHMVSKKYRKVTIKYSKLGLEDFDFKHYNKTLFAGLEPHIPNAYCNCMIQVLYFLEPVRCLIQNHLCQKEFCLACELGFLFHMLDLSRGDPCQGNNFLRAFRTIPEASALGLILADSDEASGKGNLARLIQRWNRFILTQLHQDMQELEIPQAYRGAGGSFCSSGDSVIGQLFSCEMENCSLCRCGSETVRASSTLLFTLSYPDGSKSDKTGKNYDFAQVLKRSICLDQNTQAWCDTCEKYQPTIQTRNIRHLPDILVINCEVNSSKEADFWRMQAEVAFKMAVKKHGGEISKNKEFALADWKELGSPEGVLVCPSIEELKNVWLPFSIRMKMTKNKGLDVCNWTDGDEMQWGPARAEEEHGVYVYDLMATVVHILDSRTGGSLVAHIKVGETYHQRKEGVTHQQWYLFNDFLIEPIDKHEAVQFDMNWKVPAILYYVKRNLNSRYNLNIKNPIEASVLLAEASLARKQRKTHTTFIPLMLNEMPQIGDLVGLDAEFVTLNEEEAELRSDGTKSTIKPSQMSVARITCVRGQGPNEGIPFIDDYISTQEQVVDYLTQYSGIKPGDLDAKISSKHLTTLKSTYLKLRFLIDIGVKFVGHGLQKDFRVINLMVPKDQVLDTVYLFHMPRKRMISLRFLAWYFLDLKIQGETHDSIEDARTALQLYRKYLELSKNGTEPESFHKVLKGLYEKGRKMDWKVPEPEGQTSPKNAAVFSSVLAL

SEQ ID NO: 57036 - protein, 1202 aa, Homo sapiens
MNFEGLDPGLAEYAPAMHSALDPVLDAHLNPSLLQNVELDPEGVALEALPVQESVHIMEGVYSELHSVVAEVGVPVSVSHFDLHEEMLWVGSHGGHATSFFGPALERYSSFQVNGSDDIRQIQSLENGILFLTKNNLKYMARGGLIIFDYLLDENEDMHSLLLTDSSTLLVGGLQNHIIEIDLNTVQETQKYAVETPGVTIMRQTNRFFFCGHTSGKVSLRDLRTFKVEHEFDAFSGSLSDFDVHGNLLAACGFSSRLTGLACDRFLKVYDLRMMRAITPLQVHVDPAFLRFIPTYTSRLAIISQSGQCQFCEPTGLANPADIFHVNPVGPLLMTFDVSASKQALAFGDSEGCVHLWTDSPEPSFNPYSRETEFALPCLVDSLPPLDWSQDLLPLSLIPVPLTTDTLLSDWPAANSAPAPRRAPPVDAEILRTMKKVGFIGYAPNPRTRLRNQIPYRLKESDSEFDSFSQVTESPVGREEEPHLHMVSKKYRKVTIKYSKLGLEDFDFKHYNKTLFAGLEPHIPNAYCNCMIQVLYFLEPVRCLIQNHLCQKEFCLACELGFLFHMLDLSRGDPCQGNNFLRAFRTIPEASALGLILADSDEASGKGNLARLIQRWNRFILTQLHQDMQELEIPQAYRGAGGSSFCSSGDSVIGQLFSCEMENCSLCRCGSETVRASSTLLFTLSYPDGSKSDKTGKNYDFAQVLKRSICLDQNTQAWCDTCEKYQPTIQTRNIRHLPDILVINCEVNSSKEADFWRMQAEVAFKMAVKKHGGEISKNKEFALADWKELGSPEGVLVCPSIEELKNVWLPFSIRMKMTKNKGLDVCNWTDGDEMQWGPARAEEEHGVYVYDLMATVVHILDSRTGGSLVAHIKVGETYHQRKEGVTHQQWYLFNDFLIEPIDKHEAVQFDMNWKVPAILYYVKRNLNSRYNLNIKNPIEASVLLAEASLARKQRKTHTTFIPLMLNEMPQIGDLVGLDAEFVTLNEEEAELRSDGTKSTIKPSQMSVARITCVRGQGPNEGIPFIDDYISTQEQVVDYLTQYSGIKPGDLDAKISSKHLTTLKSTYLKLRFLIDIGVKFVGHGLQKDFRVINLMVPKDQVLDTVYLFHMPRKRMISLRFLAWYFLDLKIQGETHDSIEDARTALQLYRKYLELSKNGTEPESFHKVLKGLYEKGRKMDWKVPEPEGQTSPKNAAVFSSVLAL

SEQ ID NO: 57037 - protein, 1198 aa, Homo sapiens
MNFEGLDPGLAEYAPAMHSALDPVLDAHLNPSLLQNVELDPEGVALEALPVQESVHIMEGVYSELHSVVAEVGVPVSVSHFDLHEEMLWVGSHGGHATSFFGPALERYSSFQVNGSDDIRQIQSLENGILFLTKNNLKYMARGGLIIFDYLLDENEDMHSLLLTDSSTLLVGGLQNHIIEIDLNTVQETQKYAVETPGVTIMRQTNRFFFCGHTSGKVSLRDLRTFKVEHEFDAFSGSLSDFDVHGNLLAACGFSSRLTGLACDRFLKVYDLRMMRAITPLQVHVDPAFLRFIPTYTSRLAIISQSGQCQFCEPTGLANPADIFHVNPVGPLLMTFDVSASKQALAFGDSEGCVHLWTDSPEPSFNPYSRETEFALPCLVDSLPPLDWSQDLLPLSLIPVPLTTDTLLSDWPAANSAPAPRRAPPVDAEILRTMKKVGFIGYAPNPRTRLRNQIPYRLKESDSEFDSFSQVTESPVGREEEPHLHMVSKKYRKVTIKYSKLGLEDFDFKHYNKTLFAGLEPHIPNAYCNCMIQVLYFLEPVRCLIQNHLCQKEFCLACELGFLFHMLDLSRGDPCQGNNFLRAFRTIPEASALGLILADSDEASGKGNLARLIQRWNRFILTQLHQDMQELEIPQAYRGAGGSSFCSSGDSVIGQLFSCEMENCSLCRCGSETVRASSTLLFTLSYPDDKTGKNYDFAQVLKRSICLDQNTQAWCDTCEKYQPTIQTRNIRHLPDILVINCEVNSSKEADFWRMQAEVAFKMAVKKHGGEISKNKEFALADWKELGSPEGVLVCPSIEELKNVWLPFSIRMKMTKNKGLDVCNWTDGDEMQWGPARAEEEHGVYVYDLMATVVHILDSRTGGSLVAHIKVGETYHQRKEGVTHQQWYLFNDFLIEPIDKHEAVQFDMNWKVPAILYYVKRNLNSRYNLNIKNPIEASVLLAEASLARKQRKTHTTFIPLMLNEMPQIGDLVGLDAEFVTLNEEEAELRSDGTKSTIKPSQMSVARITCVRGQGPNEGIPFIDDYISTQEQVVDYLTQYSGIKPGDLDAKISSKHLTTLKSTYLKLRFLIDIGVKFVGHGLQKDFRVINLMVPKDQVLDTVYLFHMPRKRMISLRFLAWYFLDLKIQGETHDSIEDARTALQLYRKYLELSKNGTEPESFHKVLKGLYEKGRKMDWKVPEPEGQTSPKNAAVFSSVLAL

SEQ ID NO: 57038 - protein, 1202 aa, Homo sapiens; identical to SEQ ID NO: 57036

SEQ ID NO: 57039 - protein, 328 aa, Homo sapiens
MDAVLLEHFPGGLDAFPSSYFDEDDFFTDQSSRDPLEDGDELLADEQAEVEFLSHQLHEYCYRDGACLLLQPAPPAAPLALAPPSSGGLGEPDDGGGGGYCCETGAPPGGFPYSPGSPPSCLAYPCAGAAVLSPGARLRGLSGAAAAAARRRRRVRSEAELQQLRQAANVRERRRMQSINDAFEGLRSHIPTLPYEKRLSKVDTLRLAIGYINFLSELVQADLPLRGGGAGGCGGPGGGGRLGGDSPGSQAQKVIICHRGTRSPSPSDPDYGLPPLAGHSLSWTDEKQLKEQNIIRTAKVWTPEDPRKLNSKSSFNNIENEPPFEFVS

SEQ ID NO: 57040 - protein, 283 aa, Homo sapiens
MNGEEQYYAATQLYKDPCAFQRGPAPEFSASPPACLYMGRQPPPPPPHPFPGALGALEQGSPPDISPYEVPPLADDPAVAHLHHHLPAQLALPHPPAGPFPEGAEPGVLEEPNRVQLPFPWMKSTKAHAWKGQWAGGAYAAEPEENKRTRTAYTRAQLLELEKEFLFNKYISRPRRVELAVMLNLTERHIKIWFQNRRMKWKKEEDKKRGGGTAVGGGGVAEPEQDCAVTSGEELLALPPPPPPGGAVPPAAPVAAREGRLPPGLSASPQPSSVAPRRPQEPR

SEQ ID NO: 57041 - protein, 465 aa, Homo sapiens
MLPLWTLSLLLGAVAGKEVCYERLGCFSDDSPWSGITERPLHILPWSPKDVNTRFLLYTNENPNNFQEVAADSSSISGSNFKTNRKTRFIIHGFIDKGEENWLANVCKNLFKVESVNCICVDWKGGSRTGYTQASQNIRIVGAEVAYFVEFLQSAFGYSPSNVHVIGHSLGAHAAGEAGRRTNGTIGRITGLDPAEPCFQGTPELVRLDPSDAKFVDVIHTDGAPIVPNLGFGMSQVVGHLDFFPNGGVEMPGCKKNILSQIVDIDGIWEGTRDFAACNHLRSYKYYTDSIVNPDGFAGFPCASYNVFTANKCFPCPSGGCPQMGHYADRYPGKTNDVGQKFYLDTGDASNFARWRYKVSVTLSGKKVTGHILVSLFGNKGNSKQYEIFKGTLKPDSTHSNEFDSDVDVGDLQMVKFIWYNNVINPTLPRVGASKIIVETNVGKQFNFCSPETVREEVLLTLTPC

SEQ ID NO: 57042 - protein, 95 aa, Homo sapiens
MAAARLCLSLLLLSTCVALLLQPLLGAQGAPLEPVYPGDNATPEQMAQYAADLRRYINMLTRPRYGKRHKEDTLAFSEWGSPHAAVPRELSPLDL

SEQ ID NO: 57043 - protein, 375 aa, Homo sapiens
MNTSHLLALLLPKSPQGENRSKPLGTPYNFSEHCQDSVDVMVFIVTSYSIETVVGVLGNLCLMCVTVRQKEKANVTNLLIANLAFSDFLMCLLCQPLTAVYTIMDYWIFGETLCKMSAFIQCMSVTVSILSLVLVALERHQLIINPTGWKPSISQAYLGIVLIWVIACVLSLPFLANSILENVFHKNHSKALEFLADKVVCTESWPLAHHRTIYTTFLLLFQYCLPLGFILVCYARIYRRLQRQGRVFHKGTYSLRAGHMKQVNVVLVVMVVAFAVLWLPLHVFNSLEDWHHEAIPICHGNLIFLVCHLLAMASTCVNPFIYGFLNTNFKKEIKALVLTCQQSAPLEESEHLPLSTVHTEVSKGSLRLSGRSNPI

SEQ ID NO: 57044 - protein, 375 aa, Homo sapiens; identical to SEQ ID NO: 57043

SEQ ID NO: 57045 - protein, 598 aa, Homo sapiens
MLKLVGGGGGQDWACSVAGTSLGGEEAAFEVARPGDQGKAGGGSPGWGCAGIPDSAPGAGVLQAGAVGPARGGQGAEEVGESAGGGEERRVRHPQAPALRLLNRKPQGGSGEIKTPENDLQRGRLSRGPRTAPPAPGMGDRSGQQERSVPHSPGAPVGTSAAAVNGLLHNGFHPPPVQPPHVCSRGPVGGSDAAPQRLPLLPELQPQPLLPQHDSPAKKCRLRRRMDSGRKNRPPFPWFGMDIGGTLVKLVYFEPKDITAEEEQEEVENLKSIRKYLTSNTAYGKTGIRDVHLELKNLTMCGRKGNLHFIRFPSCAMHRFIQMGSEKNFSSLHTTLCATGGGAFKFEEDFRMIADLQLHKLDELDCLIQGLLYVDSVGFNGKPECYYFENPTNPELCQKKPYCLDNPYPMLLVNMGSGVSILAVYSKDNYKRVTGTSLGGGTFLGLCCLLTGCETFEEALEMAAKGDSTNVDKLVKDIYGGDYERFGLQGSAVASSFGNMMSKEKRDSISKEDLARATLVTITNNIGSIARMCALNENIDRVVFVGNFLRINMVSMKLLAYAMDFWSKGQLKALFLEHEGYFGAVGALLELFKMTDDK

SEQ ID NO: 57046 - protein, 314 aa, Homo sapiens
MKLINGKKQTFPWFGMDIGGTLVKLVYFEPKDITAEEEQEEVENLKSIRKYLTSNTAYGKTGIRDVHLELKNLTMCGRKGNLHFIRFPSCAMHRFIQMGSEKNFSSLHTTLCATGGGAFKFEEDFRMIADLQLHKLDELDCLIQGLLYVDSVGFNGKPECYYFENPTNPELCQKKPYCLDNPYPMLLVNMGSGVSILAVYSKDNYKRVTGTSFGNMMSKEKRDSISKEDLARATLVTITNNIGSIARMCALNENIDRVVFVGNFLRINMVSMKLLAYAMDFWSKGQLKALFLEHEGYFGAVGALLELFKMTDDK

SEQ ID NO: 57047 - protein, 373 aa, Homo sapiens
MKLINGKKQTFPWFGMDIGGTLVKLVYFEPKDITAEEEQEEVENLKSIRKYLTSNTAYGKTGIRDVHLELKNLTMCGRKGNLHFIRFPSCAMHRFIQMGSEKNFSSLHTTLCATGGGAFKFEEDFRMIADLQLHKLDELDCLIQGLLYVDSVGFNGKPECYYFENPTNPELCQKKPYCLDNPYPMLLVNMGSGVSILAVYSKDNYKRVTGTSLGGGTFLGLCCLLTGCETFEEALEMAAKGDSTNVDKLVKDIYGGDYERFGLQGSAVASSFGNMMSKEKRDSISKEDLARATLVTITNNIGSIARMCALNENIDRVVFVGNFLRINMVSMKLLAYAMDFWSKGQLKALFLEHEGYFGAVGALLELFKMTDDK

SEQ ID NO: 57048 - protein, 400 aa, Homo sapiens
MAKSKHALLPFCHGMMQQEGLHQMQSLDLGLLSLQNSFPWFGMDIGGTLVKLVYFEPKDITAEEEQEEVENLKSIRKYLTSNTAYGKTGIRDVHLELKNLTMCGRKGNLHFIRFPSCAMHRFIQMGSEKNFSSLHTTLCATGGGAFKFEEDFRMIADLQLHKLDELDCLIQGLLYVDSVGFNGKPECYYFENPTNPELCQKKPYCLDNPYPMLLVNMGSGVSILAVYSKDNYKRVTGTSLGGGTFLGLCCLLTGCETFEEALEMAAKGDSTNVDKLVKDIYGGDYERFGLQGSAVASSFGNMMSKEKRDSISKEDLARATLVTITNNIGSIARMCALNENIDRVVFVGNFLRINMVSMKLLAYAMDFWSKGQLKALFLEHEGYFGAVGALLELFKMTDDK

SEQ ID NO: 57049 - protein, 461 aa, Homo sapiens
MGDRSGQQERSVPHSPGAPVGTSAAAVNGLLHNGFHPPPVQPPHVCSRGPVGGSDAAPQRLPLLPELQPQPLLPQHDSPAKKCRLRRRMDSGRKNRPPFPWFGMDIGGTLVKLVYFEPKDITAEEEQEEVENLKSIRKYLTSNTAYGKTGIRDVHLELKNLTMCGRKGNLHFIRFPSCAMHRFIQMGSEKNFSSLHTTLCATGGGAFKFEEDFRMIADLQLHKLDELDCLIQGLLYVDSVGFNGKPECYYFENPTNPELCQKKPYCLDNPYPMLLVNMGSGVSILAVYSKDNYKRVTGTSLGGGTFLGLCCLLTGCETFEEALEMAAKGDSTNVDKLVKDIYGGDYERFGLQGSAVASSFGNMMSKEKRDSISKEDLARATLVTITNNIGSIARMCALNENIDRVVFVGNFLRINMVSMKLLAYAMDFWSKGQLKALFLEHEGYFGAVGALLELFKMTDDK

SEQ ID NO: 57050 - protein, 570 aa, Homo sapiens
MRRLGPFHPRVHWAAPPSLSSGLHRLLFLRGTRIPSSTTLSPPRHDSLSLDGGTVNPPRVREPTGREAFGPSPASSDWLPARWRNGRGGRPRARLCSGWTAAEEARRNPTLGGLLGRQRLLLRMGGGRLGAPMERHGRASATSVSSAGEQAAGDPEGRRQEPLRRRASSASVPAVGASAEGTRRDRLGSYSGPTSVSRQRVESLRKKRPLFPWFGLDIGGTLVKLVYFEPKDITAEEEEEEVESLKSIRKYLTSNVAYGSTGIRDVHLELKDLTLCGRKGNLHFIRFPTHDMPAFIQMGRDKNFSSLHTVFCATGGGAYKFEQDFLTIGDLQLCKLDELDCLIKGILYIDSVGFNGRSQCYYFENPADSEKCQKLPFDLKNPYPLLLVNIGSGVSILAVYSKDNYKRVTGTSLGGGTFFGLCCLLTGCTTFEEALEMASRGDSTKVDKLVRDIYGGDYERFGLPGWAVASSFGNMMSKEKREAVSKEDLARATLITITNNIGSIARMCALNENINQVVFVGNFLRINTIAMRLLAYALDYWSKGQLKALFSEHEGYFGAVGALLELLKIP

SEQ ID NO: 57051 - protein, 386 aa, Homo sapiens
SGRVNPAGGLGCSESGTFGGPPAPIVFPWFGLDIGGTLVKLVYFEPKDITAEEEEEEVESLKSIRKYLTSNVAYGSTGIRDVHLELKDLTLCGRKGNLHFIRFPTHDMPAFIQMGRDKNFSSLHTVFCATGGGAYKFEQDFLTIGDLQLCKLDELDCLIKGILYIDSVGFNGRSQCYYFENPADSEKCQKLPFDLKNPYPLLLVNIGSGVSILAVYSKDNYKRVTGTSLGGGTFFGLCCLLTGCTTFEEALEMASRGDSTKVDKLVRDIYGGDYERFGLPGWAVASSFGNMMSKEKREAVSKEDLARATLITITNNIGSIARMCALNENINQVVFVGNFLRINTIAMRLLAYALDYWSKGQLKALFSEHEGYFGAVGALLELLKIP

SEQ ID NO: 57052 - protein, 279 aa, Homo sapiens
MPAFIQMGRDKNFSSLHTVFCATGGGAYKFEQDFLTIGDLQLCKLDELDCLIKGILYIDSVGFNGRSQCYYFENPADSEKCQKLPFDLKNPYPLLLVNIGSGVSILAVYSKDNYKRVTGTSLGGGTFFGLCCLLTGCTTFEEALEMASRGDSTKVDKLVRDIYGGDYERFGLPGWAVASSFGNMMSKEKREAVSKEDLARATLITITNNIGSIARMCALNENINQVVFVGNFLRINTIAMRLLAYALDYWSKGQLKALFSEHEGYFGAVGALLELLKIP

SEQ ID NO: 57053 - protein, 370 aa, Homo sapiens
MKIKDAKKPSFPWFGMDIGGTLVKLSYFEPIDITAEEEQEEVESLKSIRKYLTSNVAYGSTGIRDVHLELKDLTLFGRRGNLHFIRFPTQDLPTFIQMGRDKNFSTLQTVLCATGGGAYKFEKDFRTIGNLHLHKLDELDCLVKGLLYIDSVSFNGQAECYYFANASEPERCQKMPFNLDDPYPLLVVNIGSGVSILAVHSKDNYKRVTGTSLGGGTFLGLCSLLTGCESFEEALEMASKGDSTQADKLVRDIYGGDYERFGLPGWAVASSFGNMIYKEKRESVSKEDLARATLVTITNNIGSVARMCAVNEKINRVVFVGNFLRVNTLSMKLLAYALDYWSKGQLKALFLEHEGYFGAVGALLGLPNFS

SEQ ID NO: 57054 - protein, 773 aa, Homo sapiens
MAECGASGSGSSGDSLDKSITLPPDEIFRNLENAKRFAIDIGGSLTKLAYYSTVQHKVAKVRSFDHSGKDTEREHEPPYEISVQEEITARLHFIKFENTYIEACLDFIKDHLVNTETKVIQATGGGAYKFKDLIEEKLRLKVDKEDVMTCLIKGCNFVLKNIPHEAFVYQKDSDPEFRFQTNHPHIFPYLLVNIGSGVSIVKVETEDRFEWVGGSSIGGGTFWGLGALLTKTKKFDELLHLASRGQHSNVDMLVRDVYGGAHQTLGLSGNLIASSFGKSATADQEFSKEDMAKSLLHMISNDIGQLACLHARLHSLDRVYFGGFFIRGHPVTMRTITYSINFFSKGEVQALFLRHEGYLGAIGAFLKGAEQDNPNQYSWGENYAGSSGLMSASPELGPAQRARSGTFDLLEMDRLERPLVDLPLLLDPPSYVPDTVDLTDDALARKYWLTCFEEALDGVVKRAVASQPDSVDAAERAEKFRQKYWNKLQTLRQQPFAYGTLTVRSLLDTREHCLNEFNFPDPYSKVKQRENGVALRCFPGVVRSLDALGWEERQLALVKGLLAGNVFDWGAKAVSAVLESDPYFGFEEAKRKLQERPWLVDSYSEWLQRLKGPPHKCALIFADNSGIDIILGVFPFVRELLLRGTEVILACNSGPALNDVTHSESLIVAERIAGMDPVVHSALQEERLLLVQTGSSSPCLDLSRLDKGLAALVRERGADLVVIEGMGRAVHTNYHAALRCESLKLAVIKNAWLAERLGGRLFSVIFKYEVPAE

SEQ ID NO: 57055 - protein, 484 aa, Homo sapiens
MFPNSILGRPPFTPNHQQHNNFFTLSPTVYSHQQLIDAQFNFQNADLSRAVSLQQLTYGNVSPIQTSASPLFRGRKRLSDEKNLPLDGKRQRFHSPHQEPTVVNQIVPLSGERRYSMPPLFHTHYVPDIVRCVPPFREIAFLEPREITLPEAKDKLSQQILELFETCQQQISDLKKKELCRTQLQREIQLLFPQSRLFLVGSSLNGFGTRSSDGDLCLVVKEEPCFFQVNQKTEARHILTLVHKHFCTRLSGYIERPQLIRAKVPIVKFRDKVSCVEFDLNVNNIVGIRNTFLLRTYAYLENRVRPLVLVIKKWASHHQINDASRGTLSSYSLVLMVLHYLQTLPEPILPSLQKIYPESFSPAIQLHLVHQAPCNVPPYLSKNESNLGDLLLGFLKYYATEFDWNSQMISVREAKAIPRPDGIEWRNKYICVEEPFDGTNTARAVHEKQKFDMIKDQFLKSWHRLKNKRDLNSILPVRAAVLKR

SEQ ID NO: 57056 - protein, 480 aa, Homo sapiens
MFPNSILGRPPFTPNHQQHNNFFTLSPTVYSHQQLIDAQFNFQNADLSRAVSLQQLTYGNVSPIQTSASPLFRGRKRLSDEKNLPLDGKRQRFHSPHQEPTVVNQIVPLSGERRYSMPPLFHTHYVPDIVRCVPPFREIAFLEPREITLPEAKDKLSQQILELFETCQQQISDLKKKELCRTQLQREIQLLFPQSRLFLVGSSLNGFGTRSSDGDLCLVVKEEPVNQKTEARHILTLVHKHFCTRLSGYIERPQLIRAKVPIVKFRDKVSCVEFDLNVNNIVGIRNTFLLRTYAYLENRVRPLVLVIKKWASHHQINDASRGTLSSYSLVLMVLHYLQTLPEPILPSLQKIYPESFSPAIQLHLVHQAPCNVPPYLSKNESNLGDLLLGFLKYYATEFDWNSQMISVREAKAIPRPDGIEWRNKYICVEEPFDGTNTARAVHEKQKFDMIKDQFLKSWHRLKNKRDLNSILPVRAAVLKR

SEQ ID NO: 57057 - protein, 484 aa, Homo sapiens; identical to SEQ ID NO: 57055

SEQ ID NO: 57058 - protein, 484 aa, Homo sapiens; identical to SEQ ID NO: 57055

SEQ ID NO: 57059 - protein, 491 aa, Homo sapiens
MSLVAYASSDESEPDEAEPEPEEEEAVAPTSGPALGGLFASLPAPKGPALLPPPPQMLAPAFPPPLLLPPPTGDPRLQPPPPLPFGLGGFPPPPGVSPAEAAGVGEGLGLGLPSPRGPGLNLPPPIGGAGPPLGLPKPKKRKEPVKIAAPELHKGDSDSEEDEPTKKKTILQGSSEGTGLSALLPQPKNLTVKETNRLLLPHAFSRKPSDGSPDTKPSRLASKTKTSSLAPVVGTTTTTPSPSAIKAAAKSAALQVTKQITQEEDDSDEEVAPENFFSLPEKAEPPGVEPYPYPIPTVPEELPPGTEPEPAFQDDAANAPLEFKMAAGSSGAPWMPKPGDDYSYNQFSTYGDANAAGAYYQDYYSGGYYPAQDPALVPPQEIAPDASFIDDEAFKRLQGKRNRGREEINFVEIKGDDQLSGAQQWMTKSLTEEKTMKSFSKKKGEQPTGQQRRKHQITYLIHQAKERELELKNTWSENKLSRRQTQAKYGF

SEQ ID NO: 57060 - protein, 459 aa, Homo sapiens
MSLVAYASSDESEPDEAEPEPEEEEAVAPTSGPALGGLFASLPAPKGPALLPPPPQMLAPAFPPPLLLPPPTGDPRLQPPPPLPFGLGGFPPPPGVSPAEAAGVGEGLGLGLPSPRGPGLNLPPPIGGAGPPLGLPKPKKRKEPVKIAAPELHKGDSDSEEDEPTKKKTILQGSSEGTGLSALLPQPKNLTVKETNRLLLPHAFSRKPSDGSPDTKPSRLASKTKTSSLAPVVGTTTTTPSPSAIKAAAKSAALQVTKQITQEEDDSDEEVAPENFFSLPEKAEPPGVEPYPYPIPTVPEELPPGTEPEPAFQDDAANAPLEFKMAAGSSGAPWMPKPGDDYSYNQFSTYGDANAAGAYYQFKRLQGKRNRGREEINFVEIKGDDQLSGAQQWMTKSLTEEKTMKSFSKKKGEQPTGQQRRKHQITYLIHQAKERELELKNTWSENKLSRRQTQAKYGF

SEQ ID NO: 57061 - protein, 467 aa, Homo sapiens
MLAPAFPPPLLLPPPTGDPRLQPPPPLPFGLGGFPPPPGVSPAEAAGVGEGLGLGLPSPRGPGLNLPPPIGGAGPPLGLPKPKKRKEPVKIAAPELHKGDSDSEEDEPTKKKTILQGSSEGTGLSALLPQPKNLTVKETNRLLLPHAFSRKPSDGSPDTKPSRLASKTKTSSLAPVVGTTTTTPSPSAIKAAAKSAALQVTKQITQEEDDSDEEVAPENFFSLPEKAEPPGVEPYPYPIPTVPEELPPGTEPEPAFQDDAANAPLEFKMAAGSSGAPWMPKPGDDYSYNQFSTYGDANAAGAYYQGLQQHLGHSPLRGIMRFLNSKSGKRTCFVPSFDYYSGGYYPAQDPALVPPQEIAPDASFIDDEAFKRLQGKRNRGREEINFVEIKGDDQLSGAQQWMTKSLTEEKTMKSFSKKKGEQPTGQQRRKHQITYLIHQAKERELELKNTWSENKLSRRQTQAKYGF

SEQ ID NO: 57062 - protein, 1031 aa, Homo sapiens
MKVTVCFGRTRVVVPCGDGHMKVFSLIQQAVTRYRKAIAKDPNYWIQVHRLEHGDGGILDLDDILCDVADDKDRLVAVFDEQDPHHGGDGTSASSTGTQSPEIFGSELGTNNVSAFQPYQATSEIEVTPSVLRANMPLHVRRSSDPALIGLSTSVSDSNFSSEEPSRKNPTRWSTTAGFLKQNTAGSPKTCDRKKDENYRSLPRDTSNWSNQFQRDNARSSLSASHPMVGKWLEKQEQDEDGTEEDNSRVEPVGHADTGLEHIPNFSLDDMVKLVEVPNDGGPLGIHVVPFSARGGRTLGLLVKRLEKGGKAEHENLFRENDCIVRINDGDLRNRRFEQAQHMFRQAMRTPIIWFHVVPAANKEQYEQLSQSEKNNYYSSRFSPDSQYIDNRSVNSAGLHTVQRAPRLNHPPEQIDSHSRLPHSAHPSGKPPSAPASAPQNVFSTTVSSGYNTKKIGKRLNIQLKKGTEGLGFSITSRDVTIGGSAPIYVKNILPRGAAIQDGRLKAGDRLIEVNGVDLVGKSQEEVVSLLRSTKMEGTVSLLVFRQEDAFHPRELNAEPSQMQIPKETKAEDEDIVLTPDGTREFLTFEVPLNDSGSAGLGVSVKGNRSKENHADLGIFVKSIINGGAASKDGRLRVNDQLIAVNGESLLGKTNQDAMETLRRSMSTEGNKRGMIQLIVARRISKCNELKSPGSPPGPELPIETALDDRERRISHSLYSGIEGLDESPSRNAALSRIMGKYQLSPTVNMPQDDTVIIEDDRLPVLPPHLSDQSSSSSHDDVGFVTADAGTWAKAAISDSADCSLSPDVDPVLAFQREGFGRQSMSEKRTKQFSDASQLDFVKTRKSKSMDLGIADETKLNTVDDQKAGSPSRDVGPSLGLKKSSSLESLQTAVAEVTLNGDIPFHRPRPRIIRGRGCNESFRAAIDKSYDKPAVDDDDEGMETLEEDTEESSRSGRESVSTASDQPSHSLERQMNGNQEKGDKTDRKKDKTGKEKKKDRDKEKDKMKAKKGMLKGLGDMFSLAKLKPEKR

SEQ ID NO: 57063 - protein, 1319 aa, Homo sapiens
MKVTVCFGRTRVVVPCGDGHMKVFSLIQQAVTRYRKAIAKDPNYWIQVHRLEHGDGGILDLDDILCDVADDKDRLVAVFDEQDPHHGGDGTSASSTGTQSPEIFGSELGTNNVSAFQPYQATSEIEVTPSVLRANMPLHVRRSSDPALIGLSTSVSDSNFSSEEPSRKNPTRWSTTAGFLKQNTAGSPKTCDRKKDENYRSLPRDTSNWSNQFQRDNARSSLSASHPMVGKWLEKQEQDEDGTEEDNSRVEPVGHADTGLEHIPNFSLDDMVKLVEVPNDGGPLGIHVVPFSARGGRTLGLLVKRLEKGGKAEHENLFRENDCIVRINDGDLRNRRFEQAQHMFRQAMRTPIIWFHVVPAANKEQYEQLSQSEKNNYYSSRFSPDSQYIDNRSVNSAGLHTVQRAPRLNHPPEQIDSHSRLPHSAHPSGKPPSAPASAPQNVFSTTVSSGYNTKKIGKRLNIQLKKGTEGLGFSITSRDVTIGGSAPIYVKNILPRGAAIQDGRLKAGDRLIEVNGVDLVGKSQEEVVSLLRSTKMEGTVSLLVFRQEDAFHPRELNAEPSQMQIPKETKAEDEDIVLTPDGTREFLTFEVPLNDSGSAGLGVSVKGNRSKENHADLGIFVKSIINGGAASKDGRLRVNDQLIAVNGESLLGKTNQDAMETLRRSMSTEGNKRGMIQLIVARRISKCNELKSPGSPPGPELPIETALDDRERRISHSLYSGIEGLDESPSRNAALSRIMGESGKYQLSPTVNMPQDDTVIIEDDRLPVLPPHLSDQSSSSSHDDVGFVTADAGTWAKAAISDSADCSLSPDVDPVLAFQREGFGRQSMSEKRTKQFSDASQLDFVKTRKSKSMDLGIADETKLNTVDDQKAGSPSRDVGPSLGLKKSSSLESLQTAVAEVTLNGDIPFHRPRPRIIRGRGCNESFRAAIDKSYDKPAVDDDDEGMETLEEDTEESSRSGRESVSTASDQPSHSLERQMNGNQEKGDKTDRKKDKTGKEKKKDRDKEKDKMKAKKGMLKGLGDMFRIQAKTREFRERQARERDYAEIQDFHRTFGCDDELMYGGVSSYEGSMALNARPQSPREGHMMDALYAQVKKPRNSKPSPVDSNRSTPSNHDRIQRLRQEFQQAKQDEDVEDRRRTYSFEQPWPNARPATQSGRHSVSVEVQMQRQRQEERESSQQAQRQYSSLPRQSRKNASSVSQDSWEQNYSPGEGFQSAKENPRYSSYQGSRNGYLGGHGFNARVMLETQELLRQEQRRKEQQMKKQPPSEGPSNYDSYKKVQDPSYAPPKGPFRQDVPPSPSQVARLNRLQTPEKGRPFYS

SEQ ID NO: 57064 - protein, 1310 aa, Homo sapiens
MKVTVCFGRTRVVVPCGDGHMKVFSLIQQAVTRYRKAIAKDPNYWIQVHRLEHGDGGILDLDDILCDVADDKDRLVAVFDEQDPHHGGDGTSASSTGTQSPEIFGSELGTNNVSAFQPYQATSEIEVTPSVLRANMPLHVRRSSDPALIGLSTSVSDSNFSSEEPSRKNPTRWSTTAGFLKQNTAGSPKTCDRKKDENYRSLPRDTSNWSNQFQRDNARSSLSASHPMVGKWLEKQEQDEDGTEEDNSRVEPVGHADTGLEHIPNFSLDDMVKLVEVPNDGGPLGIHVVPFSARGGRTLGLLVKRLEKGGKAEHENLFRENDCIVRINDGDLRNRRFEQAQHMFRQAMRTPIIWFHVVPAANKEQYEQLSQSEKNNYYSSRFSPDSQYIDNRSVNSAGLHTVQRAPRLNHPPEQIDSHSRLPHSAHPSGKPPSAPASAPQNVFSTTVSSGYNTKKIGKRLNIQLKKGTEGLGFSITSRDVTIGGSAPIYVKNILPRGAAIQDGRLKAGDRLIEVNGVDLVGKSQEEVVSLLRSTKMEGTVSLLVFRQEDAFHPRELKAEDEDIVLTPDGTREFLTFEVPLNDSGSAGLGVSVKGNRSKENHADLGIFVKSIINGGAASKDGRLRVNDQLIAVNGESLLGKTNQDAMETLRRSMSTEGNKRGMIQLIVARRISKCNELKSPGSPPGPELPIETALDDRERRISHSLYSGIEGLDESPSRNAALSRIMGKYQLSPTVNMPQDDTVIIEDDRLPVLPPHLSDQSSSSSHDDVGFVTADAGTWAKAAISDSADCSLSPDVDPVLAFQREGFGRQIADETKLNTVDDQKAGSPSRDVGPSLGLKKSSSLESLQTAVAEVTLNGDIPFHRPRPRIIRGRGCNESFRAAIDKSYDKPAVDDDDEGMETLEEDTEESSRSGRESVSTASDQPSHSLERQMNGNQEKGDKTDRKKDKTGKEKKKDRDKEKDKMKAKKGMLKGLGDMFRFGKHRKDDKIEKTGKIKIQESFTSEEERIRMKQEQERIQAKTREFRERQARERDYAEIQDFHRTFGCDDELMYGGVSSYEGSMALNARPQSPREGHMMDALYAQVKKPRNSKPSPVDSNRSTPSNHDRIQRLRQEFQQAKQDEDVEDRRRTYSFEQPWPNARPATQSGRHSVSVEVQMQRQRQEERESSQQAQRQYSSLPRQSRKNASSVSQDSWEQNYSPGEGFQSAKENPRYSSYQGSRNGYLGGHGFNARVMLETQELLRQEQRRKEQQMKKQPPSEGPSNYDSYKKVQDPSYAPPKGPFRQDVPPSPSQVARLNRLQTPEKGRPFYS

SEQ ID NO: 57065 - protein, 179 aa, Homo sapiens
MQIPKETKAEDEDIVLTPDGTREFLTFEVPLNDSGSAGLGVSVKGNRSKENHADLGIFVKSIINGGAASKDGRLRVNDQLIAVNGESLLGKTNQDAMETLRRSMSTEGNKRGMIQLIVARRISKCNELKSPGSPPGPELPIETALDDRERRISHSLYSGIEGLDESPSRNAALSRIMGT

SEQ ID NO: 57066 - protein, 1001 aa, Homo sapiens
MKVTVCFGRTRVVVPCGDGHMKVFSLIQQAVTRYRKAIAKDPNYWIQVHRLEHGDGGILDLDDILCDVADDKDRLVAVFDEQDPHHGGDGTSASSTGTQSPEIFGSELGTNNVSAFQPYQATSEIEVTPSVLRANMPLHVRRSSDPALIGLSTSVSDSNFSSEEPSRKNPTRWSTTAGFLKQNTAGSPKTCDRKKDENYRSLPRDTSNWSNQFQRDNARSSLSASHPMVGKWLEKQEQDEDGTEEDNSRVEPVGHADTGLEHIPNFSLDDMVKLVEVPNDGGPLGIHVVPFSARGGRTLGLLVKRLEKGGKAEHENLFRENDCIVRINDGDLRNRRFEQAQHMFRQAMRTPIIWFHVVPAANKEQYEQLSQSEKNNYYSSRFSPDSQYIDNRSVNSAGLHTVQRAPRLNHPPEQIDSHSRLPHSAHPSGKPPSAPASAPQNVFSTTVSSGYNTKKIGKRLNIQLKKGTEGLGFSITSRDVTIGGSAPIYVKNILPRGAAIQDGRLKAGDRLIEVNGVDLVGKSQEEVVSLLRSTKMEGTVSLLVFRQEDAFHPRELNAEPSQMQIPKETKAEDEDIVLTPDGTREFLTFEVPLNDSGSAGLGVSVKGNRSKENHADLGIFVKSIINGGAASKDGRLRVNDQLIAVNGESLLGKTNQDAMETLRRSMSTEGNKRGMIQLIVARRISKCNELKSPGSPPGPELPIETALDDRERRISHSLYSGIEGLDESPSRNAALSRIMGKYQLSPTVNMPQDDTVIIEDDRLPVLPPHLSDQSSSSSHDDVGFVTADAGTWAKAAISDSADCSLSPDVDPVLAFQREGFGRQIADETKLNTVDDQKAGSPSRDVGPSLGLKKSSSLESLQTAVAEVTLNGDIPFHRPRPRIIRGRGCNESFRAAIDKSYDKPAVDDDDEGMETLEEDTEESSRSGRESVSTASDQPSHSLERQMNGNQEKGDKTDRKKDKTGKEKKKDRDKEKDKMKAKKGMLKGLGDMFSLAKLKPEKR

SEQ ID NO: 57067 - protein, 988 aa, Homo sapiens
MKVTVCFGRTRVVVPCGDGHMKVFSLIQQAVTRYRKAIAKDPNYWIQVHRLEHGDGGILDLDDILCDVADDKDRLVAVFDEQDPHHGGDGTSASSTGTQSPEIFGSELGTNNVSAFQPYQATSEIEVTPSVLRANMPLHVRRSSDPALIGLSTSVSDSNFSSEEPSRKNPTRWSTTAGFLKQNTAGSPKTCDRKKDENYRSLPRDTSNWSNQFQRDNARSSLSASHPMVGKWLEKQEQDEDGTEEDNSRVEPVGHADTGLEHIPNFSLDDMVKLVEVPNDGGPLGIHVVPFSARGGRTLGLLVKRLEKGGKAEHENLFRENDCIVRINDGDLRNRRFEQAQHMFRQAMRTPIIWFHVVPAANKEQYEQLSQSEKNNYYSSRFSPDSQYIDNRSVNSAGLHTVQRAPRLNHPPEQIDSHSRLPHSAHPSGKPPSAPASAPQNVFSTTVSSGYNTKKIGKRLNIQLKKGTEGLGFSITSRDVTIGGSAPIYVKNILPRGAAIQDGRLKAGDRLIEVNGVDLVGKSQEEVVSLLRSTKMEGTVSLLVFRQEDAFHPRELKAEDEDIVLTPDGTREFLTFEVPLNDSGSAGLGVSVKGNRSKENHADLGIFVKSIINGGAASKDGRLRVNDQLIAVNGESLLGKTNQDAMETLRRSMSTEGNKRGMIQLIVARRISKCNELKSPGSPPGPELPIETALDDRERRISHSLYSGIEGLDESPSRNAALSRIMGKYQLSPTVNMPQDDTVIIEDDRLPVLPPHLSDQSSSSSHDDVGFVTADAGTWAKAAISDSADCSLSPDVDPVLAFQREGFGRQIADETKLNTVDDQKAGSPSRDVGPSLGLKKSSSLESLQTAVAEVTLNGDIPFHRPRPRIIRGRGCNESFRAAIDKSYDKPAVDDDDEGMETLEEDTEESSRSGRESVSTASDQPSHSLERQMNGNQEKGDKTDRKKDKTGKEKKKDRDKEKDKMKAKKGMLKGLGDMFSLAKLKPEKR

SEQ ID NO: 57068 - protein, 1353 aa, Homo sapiens
MKVTVCFGRTRVVVPCGDGHMKVFSLIQQAVTRYRKAIAKDPNYWIQVHRLEHGDGGILDLDDILCDVADDKDRLVAVFDEQDPHHGGDGTSASSTGTQSPEIFGSELGTNNVSAFQPYQATSEIEVTPSVLRANMPLHVRRSSDPALIGLSTSVSDSNFSSEEPSRKNPTRWSTTAGFLKQNTAGSPKTCDRKKDENYRSLPRDTSNWSNQFQRDNARSSLSASHPMVGKWLEKQEQDEDGTEEDNSRVEPVGHADTGLEHIPNFSLDDMVKLVEVPNDGGPLGIHVVPFSARGGRTLGLLVKRLEKGGKAEHENLFRENDCIVRINDGDLRNRRFEQAQHMFRQAMRTPIIWFHVVPAANKEQYEQLSQSEKNNYYSSRFSPDSQYIDNRSVNSAGLHTVQRAPRLNHPPEQIDSHSRLPHSAHPSGKPPSAPASAPQNVFSTTVSSGYNTKKIGKRLNIQLKKGTEGLGFSITSRDVTIGGSAPIYVKNILPRGAAIQDGRLKAGDRLIEVNGVDLVGKSQEEVVSLLRSTKMEGTVSLLVFRQEDAFHPRELNAEPSQMQIPKETKAEDEDIVLTPDGTREFLTFEVPLNDSGSAGLGVSVKGNRSKENHADLGIFVKSIINGGAASKDGRLRVNDQLIAVNGESLLGKTNQDAMETLRRSMSTEGNKRGMIQLIVARRISKCNELKSPGSPPGPELPIETALDDRERRISHSLYSGIEGLDESPSRNAALSRIMGKYQLSPTVNMPQDDTVIIEDDRLPVLPPHLSDQSSSSSHDDVGFVTADAGTWAKAAISDSADCSLSPDVDPVLAFQREGFGRQSMSEKRTKQFSDASQLDFVKTRKSKSMDLGIADETKLNTVDDQKAGSPSRDVGPSLGLKKSSSLESLQTAVAEVTLNGDIPFHRPRPRIIRGRGCNESFRAAIDKSYDKPAVDDDDEGMETLEEDTEESSRSGRESVSTASDQPSHSLERQMNGNQEKGDKTDRKKDKTGKEKKKDRDKEKDKMKAKKGMLKGLGDMFRFGKHRKDDKIEKTGKIKIQESFTSEEERIRMKQEQERIQAKTREFRERQARERDYAEIQDFHRTFGCDDELMYGGVSSYEGSMALNARPQSPREGHMMDALYAQVKKPRNSKPSPVDSNRSTPSNHDRIQRLRQEFQQAKQDEDVEDRRRTYSFEQPWPNARPATQSGRHSVSVEVQMQRQRQEERESSQQAQRQYSSLPRQSRKNASSVSQDSWEQNYSPGEGFQSAKENPRYSSYQGSRNGYLGGHGFNARVMLETQELLRQEQRRKEQQMKKQPPSEGPSNYDSYKKVQDPSYAPPKGPFRQDVPPSPSQVARLNRLQTPEKGRPFYS

SEQ ID NO: 57069 - protein, 1356 aa, Homo sapiens
MKVTVCFGRTRVVVPCGDGHMKVFSLIQQAVTRYRKAIAKDPNYWIQVHRLEHGDGGILDLDDILCDVADDKDRLVAVFDEQDPHHGGDGTSASSTGTQSPEIFGSELGTNNVSAFQPYQATSEIEVTPSVLRANMPLHVRRSSDPALIGLSTSVSDSNFSSEEPSRKNPTRWSTTAGFLKQNTAGSPKTCDRKKDENYRSLPRDTSNWSNQFQRDNARSSLSASHPMVGKWLEKQEQDEDGTEEDNSRVEPVGHADTGLEHIPNFSLDDMVKLVEVPNDGGPLGIHVVPFSARGGRTLGLLVKRLEKGGKAEHENLFRENDCIVRINDGDLRNRRFEQAQHMFRQAMRTPIIWFHVVPAANKEQYEQLSQSEKNNYYSSRFSPDSQYIDNRSVNSAGLHTVQRAPRLNHPPEQIDSHSRLPHSAHPSGKPPSAPASAPQNVFSTTVSSGYNTKKIGKRLNIQLKKGTEGLGFSITSRDVTIGGSAPIYVKNILPRGAAIQDGRLKAGDRLIEVNGVDLVGKSQEEVVSLLRSTKMEGTVSLLVFRQEDAFHPRELNAEPSQMQIPKETKAEDEDIVLTPDGTREFLTFEVPLNDSGSAGLGVSVKGNRSKENHADLGIFVKSIINGGAASKDGRLRVNDQLIAVNGESLLGKTNQDAMETLRRSMSTEGNKRGMIQLIVARRISKCNELKSPGSPPGPELPIETALDDRERRISHSLYSGIEGLDESPSRNAALSRIMGESGKYQLSPTVNMPQDDTVIIEDDRLPVLPPHLSDQSSSSSHDDVGFVTADAGTWAKAAISDSADCSLSPDVDPVLAFQREGFGRQSMSEKRTKQFSDASQLDFVKTRKSKSMDLGIADETKLNTVDDQKAGSPSRDVGPSLGLKKSSSLESLQTAVAEVTLNGDIPFHRPRPRIIRGRGCNESFRAAIDKSYDKPAVDDDDEGMETLEEDTEESSRSGRESVSTASDQPSHSLERQMNGNQEKGDKTDRKKDKTGKEKKKDRDKEKDKMKAKKGMLKGLGDMFRFGKHRKDDKIEKTGKIKIQESFTSEEERIRMKQEQERIQAKTREFRERQARERDYAEIQDFHRTFGCDDELMYGGVSSYEGSMALNARPQSPREGHMMDALYAQVKKPRNSKPSPVDSNRSTPSNHDRIQRLRQEFQQAKQDEDVEDRRRTYSFEQPWPNARPATQSGRHSVSVEVQMQRQRQEERESSQQAQRQYSSLPRQSRKNASSVSQDSWEQNYSPGEGFQSAKENPRYSSYQGSRNGYLGGHGFNARVMLETQELLRQEQRRKEQQMKKQPPSEGPSNYDSYKKVQDPSYAPPKGPFRQDVPPSPSQVARLNRLQTPEKGRPFYS

SEQ ID NO: 57070 - protein, 1296 aa, Homo sapiens
MKVTVCFGRTRVVVPCGDGHMKVFSLIQQAVTRYRKAIAKDPNYWIQVHRLEHGDGGILDLDDILCDVADDKDRLVAVFDEQDPHHGGDGTSASSTGTQSPEIFGSELGTNNVSAFQPYQATSEIEVTPSVLRANMPLHVRRSSDPALIGLSTSVSDSNFSSEEPSRKNPTRWSTTAGFLKQNTAGSPKTCDRKDEDGTEEDNSRVEPVGHADTGLEHIPNFSLDDMVKLVEVPNDGGPLGIHVVPFSARGGRTLGLLVKRLEKGGKAEHENLFRENDCIVRINDGDLRNRRFEQAQHMFRQAMRTPIIWFHVVPAANKEQYEQLSQSEKNNYYSSRFSPDSQYIDNRSVNSAGLHTVQRAPRLNHPPEQIDSHSRLPHSAHPSGKPPSAPASAPQNVFSTTVSSGYNTKKIGKRLNIQLKKGTEGLGFSITSRDVTIGGSAPIYVKNILPRGAAIQDGRLKAGDRLIEVNGVDLVGKSQEEVVSLLRSTKMEGTVSLLVFRQEDAFHPRELKAEDEDIVLTPDGTREFLTFEVPLNDSGSAGLGVSVKGNRSKENHADLGIFVKSIINGGAASKDGRLRVNDQLIAVNGESLLGKTNQDAMETLRRSMSTEGNKRGMIQLIVARRISKCNELKSPGSPPGPELPIETALDDRERRISHSLYSGIEGLDESPSRNAALSRIMGKYQLSPTVNMPQDDTVIIEDDRLPVLPPHLSDQSSSSSHDDVGFVTADAGTWAKAAISDSADCSLSPDVDPVLAFQREGFGRQSMSEKRTKQFSDASQLDFVKTRKSKSMDLGIADETKLNTVDDQKAGSPSRDVGPSLGLKKSSSLESLQTAVAEVTLNGDIPFHRPRPRIIRGRGCNESFRAAIDKSYDKPAVDDDDEGMETLEEDTEESSRSGRESVSTASDQPSHSLERQMNGNQEKGDKTDRKKDKTGKEKKKDRDKEKDKMKAKKGMLKGLGDMFRFGKHRKDDKIEKTGKIKIQESFTSEEERIRMKQEQERIQAKTREFRERQARERDYAEIQDFHRTFGCDDELMYGGVSSYEGSMALNARPQSPREGHMMDALYAQVKKPRNSKPSPVDSNRSTPSNHDRIQRLRQEFQQAKQDEDVEDRRRTYSFEQPWPNARPATQSGRHSVSVEVQMQRQRQEERESSQQAQRQYSSLPRQSRKNASSVSQDSWEQNYSPGEGFQSAKENPRYSSYQGSRNGYLGGHGFNARVMLETQELLRQEQRRKEQQMKKQPPSEGPSNYDSYKKVQDPSYAPPKGPFRQDVPPSPSQVARLNRLQTPEKGRPFYS

SEQ ID NO: 57071 - protein, 1244 aa, Homo sapiens
MKVTVCFGRTRVVVPCGDGHMKVFSLIQQAVTRYRKAIAKDPNYWIQVHRLEHGDGGILDLDDILCDVADDKDRLVAVFDEQDPHHGGDGTSASSTGTQSPEIFGSELGTNNVSAFQPYQATSEIEVTPSVLRANMPLHVRRSSDPALIGLSTSVSDSNFSSEEPSRKNPTRWSTTAGFLKQNTAGSPKTCDRKDEDGTEEDNSRVEPVGHADTGLEHIPNFSLDDMVKLVEVPNDGGPLGIHVVPFSARGGRTLGLLVKRLEKGGKAEHENLFRENDCIVRINDGDLRNRRFEQAQHMFRQAMRTPIIWFHVVPAANKEQYEQLSQSEKNNYYSSRFSPDSQYIDNRSVNSAGLHTVQRAPRLNHPPEQIDSHSRLPHSAHPSGKPPSAPASAPQNVFSTTVSSGYNTKKIGKRLNIQLKKGTEGLGFSITSRDVTIGGSAPIYVKNILPRGAAIQDGRLKAGDRLIEVNGVDLVGKSQEEVVSLLRSTKMEGTVSLLVFRQEDAFHPRELKAEDEDIVLTPDGTREFLTFEVPLNDSGSAGLGVSVKGNRSKENHADLGIFVKSIINGGAASKDGRLRVNDQLIAVNGESLLGKTNQDAMETLRRSMSTEGNKRGMIQLIVARRISKCNELKSPGSPPGPELPIETALDDRERRISHSLYSGIEGLDESPSRNAALSRIMGKYQLSPTVNMPQDDTVIIEDDRLPVLPPHLSDQSSSSSHDDVGFVTADAGTWAKAAISDSADCSLSPDVDPVLAFQREGFGRQSMSEKRTKQFSDASQLDFVKTRKSKSMDLGSSPSRDVGPSLGLKKSSSLESLQTAVAEVTLNGDIPFHRPRPRIIRGRGCNESFRAAIDKSYDKPAVDDDDEGMETLEEDTEESSRSGRESVSTASDQPSHSLERQMNGNQEKGDKTDRKKDKTGKEKKKDRDKEKDKMKAKKGMLKGLGDMFRIQAKTREFRERQARERDYAEIQDFHRTFGCDDELMYGGVSSYEGSMALNARPQSPREGHMMDALYAQVKKPRNSKPSPVDSNRSTPSNHDRIQRLRQEFQQAKQDEDVEDRRRTYSFEQPWPNARPATQSGRHSVSVEVQMQRQRQEERESSQQAQRQYSSLPRQSRKNASSVSQDSWEQNYSPGEGFQSAKENPRYSSYQGSRNGYLGGHGFNARVMLETQELLRQEQRRKEQQMKKQPPSEGPSNYDSYKKVQDPSYAPPKGPFRQDVPPSPSQVARLNRLQTPEKGRPFYS

SEQ ID NO: 57072 - protein, 747 aa, Homo sapiens
MVKLVEVPNDGGPLGIHVVPFSARGGRTLGLLVKRLEKGGKAEHENLFRENDCIVRINDGDLRNRRFEQAQHMFRQAMRTPIIWFHVVPAANKEQYEQLSQSEKNNYYSSRFSPDSQYIDNRSVNSAGLHTVQRAPRLNHPPEQIDSHSRLPHSAHPSGKPPSAPASAPQNVFSTTVSSGYNTKKIGKRLNIQLKKGTEGLGFSITSRDVTIGGSAPIYVKNILPRGAAIQDGRLKAGDRLIEVNGVDLVGKSQEEVVSLLRSTKMEGTVSLLVFRQEDAFHPRELKAEDEDIVLTPDGTREFLTFEVPLNDSGSAGLGVSVKGNRSKENHADLGIFVKSIINGGAASKDGRLRVNDQLIAVNGESLLGKTNQDAMETLRRSMSTEGNKRGMIQLIVARRISKCNELKSPGSPPGPELPIETALDDRERRISHSLYSGIEGLDESPSRNAALSRIMGKYQLSPTVNMPQDDTVIIEDDRLPVLPPHLSDQSSSSSHDDVGFVTADAGTWAKAAISDSADCSLSPDVDPVLAFQREGFGRQSMSEKRTKQFSDASQLDFVKTRKSKSMDLVADETKLNTVDDQKAGSPSRDVGPSLGLKKSSSLESLQTAVAEVTLNGDIPFHRPRPRIIRGRGCNESFRAAIDKSYDKPAVDDDDEGMETLEEDTEESSRSGRESVSTASDQPSHSLERQMNGNQEKGDKTDRKKDKTGKEKKKDRDKEKDKMKAKKGMLKGLGDMFSLAKLKPEKR

SEQ ID NO: 57073 - protein, 1266 aa, Homo sapiens
MKVTVCFGRTRVVVPCGDGHMKVFSLIQQAVTRYRKAIAKDPNYWIQVHRLEHGDGGILDLDDILCDVADDKDRLVAVFDEQDPHHGGDGTSASSTGTQSPEIFGSELGTNNVSAFQPYQATSEIEVTPSVLRANMPLHVRRSSDPALIGLSTSVSDSNFSSEEPSRKNPTRWSTTAGFLKQNTAGSPKTCDRKDEDGTEEDNSRVEPVGHADTGLEHIPNFSLDDMVKLVEVPNDGGPLGIHVVPFSARGGRTLGLLVKRLEKGGKAEHENLFRENDCIVRINDGDLRNRRFEQAQHMFRQAMRTPIIWFHVVPAANKEQYEQLSQSEKNNYYSSRFSPDSQYIDNRSVNSAGLHTVQRAPRLNHPPEQIDSHSRLPHSAHPSGKPPSAPASAPQNVFSTTVSSGYNTKKIGKRLNIQLKKGTEGLGFSITSRDVTIGGSAPIYVKNILPRGAAIQDGRLKAGDRLIEVNGVDLVGKSQEEVVSLLRSTKMEGTVSLLVFRQEDAFHPRELKAEDEDIVLTPDGTREFLTFEVPLNDSGSAGLGVSVKGNRSKENHADLGIFVKSIINGGAASKDGRLRVNDQLIAVNGESLLGKTNQDAMETLRRSMSTEGNKRGMIQLIVARRISKCNELKSPGSPPGPELPIETALDDRERRISHSLYSGIEGLDESPSRNAALSRIMGKYQLSPTVNMPQDDTVIIEDDRLPVLPPHLSDQSSSSSHDDVGFVTADAGTWAKAAISDSADCSLSPDVDPVLAFQREGFGRQIADETKLNTVDDQKAGSPSRDVGPSLGLKKSSSLESLQTAVAEVTLNGDIPFHRPRPRIIRGRGCNESFRAAIDKSYDKPAVDDDDEGMETLEEDTEESSRSGRESVSTASDQPSHSLERQMNGNQEKGDKTDRKKDKTGKEKKKDRDKEKDKMKAKKGMLKGLGDMFRFGKHRKDDKIEKTGKIKIQESFTSEEERIRMKQEQERIQAKTREFRERQARERDYAEIQDFHRTFGCDDELMYGGVSSYEGSMALNARPQSPREGHMMDALYAQVKKPRNSKPSPVDSNRSTPSNHDRIQRLRQEFQQAKQDEDVEDRRRTYSFEQPWPNARPATQSGRHSVSVEVQMQRQRQEERESSQQAQRQYSSLPRQSRKNASSVSQDSWEQNYSPGEGFQSAKENPRYSSYQGSRNGYLGGHGFNARVMLETQELLRQEQRRKEQQMKKQPPSEGPSNYDSYKKVQDPSYAPPKGPFRQDVPPSPSQVARLNRLQTPEKGRPFYS

SEQ ID NO: 57074 - protein, 1340 aa, Homo sapiens
MKVTVCFGRTRVVVPCGDGHMKVFSLIQQAVTRYRKAIAKDPNYWIQVHRLEHGDGGILDLDDILCDVADDKDRLVAVFDEQDPHHGGDGTSASSTGTQSPEIFGSELGTNNVSAFQPYQATSEIEVTPSVLRANMPLHVRRSSDPALIGLSTSVSDSNFSSEEPSRKNPTRWSTTAGFLKQNTAGSPKTCDRKKDENYRSLPRDTSNWSNQFQRDNARSSLSASHPMVGKWLEKQEQDEDGTEEDNSRVEPVGHADTGLEHIPNFSLDDMVKLVEVPNDGGPLGIHVVPFSARGGRTLGLLVKRLEKGGKAEHENLFRENDCIVRINDGDLRNRRFEQAQHMFRQAMRTPIIWFHVVPAANKEQYEQLSQSEKNNYYSSRFSPDSQYIDNRSVNSAGLHTVQRAPRLNHPPEQIDSHSRLPHSAHPSGKPPSAPASAPQNVFSTTVSSGYNTKKIGKRLNIQLKKGTEGLGFSITSRDVTIGGSAPIYVKNILPRGAAIQDGRLKAGDRLIEVNGVDLVGKSQEEVVSLLRSTKMEGTVSLLVFRQEDAFHPRELKAEDEDIVLTPDGTREFLTFEVPLNDSGSAGLGVSVKGNRSKENHADLGIFVKSIINGGAASKDGRLRVNDQLIAVNGESLLGKTNQDAMETLRRSMSTEGNKRGMIQLIVARRISKCNELKSPGSPPGPELPIETALDDRERRISHSLYSGIEGLDESPSRNAALSRIMGKYQLSPTVNMPQDDTVIIEDDRLPVLPPHLSDQSSSSSHDDVGFVTADAGTWAKAAISDSADCSLSPDVDPVLAFQREGFGRQSMSEKRTKQFSDASQLDFVKTRKSKSMDLGIADETKLNTVDDQKAGSPSRDVGPSLGLKKSSSLESLQTAVAEVTLNGDIPFHRPRPRIIRGRGCNESFRAAIDKSYDKPAVDDDDEGMETLEEDTEESSRSGRESVSTASDQPSHSLERQMNGNQEKGDKTDRKKDKTGKEKKKDRDKEKDKMKAKKGMLKGLGDMFRFGKHRKDDKIEKTGKIKIQESFTSEEERIRMKQEQERIQAKTREFRERQARERDYAEIQDFHRTFGCDDELMYGGVSSYEGSMALNARPQSPREGHMMDALYAQVKKPRNSKPSPVDSNRSTPSNHDRIQRLRQEFQQAKQDEDVEDRRRTYSFEQPWPNARPATQSGRHSVSVEVQMQRQRQEERESSQQAQRQYSSLPRQSRKNASSVSQDSWEQNYSPGEGFQSAKENPRYSSYQGSRNGYLGGHGFNARVMLETQELLRQEQRRKEQQMKKQPPSEGPSNYDSYKKVQDPSYAPPKGPFRQDVPPSPSQVARLNRLQTPEKGRPFYS

SEQ ID NO: 57075 - protein, 372 aa, Homo sapiens
MNRSHRHGAGSGCLGTMEVKSKFGAEFRRFSLERSKPGKFEEFYGLLQHVHKIPNVDVLVGYADIHGDLLPINNDDNYHKAVSTANPLLRIFIQKKEEADYSAFGTDTLIKKKNVLTNVLRPDNHRKKPHIVISMPQDFRPVSSIIDVDILPETHRRVRLYKYGTEKPLGFYIRDGSSVRVTPHGLEKVPGIFISRLVPGGLAQSTGLLAVNDEVLEVNGIEVSGKSLDQVTDMMIANSRNLIITVRPANQRNNVVRNSRTSGSSGQSTDNSLLGYPQQIEPSFEPEDEDSEEDDIIIEDNGVPQQIPKAVPNTESLESLTQIELSFESGQNGFIPSNEVSLAAIASSSNTEFETHAPDQKLLEEDGTIITL

SEQ ID NO: 57076 - protein, 376 aa, Homo sapiens
MNRSFHKSQTLRFYDCSAVEVKSKFGAEFRRFSLDRHKPGKFEDFYKLVVHTHHISNSDVTIGYADVHGDLLPINNDDNFCKAVSSANPLLRVFIQKREEAERGSLGAGSLCRRRRALGALRDEGPRRRAHLDIGLPRDFRPVSSIIDVDLVPETHRRVRLHRHGCEKPLGFYIRDGASVRVTPHGLEKVPGIFISRMVPGGLAESTGLLAVNDEVLEVNGIEVAGKTLDQVTDMMIANSHNLIVTVKPANQRNNVVRGGRALGSSGPPSDGTAGFVGPPAPRVLQNFHPDEAESDEDNDVVIEGTLEPARPPQTPGAPAGSLSRVNGAGLAQRLQRDLALDGGLQRLLSSLRADPRHSLALPPGGVEEHGPAVTL

SEQ ID NO: 57077 - protein, 411 aa, Homo sapiens
MAEAELHKERLQAIAEKRKRQTEIEGKRQQLDEQILLLQHSKSKVLREKWLLQGIPAGTAEEEEARRRQSEEDEFRVKQLEDNIQRLEQEIQTLESEESQISAKEQIILEKLKETEKSFKDFQKGFSSTDGDAVNYISSQLPDLPILCSRTAEPSPGQDGTSRAAAVYAMEINVEKDKQTGETKILSTSTIGPEGVHQKGVKVYDDGTKVVYEVRSGGTVVENGVHKLSTKDVEELIQKAGQSSLGGGHVSERTVIADGSLSHPKEHMLCKEAKLEMVHKSRKDHSSGNPGQQAQAPSAAGPEANLDQPVTMIFMGYQNIEDEEETKKVLGYDETIKAELVLIDEDDEKSLREKTVTDVSTIDGNAAELVSGRPVSDTTEPSSPEGKEESLATEPAPGTQKKKRCQCCVVM

SEQ ID NO: 57078 - protein, 379 aa, Homo sapiens
MEMAEAELHKERLQAIAEKRKRQTEIEGKRQQLDEQILLLQHSKSKVLREKWLLQGIPAGTAEEEEARRRQSEEDEFRVKQLEDNIQRLEQEIQTLESEESQISAKEQIILEKLKETEKSFKDFQKGFSSTDGAVYAMEINVEKDKQTGETKILSTSTIGPEGVHQKGVKVYDDGTKVVYEVRSGGTVVENGVHKLSTKDVEELIQKAGQSSLGGGHVSERTVIADGSLSHPKEHMLCKEAKLEMVHKSRKDHSSGNPGQQAQAPSAAGPEANLDQPVTMIFMGYQNIEDEEETKKVLGYDETIKAELVLIDEDDEKSLREKTVTDVSTIDGNAAELVSGRPVSDTTEPSSPEGKEESLATEPAPGTQKKKRCQCCVVM

SEQ ID NO: 57079 - protein, 413 aa, Homo sapiens
MEMAEAELHKERLQAIAEKRKRQTEIEGKRQQLDEQILLLQHSKSKVLREKWLLQGIPAGTAEEEEARRRQSEEDEFRVKQLEDNIQRLEQEIQTLESEESQISAKEQIILEKLKETEKSFKDFQKGFSSTDGDAVNYISSQLPDLPILCSRTAEPSPGQDGTSRAAAVYAMEINVEKDKQTGETKILSTSTIGPEGVHQKGVKVYDDGTKVVYEVRSGGTVVENGVHKLSTKDVEELIQKAGQSSLGGGHVSERTVIADGSLSHPKEHMLCKEAKLEMVHKSRKDHSSGNPGQQAQAPSAAGPEANLDQPVTMIFMGYQNIEDEEETKKVLGYDETIKAELVLIDEDDEKSLREKTVTDVSTIDGNAAELVSGRPVSDTTEPSSPEGKEESLATEPAPGTQKKKRCQCCVVM

SEQ ID NO: 57080 - protein, 355 aa, Homo sapiens [sequence omitted]

SEQ ID NO: 57081 - protein, 355 aa, Homo sapiens
MGKLVALVLLGVGLSLVGEMFLAFRERVNASREVEPVEPENCHLIEELETGSEDLEILPNGLAFISSGLKYPGIKSFNPNSPGKILLMDLNEEDPTVLELGITGSKFDVSSFNPHGISTFTDEDNAMYLLVVNHPDAKSTVELFKFQEEEKSLLHLKTIRHKLLPNLNDIVAVGPEHFYGTNDHYFLDPYLQSWEMYLGLAWSYVVYYSPSEVRVVAEGFDFANGINISPDGKYVYIAELLAHKIHVYEKHANWTLTPLKSLDFNTLVDNISVDPETGDLWVGCHPNGMKIFFYDSENPPASEVLRIQNILTEEPKVTQVYAENGTVLQGSTVASVYKGKLLIGTVFHKALYCEL

SEQ ID NO: 57082 - protein, 354 aa, Homo sapiens
MGRLVAVGLLGIALALLGERLLALRNRLKASREVESVDLPHCHLIKGIEAGSEDIDILPNGLAFFSVGLKFPGLHSFAPDKPGGILMMDLKEEKPRARELRISRGFDLASFNPHGISTFIDNDDTVYLFVVNHPEFKNTVEIFKFEEAENSLLHLKTVKHELLPSVNDITAVGPAHFYATNDHYFSDPFLKYLETYLNLHWANVVYYSPNEVKVVAEGFDSANGINISPDDKYIYVADILAHEIHVLEKHTNMNLTQLKVLELDTLVDNLSIDPSSGDIWVGCHPNGQKLFVYDPNNPPSSEVLRIQNILSEKPTVTTVYANNGSVLQGSSVASVYDGKLLIGTLYHRALYCEL

SEQ ID NO: 57083 - protein, 352 aa, Homo sapiens
GAAGGCGLAGDRAGLGERLLALRNRLKASREVESVDLPHCHLIKGIEAGSEDIDILPNGLAFFSVGLKFPGLHSFAPDKPGGILMMDLKEEKPRARELRISRGFDLASFNPHGISTFIDNDDTVYLFVVNHPEFKNTVEIFKFEEAENSLLHLKTVKHELLPSVNDITAVGPAHFYATNDHYFSDPFLKYLETYLNLHWANVVYYSPNEVKVVAEGFDSANGINISPDDKYIYVADILAHEIHVLEKHTNMNLTQLKVLELDTLVDNLSIDPSSGDIWVGCHPNGQKLFVYDPNNPPSSEVLRIQNILSEKPTVTTVYANNGSVLQGSSVASVYDGKLLIGTLYHRALYCEL

SEQ ID NO: 57084 - protein, 375 aa, Homo sapiens
MAPPTELLARPERGSAPGSRAMGRLVAVGLLGIALALLGERLLALRNRLKASREVESVDLPHCHLIKGIEAGSEDIDILPNGLAFFSVGLKFPGLHSFAPDKPGGILMMDLKEEKPRARELRISRGFDLASFNPHGISTFIDNDDTVYLFVVNHPEFKNTVEIFKFEEAENSLLHLKTVKHELLPSVNDITAVGPAHFYATNDHYFSDPFLKYLETYLNLHWANVVYYSPNEVKVVAEGFDSANGINISPDDKYIYVADILAHEIHVLEKHTNMNLTQLKVLELDTLVDNLSIDPSSGDIWVGCHPNGQKLFVYDPNNPPSSEVLRIQNILSEKPTVTTVYANNGSVLQGSSVASVYDGKLLIGTLYHRALYCEL

SEQ ID NO: 57085 - protein, 342 aa, Homo sapiens
MGRLVAVGLLGIALALLGERLLALRNRLKASREVESVDLPHCHLIKGIEAGSEDIDILPNGLAFFSVGLKFPGLHSFAPDKPGGILMMDLKEEKPRARELRISRGFDLASFNPHGISTFIDNEFKNTVEIFKFEEAENSLLHLKTVKHELLPSVNDITAVGPAHFYATNDHYFSDPFLKYLETYLNLHWANVVYYSPNEVKVVAEGFDSANGINISPDDKYIYVADILAHEIHVLEKHTNMNLTQLKVLELDTLVDNLSIDPSSGDIWVGCHPNGQKLFVYDPNNPPSSEVLRIQNILSEKPTVTTVYANNGSVLQGSSVASVYDGKLLIGTLYHRALYCEL

SEQ ID NO: 57086 - protein, 354 aa, Homo sapiens
MGKLVALVLLGVGLSLVGEMFLAFRERVNASREVEPVEPENCHLIEELESGSEDIDILPSGLAFISSGLKYPGMPNFAPDEPGKIFLMDLNEQNPRAQALEISGGFDKELFNPHGISIFIDKDNTVYLYVVNHPHMKSTVEIFKFEEQQRSLVYLKTIKHELLKSVNDIVVLGPEQFYATRDHYFTNSLLSFFEMILDLRWTYVLFYSPREVKVVAKGFCSANGITVSADQKYVYVADVAAKNIHIMEKHDNWDLTQLKVIQLGTLVDNLTVDPATGDILAGCHPNPMKLLNYNPEDPPGSEVLRIQNVLSEKPRVSTVYANNGSVLQGTSVASVYHGKILIGTVFHKTLYCEL

SEQ ID NO: 57087 - protein, 523 aa, Homo sapiens
MMLRGNLKQVRIEKNPARLRALESAVGESEPAAAAAMALALAGEPAPPAPAPPEDHPDEEMGFTIDIKSFLKPGEKTYTQRCRLFVGNLPTDITEEDFKRLFERYGEPSEVFINRDRGFGFIRLESRTLAEIAKAELDGTILKSRPLRIRFATHGAALTVKNLSPVVSNELLEQAFSQFGPVEKAVVVVDDRGRATGKGFVEFAAKPPARKALERCGDGAFLLTTTPRPVIVEPMEQFDDEDGLPEKLMQKTQQYHKEREQPPRFAQPGTFEFEYASRWKALDEMEKQQREQVDRNIREAKEKLEAEMEAARHEHQLMLMRQDLMRRQEELRRLEELRNQELQKRKQIQLRHEEEHRRREEEMIRHREQEELRRQQEGFKPNYMENREQEMRMGDMGPRGAINMGDAFSPAPAGNQGPPPMMGMNMNNRATIPGPPMGPGPAMGPEGAANMGTPMMPDNGAVHNDRFPQGPPSQMGSPMGSRTGSETPQAPMSGVGPVSGGPGGFGRGSQGGNFEGPNKRRRY

SEQ ID NO: 57088 - protein, 463 aa, Homo sapiens
MGFTIDIKSFLKPGEKTYTQRCRLFVGNLPTDITEEDFKRLFERYGEPSEVFINRDRGFGFIRLESRTLAEIAKAELDGTILKSRPLRIRFATHGAALTVKNLSPVVSNELLEQAFSQFGPVEKAVVVVDDRGRATGKGFVEFAAKPPARKALERCGDGAFLLTTTPRPVIVEPMEQFDDEDGLPEKLMQKTQQYHKEREQPPRFAQPGTFEFEYASRWKALDEMEKQQREQVDRNIREAKEKLEAEMEAARHEHQLMLMRQDLMRRQEELRRLEELRNQELQKRKQIQLRHEEEHRRREEEMIRHREQEELRRQQEGFKPNYMENREQEMRMGDMGPRGAINMGDAFSPAPAGNQGPPPMMGMNMNNRATIPGPPMGPGPAMGPEGAANMGTPMMPDNGAVHNDRFPQGPPSQMGSPMGSRTGSETPQAPMSGVGPVSGGPGGFGRGSQGGNFEGPNKRRRY

SEQ ID NO: 57089 - protein, 248 aa, Homo sapiens
MMLRGNLKQVRIEKNPARLRALESAVGESEPAAAAAMALALAGEPAPPAPAPPEDHPDEEMGFTIDIKSFLKPGEKTYTQRCRLFVGNLPTDITEEDFKRLFERYGEPSEVFINRDRGFGFIRLESRTLAEIAKAELDGTILKSRPLRIRFATHGAALTVKNLSPVVSNELLEQAFSQFGPVEKAVVVVDDRGRATGKGFVEFAAKPPARKALERCGDGAFLLTTTPRPVIVEPMEQFDDEDGLPEKL

SEQ ID NO: 57090 - protein, 102 aa, Homo sapiens
MSEKSVEAAAELSAKDLKEKKEKVEEKASRKERKKEVVEEEENGAEEEEEETAEDGEEEDEGEEEDEEEEEEDDEGPALKRAAEEEDEADPKRQKTENGASA

SEQ ID NO: 57091 - protein, 104 aa, Homo sapiens
MSEKSVEAAAELSAKDLKEKKEKVEEKASRKERKKEVVEAPVPLVVMVGKACSQPEATPSPGPHRRRRTGLRRKKKKLPRMERRKMKGKKKMRKKKKRMMKGPR

SEQ ID NO: 57092 - protein, 101 aa, Homo sapiens
SRDPACRAAELSAKDLKEKKEKVEEKASRKERKKEVVEEEENGAEEEEEETAEDGEEEDEGEEEDEEEEEEDDEGPALKRAAEEEDEADPKRQKTENGASA

SEQ ID NO: 57093 - protein, 175 aa, Homo sapiens
MQRRLVQQWSVAVFLLSYAVPSCGRSVEGLSRRLKRAVSEHQLLHDKGKSIQDLRRRFFLHHLIAEIHTAEIRATSEVSPNSKPSPNTKNHPVRFGSDDEGRYLTQETNKVETYKEQPLKTPGKKKKGKPGKRKEQEKKKRRTRSAWLDSGVTGSGLEGDHLSDTSTTSLELDSR

SEQ ID NO: 57094 - protein, 209 aa, Homo sapiens
MQRRLVQQWSVAVFLLSYAVPSCGRSVEGLSRRLKRAVSEHQLLHDKGKSIQDLRRRFFLHHLIAEIHTAEIRATSEVSPNSKPSPNTKNHPVRFGSDDEGRYLTQETNKVETYKEQPLKTPGKKKKGKPGKRKEQEKKKRRTRSAWLDSGVTGSGLEGDHLSDTSTTSLELDSRTALLWGLKKKKENNRRTHHMQLMISLFKSPLLLL

SEQ ID NO: 57095 - protein, 175 aa, Homo sapiens; identical to SEQ ID NO: 57093

SEQ ID NO: 57096 - protein, 177 aa, Homo sapiens
MQRRLVQQWSVAVFLLSYAVPSCGRSVEGLSRRLKRAVSEHQLLHDKGKSIQDLRRRFFLHHLIAEIHTAEIRATSEVSPNSKPSPNTKNHPVRFGSDDEGRYLTQETNKVETYKEQPLKTPGKKKKGKPGKRKEQEKKKRRTRSAWLDSGVTGSGLEGDHLSDTSTTSLELDSRRH

SEQ ID NO: 57097 - protein, 175 aa, Homo sapiens; identical to SEQ ID NO: 57093

SEQ ID NO: 57098 - protein, 26 aa, Homo sapiens
TALLWGLKKKGKQQKNTSYATNDLII

SEQ ID NO: 57099 - protein, 209 aa, Homo sapiens; identical to SEQ ID NO: 57094

SEQ ID NO: 57100 - protein, 177 aa, Homo sapiens; identical to SEQ ID NO: 57096

SEQ ID NO: 57101 - protein, 172 aa, Homo sapiens
MQRRLVQQWSVAVFLLSYAVPSCGRSVEGLSRRLKRAVSEHQLLHDKGKSIQDLRRRFFLHHLIAEIHTAEIRATSEVSPNSKPSPNTKNHPVRFGSDDEGRYLTQETNKVETYKEQPLKTPGKKKKGKPGKRKEQEKKKRRTRSAWLDSGVTGSGLEGDHLSDTSTTSLEL

SEQ ID NO: 57102 - protein, 177 aa, Homo sapiens; identical to SEQ ID NO: 57096

SEQ ID NO: 57103 - protein, 296 aa, Homo sapiens
MVAEKETLSLNKCPDKMPKRTKLLAQQPLPVHQPHSLVSEGFTVKAMMKNSVVRGPPAAGAFKERPTKPTAFRKFYERGDFPIALEHDSKGNKIAWKVEIEKLDYHHYLPLFFDGLCEMTFPYEFFARQGIHDMLEHGGNKILPVLPQLIIPIKNALNLRNRQVICVTLKVLQHLVVSAEMVGKALVPYYRQILPVLNIFKNMNGSYSLPRLECSGAIMARCNLDHLGSSDPPTSASQVAEIIVNSGDGIDYSQQKRENIGDLIQETLEAFERYGGENAFINIKYVVPTYESCLLN

SEQ ID NO: 57104 - protein, 257 aa, Homo sapiens
MVAEKETLSLNKCPDKMPKRTKLLAQQPLPVHQPHSLVSEGFTVKAMMKNSVVRGPPAAGAFKERPTKPTAFRKFYERGDFPIALEHDSKGNKIAWKVEIEKLDYHHYLPLFFDGLCEMTFPYEFFARQGIHDMLEHGGNKILPVLPQLIIPIKNALNLRNRQVICVTLKVLQHLVVSAEMVGKALVPYYRQILPVLNIFKNMNVNSGDGIDYSQQKRENIGDLIQETLEAFERYGGENAFINIKYVVPTYESCLLN

SEQ ID NO: 57105 - protein, 257 aa, Homo sapiens; identical to SEQ ID NO: 57104

SEQ ID NO: 57106 - protein, 274 aa, Homo sapiens
MSGECQSPHCPGTSAEFFFKCGAHPTSDKETSVALHLIATNSRNITCITCTDVRSPVLVFQCNSRHVICLDCFHLYCVTRLNDRQFVHDPQLGYSLPCVAGCPNSLIKELHHFRILGEEQYNRYQQYGAEECVLQMGGVLCPRPGCGAGLLPEPDQRKVTCEGGNGLGCGFAFCRECKEAYHEGECSAVFEASGTTTQAYRVDERAAEQARWEAASKETIKKTTKPCPRCHVPVEKNGGCMHMKCPQPQCRLEWCWNCGCEWNRVCMGDHWFDV

SEQ ID NO: 57107 - protein, 368 aa, Homo sapiens
MIVFVRFNSSHGFPVEVDSDTSIFQLKEVVAKRQGVPADQLRVIFAGKELRNDWTVQNCDLDQQSIVHIVQRPWRKGQEMNATGGDDPRNAAGGCEREPQSLTRVDLSSSVLPGDSVGLAVILHTDSRKDSPPAGSPAGRSIYNSFYVYCKGPCQRVQPGKLRVQCSTCRQATLTLTQGPSCWDDVLIPNRMSGECQSPHCPGTSAEFFFKCGAHPTSDKETSVALHLIATNSRNITCITCTDVRSPVLVFQCNSRHVICLDCFHLYCVTRLNDRQFVHDPQLGYSLPCVAGCPNSLIKELHHFRILGEEQYNRYQQYGAEECVLQMGGVLCPRPGCGAGLLPEPDQRKVTCEGGNGLGCGYGQRRTK

SEQ ID NO: 57108 - protein, 274 aa, Homo sapiens; identical to SEQ ID NO: 57106

SEQ ID NO: 57109 - protein, 218 aa, Homo sapiens
MNATGGDDPRNAAGGCEREPQSLTRVDLSSSVLPGDSVGLAVILHTDSRKDSPPAGSPAGRSIYNSFYVYCKGPCQRVQPGKLRVQCSTCRQATLTLTQGPSCWDDVLIPNRMSGECQSPHCPGTSAEFFFKCGAHPTSDKETSVALHLIATNSRNITCITCTDVRSPVLVFQCNSRHVICLDCFHLYCVTRLNDRQFVHDPQLGYSLPCVVSLLPSQ

SEQ ID NO: 57110 - protein, 316 aa, Homo sapiens
MIVFVRFNSSHGFPVEVDSDTSIFQLKEVVAKRQGVPADQLRVIFAGKELRNDWTVQEFFFKCGAHPTSDKETSVALHLIATNSRNITCITCTDVRSPVLVFQCNSRHVICLDCFHLYCVTRLNDRQFVHDPQLGYSLPCVAGCPNSLIKELHHFRILGEEQYNRYQQYGAEECVLQMGGVLCPRPGCGAGLLPEPDQRKVTCEGGNGLGCGFAFCRECKEAYHEGECSAVFEASGTTTQAYRVDERAAEQARWEAASKETIKKTTKPCPRCHVPVEKNGGCMHMKCPQPQCRLEWCWNCGCEWNRVCMGDHWFDV

SEQ ID NO: 57111 - protein, 437 aa, Homo sapiens
MIVFVRFNSSHGFPVEVDSDTSIFQLKEVVAKRQGVPADQLRVIFAGKELRNDWTVQNCDLDQQSIVHIVQRPWRKGQEMNATGGDDPRNAAGGCEREPQSLTRVDLSSSVLPGDSVGLAVILHTDSRKDSPPAGSPAGRSIYNSFYVYCKGPCQRVQPGKLRVQCSTCRQATLTLTQEFFFKCGAHPTSDKETSVALHLIATNSRNITCITCTDVRSPVLVFQCNSRHVICLDCFHLYCVTRLNDRQFVHDPQLGYSLPCVAGCPNSLIKELHHFRILGEEQYNRYQQYGAEECVLQMGGVLCPRPGCGAGLLPEPDQRKVTCEGGNGLGCGFAFCRECKEAYHEGECSAVFEASGTTTQAYRVDERAAEQARWEAASKETIKKTTKPCPRCHVPVEKNGGCMHMKCPQPQCRLEWCWNCGCEWNRVCMGDHWFDV

SEQ ID NO: 57112 - protein, 465 aa, Homo sapiens
MIVFVRFNSSHGFPVEVDSDTSIFQLKEVVAKRQGVPADQLRVIFAGKELRNDWTVQNCDLDQQSIVHIVQRPWRKGQEMNATGGDDPRNAAGGCEREPQSLTRVDLSSSVLPGDSVGLAVILHTDSRKDSPPAGSPAGRSIYNSFYVYCKGPCQRVQPGKLRVQCSTCRQATLTLTQGPSCWDDVLIPNRMSGECQSPHCPGTSAEFFFKCGAHPTSDKETSVALHLIATNSRNITCITCTDVRSPVLVFQCNSRHVICLDCFHLYCVTRLNDRQFVHDPQLGYSLPCVAGCPNSLIKELHHFRILGEEQYNRYQQYGAEECVLQMGGVLCPRPGCGAGLLPEPDQRKVTCEGGNGLGCGFAFCRECKEAYHEGECSAVFEASGTTTQAYRVDERAAEQARWEAASKETIKKTTKPCPRCHVPVEKNGGCMHMKCPQPQCRLEWCWNCGCEWNRVCMGDHWFDV

SEQ ID NO: 57113 - protein, 203 aa, Homo sapiens
MSGECQSPHCPGTSAEFFFKCGAHPTSDKETSVALHLIATNSRNITCITCTDVRSPVLVFQCNSRHVICLDCFHLYCVTRLNDRQFVHDPQLGYSLPCVAGCPNSLIKELHHFRILGEEQYNRYQQYGAEECVLQMGGVLCPRPGCGAGLLPEPDQRKVTCEGGNGLGCGFAFCRECKEAYHEGECSAVFEASGTTTQHSGCT

SEQ ID NO: 57114 - protein, 142 aa, Homo sapiens
SVFVRFNSSHGFPVEVDSDTSIFQLKEVVAKRQGVPADQLRVIFAGKELRNDWTVQNCDLDQQSIVHIVQRPWRKGQEMNATGGDDPRNAAGGCEREPQSLTRVDLSSSVLPGDSVGLAVILHTDSRKDSPPAGSPGNCLHG

SEQ ID NO: 57115 - protein, 142 aa, Homo sapiens
MAAVVAATALKGRGARNARVLRGILAGATANKASHNRTRALQSHSSPEGKEEPEPLSPELEYIPRKRGKNPMKAVGLAWAIGFPCGILLFILTKREVDKDRVKQMKARQNMRLSNTGEYESQRFRASSQSAPSPDVGSGVQT

SEQ ID NO: 57116 - protein, 361 aa, Homo sapiens
MAWQGWPAAWQWVAGCWLLLVLVLVLLVSPRGCRARRGLRGLLMAHSQRLLFRIGYSLYTRTWLGYLFYRQQLRRARNRYPKGHSKTQPRLFNGVKVLPIPVLSDNYSYLIIDTQAQLAVAVDPSDPRAVQASIEKEGVTLVAILCTHKHWDHSGGNRDLSRRHRDCRVYGSPQDGIPYLTHPLCHQDVVSVGRLQIRALATPGHTQGHLVYLLDGEPYKGPSCLFSGDLLFLSGCGRTFEGNAETMLSSLDTVLGLGDDTLLWPGHEYAEENLGFAGVVEPENLARERKMQWVQRQRLERKGTCPSTLGEERSYNPFLRTHCLALQEALGPGPGPTGDDDYSRAQLLEELRRLKDMHKSK

SEQ ID NO: 57117 - protein, 385 aa, Homo sapiens
MAAVVAATALKGRGARNARVLRGILAGATANKASHNRTRALQSHSSPEGKEEPEPLSPELEYIPRKRGKNPMKAVGLAWYSLYTRTWLGYLFYRQQLRRARNRYPKGHSKTQPRLFNGVKVLPIPVLSDNYSYLIIDTQAQLAVAVDPSDPRAVQASIEKEGVTLVAILCTHKHWDHSGGNRDLSRRHRDCRVYGSPQDGIPYLTHPLCHQDVVSVGRLQIRALATPGHTQGHLVYLLDGEPYKGPSCLFSGDLLFLSGCGRTFEGNAETMLSSLDTVLGLGDDTLLWPGHEYAEENLGFAGVVEPENLARERKMQWVQRQRLERKGTCPSTLGEERSYNPFLRTHCLALQEALGPGPGPTGDDDYSRAQLLEELRRLKDMHKSK

SEQ ID NO: 57118 - protein, 110 aa, Homo sapiens
MSMTDLLNAEDIKKAVGAFSATDSFDHKKFFQMVGLKKKSADDVKKVFHMLDKDKSGFIEEDELGFILKGFSPDARDLSAKETKMLMAAGDKDGDGKIGVDEFSTLVAES

SEQ ID NO: 57119 - protein, 78 aa, Homo sapiens
MVGLKKKSADDVKKVFHMLDKDKSGFIEEDELGFILKGFSPDARDLSAKETKMLMAAGDKDGDGKIGVDEFSTLVAES

SEQ ID NO: 57120 - protein, 110 aa, Homo sapiens; identical to SEQ ID NO: 57118

SEQ ID NO: 57121 - protein, 101 aa, Homo sapiens
MSMTDLLNAEDIKKAVGAFSATDSFDHKKFFQMVGLKKKSADDVKKVFHMLDKDKSGFIEEDELGFILKGFSPDARDLSAKETKMLMAAGDKDGDGKIGVD

SEQ ID NO: 57122 - protein, 327 aa, Homo sapiens
MSDLQEEGKNAINSPMSPALVDVHPEDTQLEENEERTMIDPTSKEDPKFKELVKVLLDWINDVLVEERIIVKQLEEDLYDGQVLQKLLEKLAGCKLNVAEVTQSEIGQKQKLQTVLEAVHDLLRPRGWALRWSVDSIHGKNLVAILHLLVSLAMHFRAPIRLPEHVTVQVVVVRKREGLLHSSHISEELTTTTEMMMGRFERDAFDTLFDHAPDKLSVVKKSLITFVNKHLNKLNLEVTELETQFADGVYLVLLMGLLEDYFVPLHHFYLTPESFDQKVHNVSFAFELMLDGGLKKPKARPEDVVNLDLKSTLRVLYNLFTKYKNVE

SEQ ID NO: 57123 - protein, 412 aa, Homo sapiens
MLGIIPLPFGKPQPQSRRRPLRPPSASSASRPARGSLRRAMATSPQKSPSVPKSPTPKSPPSRKKDDSFLGKLGGTLARRKKAKEVSELQEEGMNAINLPLSPIPFELDPEDTMLEENEVRTMVDPNSRSDPKLQELMKVLIDWINDVLVGERIIVKDLAEDLYDGQVLQKLFEKLESEKLNVAEVTQSEIAQKQKLQTVLEKINETLKLPPRSIKWNVDSVHAKSLVAILHLLVALSQYFRAPIRLPDHVSIQVVVVQKREGILQSRQIQEEITGNTEALSGRHERDAFDTLFDHAPDKLNVVKKTLITFVNKHLNKLNLEVTELETQFADGVYLVLLMGLLEGYFVPLHSFFLTPDSFEQKVLNVSFAFELMQDGGLEKPKPRPEDIVNCDLKSTLRVLYNLFTKYRNVE

SEQ ID NO: 57124 - protein, 290 aa, Homo sapiens
MNAINLPLSPIPFELDPEDTMLEENEVRTMVDPNSRSDPKLQELMKVLIDWINDVLVGERIIVKDLAEDLYDGQVLQKLFEKLESEKLNVAEVTQSEIAQKQKLQTVLEKINETLKLPPRSIKWNVDSVHAKSLVAILHLLVALSQYFRAPIRLPDHVSIQVVVVQKREGILQSRQIQEEITGNTEALSGRHERDAFDTLFDHAPDKLNVVKKVGKGCLGWTEGSEMQQNIGKTHPCSLRASCQNWWHHLTSAHTGLSPLPSMYLSVPHWMLHLGLFPSISMNSLSSHPG

SEQ ID NO: 57125 - protein, 372 aa, Homo sapiens
MATSPQKSPSVPKSPTPKSPPSRKKDDSFLGKLGGTLARRKKAKEVSELQEEGMNAINLPLSPIPFELDPEDTMLEENEVRTMVDPNSRSDPKLQELMKVLIDWINDVLVGERIIVKDLAEDLYDGQVLQKLFEKLESEKLNVAEVTQSEIAQKQKLQTVLEKINETLKLPPRSIKWNVDSVHAKSLVAILHLLVALSQYFRAPIRLPDHVSIQVVVVQKREGILQSRQIQEEITGNTEYVSSRHKRDAFDTLFDHAPDKLNVVKKTLITFVNKHLNKLNLEVTELETQFADGVYLVLLMGLLEGYFVPLHSFFLTPDSFEQKVLNVSFAFELMQDGGLEKPKPRPEDIVNCDLKSTLRVLYNLFTKYRNVE

SEQ ID NO: 57126 - protein, 372 aa, Homo sapiens
MATSPQKSPSVPKSPTPKSPPSRKKDDSFLGKLGGTLARRKKAKEVSELQEEGMNAINLPLSPIPFELDPEDTMLEENEVRTMVDPNSRSDPKLQELMKVLIDWINDVLVGERIIVKDLAEDLYDGQVLQKLFEKLESEKLNVAEVTQSEIAQKQKLQTVLEKINETLKLPPRSIKWNVDSVHAKSLVAILHLLVALSQYFRAPIRLPDHVSIQVVVVQKREGILQSRQIQEEITGNTEALSGRHERDAFDTLFDHAPDKLNVVKKTLITFVNKHLNKLNLEVTELETQFADGVYLVLLMGLLEGYFVPLHSFFLTPDSFEQKVLNVSFAFELMQDGGLEKPKPRPEDIVNCDLKSTLRVLYNLFTKYRNVE

SEQ ID NO: 57127 - protein, 364 aa, Homo sapiens
MSSAPRSPTPRPRRMKKDESFLGKLGGTLARKRRAREVSDLQEEGKNAINSPMSPALVDVHPEDTQLEENEERTMIDPTSKEDPKFKELVKVLLDWINDVLVEERIIVKQLEEDLYDGQVLQKLLEKLAGCKLNVAEVTQSEIGQKQKLQTVLEAVHDLLRPRGWALRWSVDSIHGKNLVAILHLLVSLAMHFRAPIRLPEHVTVQVVVVRKREGLLHSSHISEELTTTTEMMMGRFERDAFDTLFDHAPDKLSVVKKSLITFVNKHLNKLNLEVTELETQFADGVYLVLLMGLLEDYFVPLHHFYLTPESFDQKVHNVSFAFELMLDGGLKKPKARPEDVVNLDLKSTLRVLYNLFTKYKNVE

SEQ ID NO: 57128 - protein, 397 aa, Homo sapiens
MHHVFKDHQRGEKRGFLSPENKNCRRLELRRGCSCSWGLCSQALMASLAGSLLPGSDRSGVETSEYAQGGVSDLQEEGKNAINSPMSPALVDVHPEDTQLEENEERTMIDPTSKEDPKFKELVKVLLDWINDVLVEERIIVKQLEEDLYDGQVLQKLLEKLAGCKLNVAEVTQSEIGQKQKLQTVLEAVHDLLRPRGWALRWSVDSIHGKNLVAILHLLVSLAMHFRAPIRLPEHVTVQVVVVRKREGLLHSSHISEELTTTTEMMMGRFERDAFDTLFDHAPDKLSVVKKSLITFVNKHLNKLNLEVTELETQFADGVYLVLLMGLLEDYFVPLHHFYLTPESFDQKVHNVSFAFELMLDGGLKKPKARPEDVVNLDLKSTLRVLYNLFTKYKNVE

SEQ ID NO: 57129 - protein, 331 aa, Homo sapiens
MEPEFLYDLLQLPKGVEPPAEEELSKGGKKKYLPPTSRKDPKFEELQKVLMEWINATLLPEHIVVRSLEEDMFDGLILHHLFQRLAALKLEAEDIALTATSQKHKLTVVLEAVNRSLQLEEWQAKWSVESIFNKDLLSTLHLLVALAKRFQPDLSLPTNVQVEVITIESTKSGLKSEKLVEQLTEYSTDKDEPPKDVFDELFKLAPEKVNAVKEAIVNFVNQKLDRLGLSVQNLDTQFADGVILLLLIGQLEGFFLHLKEFYLTPNSPAEMLHNVTLALELLKDEGLLSCPVSPEDIVNKDAKSTLRVLYGLFCKHTQKAHRDRTPHGAPN

SEQ ID NO: 57130 - protein, 26 aa, Homo sapiens
MEPEFLYDLLQLPKGVEPPAEEELSK

SEQ ID NO: 57131 - protein, 30 aa, Homo sapiens
MEPEFLYDLLQLPKGVEPPAEEELSKGVCP

SEQ ID NO: 57132 - protein, 331 aa, Homo sapiens; identical to SEQ ID NO: 57129

SEQ ID NO: 57133 - protein, 331 aa, Homo sapiens; identical to SEQ ID NO: 57129

SEQ ID NO: 57134 - protein, 137 aa, Homo sapiens
MVPAKEQVPGRCDSTQRCFPGPSNWTGAGGRAGSQPFVGDGTLGTPNFCWDHKEKRAAESQLQAWEAMEPEFLYDLLQLPKGVEPPAEEELSKGGKKKYLPPTSRKDPKFEELQKHTWPSPVTGTGDTICGLARKTW

SEQ ID NO: 57135 - protein, 1323 aa, Homo sapiens
MEDGGLTAFEEDQRCLSQSLPLPVSAEGPAAQTTAEPSRSFSSAHRHLSRRNGLSRLCQSRTALSEDRWSSYCLSSLAAQNICTSKLHCPAAPEHTDPSEPRGSVSCCSLLRGLSSGWSSPLLPAPVCNPNKAIFTVDAKTTEILVANDKACGLLGYSSQDLIGQKLTQFFLRSDSDVVEALSEEHMEADGHAAVVFGTVVDIISRSGEKIPVSVWMKRMRQERRLCCVVVLEPVERVSTWVAFQSDGTVTSCDSLFAHLHGYVSGEDVAGQHITDLIPSVQLPPSGQHIPKNLKIQRSVGRARDGTTFPLSLKLKSQPSSEEATTGEAAPVSGYRASVWVFCTISGLITLLPDGTIHGINHSFALTLFGYGKTELLGKNITFLIPGFYSYMDLAYNSSLQLPDLASCLDVGNESGCGERTLDPWQGQDPAEGGQDPRINVVLAGGHVVPRDEIRKLMESQDIFTGTQTELIAGGQLLSCLSPQPAPGVDNVPEGSLPVHGEQALPKDQQITALGREEPVAIESPGQDLLGESRSEPVDVKPFASCEDSEAPVPAEDGGSDAGMCGLCQKAQLERMGVSGPSGSDLWAGAAVAKPQAKGQLAGGSLLMHCPCYGSEWGLWWRSQDLAPSPSGMAGLSFGTPTLDEPWLGVENDREELQTCLIKEQLSQLSLAGALDVPHAELVPTECQAVTAPVSSCDLGGRDLCGGCTGSSSACYALATDLPGGLEAVEAQEVDVNSFSWNLKELFFSDQTDQTSSNCSCATSELRETPSSLAVGSDPDVGSLQEQGSCVLDDRELLLLTGTCVDLGQGRRFRESCVGHDPTEPLEVCLVSSEHYAASDRESPGHVPSTLDAGPEDTCPSAEEPRLNVQVTSTPVIVMRGAAGLQREIQEGAYSGSCYHRDGLRLSIQFEVRRVELQGPTPLFCCWLVKDLLHSQRDSAARTRLFLASLPGSTHSTAAELTGPSLVEVLRARPWFEEPPKAVELEGLAACEGEYSQKYSTMSPLGSGAFGFVWTAVDKEKNKEVVVKFIKKEKVLEDCWIEDPKLGKVTLEIAILSRVEHANIIKVLDIFENQGFFQLVMEKHGSGLDLFAFIDRHPRLDEPLASYIFRQLVSAVGYLRLKDIIHRDIKDENIVIAEDFTIKLIDFGSAAYLERGKLFYTFCGTIEYCAPEVLMGNPYRGPELEMWSLGVTLYTLVFEENPFCELEETVEAAIHPPYLVSKELMSLVSGLLQPVPERRTTLEKLVTDPWVTQPVNLADYTWEEVFRVNKPESGVLSAASLEMGNRSLSDVAQAQELCGGPVPGEAPNGQGCLHPGDPRLLTS

SEQ ID NO: 57136 - protein, 1330 aa, Homo sapiens
MEDGGLTAFEEDQRCLSQSLPLPVSAEGPAAQTTAEPSRSFSSAHRHLSRRNGLSRLCQSRTALSEDRWSSYCLSSLAAQNICTSKLHCPAAPEHTDPSEPRGSVSCCSLLRGLSSGWSSPLLPAPVCNPNKAIFTVDAKTTEILVANDKACGLLGYSSQDLIGQKLTQFFLRSDSDVVEALSEEHMEADGHAAVVFGTVVDIISRSGEKIPVSVWMKRMRQERRLCCVVVLEPVERVSTWVAFQSDGTVTSCDSLFAHLHGYVSGEDVAGQHITDLIPSVQLPPSGQHIPKNLKIQRSVGRARDGTTFPLSLKLKSQPSSEEATTGEAAPVSGYRASVWVFCTISGLITLLPDGTIHGINHSFALTLFGYGKTELLGKNITFLIPGFYSYMDLAYNSSLQLPDLASCLDVGNESGCGERTLDPWQGQDPAEGGQDPRINVVLAGGHVVPRDEIRKLMESQDIFTGTQTELIAGGQLLSCLSPQPAPGVDNVPEGSLPVHGEQALPKDQQITALGREEPVAIESPGQDLLGESRSEPVDVKPFASCEDSEAPVPAEDGGSDAGMCGLCQKAQLERMGVSGPSGSDLWAGAAVAKPQAKGQLAGGSLLMHCPCYGSEWGLWWRSQDLAPSPSGMAGLSFGTPTLDEPWLGVENDREELQTCLIKEQLSQLSLAGALDVPHAELVPTECQAVTAPVSSCDLGGRDLCGGCTGSSSACYALATDLPGGLEAVEAQEVDVNSFSWNLKELFFSDQTDQTSSNCSCATSELRETPSSLAVGSDPDVGSLQEQGSCVLDDRELLLLTGTCVDLGQGRRFRESCVGHDPTEPLEVCLVSSEHYAASDRESPGHVPSTLDAGPEDTCPSAEEPRLNVQVTSTPVIVMRGAAGLQREIQEGAYSGSCYHRDGLRLSIQFEVRRVELQGPTPLFCCWLVKDLLHSQRDSAARTRLFLASLPGSTHSTAAELTGPSLVEVLRARPWFEEPPKAVELEGLAACEGEYSQKYSTMSPLGSGAFGFVWTAVDKEKNKEVVVKFIKKEKVLEDCWIEDPKLGKVTLEIAILSRVEHANIIKVLDIFENQGFFQLVMEKHGSGLDLFAFIDRHPRLDEPLASYIFRQVRAGQSRLVSAVGYLRLKDIIHRDIKDENIVIAEDFTIKLIDFGSAAYLERGKLFYTFCGTIEYCAPEVLMGNPYRGPELEMWSLGVTLYTLVFEENPFCELEETVEAAIHPPYLVSKELMSLVSGLLQPVPERRTTLEKLVTDPWVTQPVNLADYTWEEVFRVNKPESGVLSAASLEMGNRSLSDVAQAQELCGGPVPGEAPNGQGCLHPGDPRLLTS

SEQ ID NO: 57137 - protein, 1323 aa, Homo sapiens; identical to SEQ ID NO: 57135

SEQ ID NO: 57138 - protein, 125 aa, Homo sapiens
MEDGGLTAFEEDQRCLSQSLPLPVSAEGPAAQTTAEPSRSFSSAHRHLSRRNGLSRLCQSRTALSEDRWSSYCLSSLAAQNICTSKLHCPAAPEHTDPSEPRGSVSCCSLLRGLSSGWSSPLLPA

SEQ ID NO: 57139 - protein, 1107 aa, Homo sapiens
MKRMRQERRLCCVVVLEPVERVSTWVAFQSDGTVTSCDSLFAHLHGYVSGEDVAGQHITDLIPSVQLPPSGQHIPKNLKIQRSVGRARDGTTFPLSLKLKSQPSSEEATTGEAAPVSGYRASVWVFCTISGLITLLPDGTIHGINHSFALTLFGYGKTELLGKNITFLIPGFYSYMDLAYNSSLQLPDLASCLDVGNESGCGERTLDPWQGQDPAEGGQDPRINVVLAGGHVVPRDEIRKLMESQDIFTGTQTELIAGGQLLSCLSPQPAPGVDNVPEGSLPVHGEQALPKDQQITALGREEPVAIESPGQDLLGESRSEPVDVKPFASCEDSEAPVPAEDGGSDAGMCGLCQKAQLERMGVSGPSGSDLWAGAAVAKPQAKGQLAGGSLLMHCPCYGSEWGLWWRSQDLAPSPSGMAGLSFGTPTLDEPWLGVENDREELQTCLIKEQLSQLSLAGALDVPHAELVPTECQAVTAPVSSCDLGGRDLCGGCTGSSSACYALATDLPGGLEAVEAQEVDVNSFSWNLKELFFSDQTDQTSSNCSCATSELRETPSSLAVGSDPDVGSLQEQGSCVLDDRELLLLTGTCVDLGQGRRFRESCVGHDPTEPLEVCLVSSEHYAASDRESPGHVPSTLDAGPEDTCPSAEEPRLNVQVTSTPVIVMRGAAGLQREIQEGAYSGSCYHRDGLRLSIQFEVRRVELQGPTPLFCCWLVKDLLHSQRDSAARTRLFLASLPGSTHSTAAELTGPSLVEVLRARPWFEEPPKAVELEGLAACEGEYSQKYSTMSPLGSGAFGFVWTAVDKEKNKEVVVKFIKKEKVLEDCWIEDPKLGKVTLEIAILSRVEHANIIKVLDIFENQGFFQLVMEKHGSGLDLFAFIDRHPRLDEPLASYIFRQLVSAVGYLRLKDIIHRDIKDENIVIAEDFTIKLIDFGSAAYLERGKLFYTFCGTIEYCAPEVLMGNPYRGPELEMWSLGVTLYTLVFEENPFCELEETVEAAIHPPYLVSKELMSLVSGLLQPVPERRTTLEKLVTDPWVTQPVNLADYTWEEVFRVNKPESGVLSAASLEMGNRSLSDVAQAQELCGGPVPGEAPNGQGCLHPGDPRLLTS

SEQ ID NO: 57140 - protein, 1137 aa, Homo sapiens
MGFPDSARAGQRSLVDIISRSGEKIPVSVWMKRMRQERRLCCVVVLEPVERVSTWVAFQSDGTVTSCDSLFAHLHGYVSGEDVAGQHITDLIPSVQLPPSGQHIPKNLKIQRSVGRARDGTTFPLSLKLKSQPSSEEATTGEAAPVSGYRASVWVFCTISGLITLLPDGTIHGINHSFALTLFGYGKTELLGKNITFLIPGFYSYMDLAYNSSLQLPDLASCLDVGNESGCGERTLDPWQGQDPAEGGQDPRINVVLAGGHVVPRDEIRKLMESQDIFTGTQTELIAGGQLLSCLSPQPAPGVDNVPEGSLPVHGEQALPKDQQITALGREEPVAIESPGQDLLGESRSEPVDVKPFASCEDSEAPVPAEDGGSDAGMCGLCQKAQLERMGVSGPSGSDLWAGAAVAKPQAKGQLAGGSLLMHCPCYGSEWGLWWRSQDLAPSPSGMAGLSFGTPTLDEPWLGVENDREELQTCLIKEQLSQLSLAGALDVPHAELVPTECQAVTAPVSSCDLGGRDLCGGCTGSSSACYALATDLPGGLEAVEAQEVDVNSFSWNLKELFFSDQTDQTSSNCSCATSELRETPSSLAVGSDPDVGSLQEQGSCVLDDRELLLLTGTCVDLGQGRRFRESCVGHDPTEPLEVCLVSSEHYAASDRESPGHVPSTLDAGPEDTCPSAEEPRLNVQVTSTPVIVMRGAAGLQREIQEGAYSGSCYHRDGLRLSIQFEVRRVELQGPTPLFCCWLVKDLLHSQRDSAARTRLFLASLPGSTHSTAAELTGPSLVEVLRARPWFEEPPKAVELEGLAACEGEYSQKYSTMSPLGSGAFGFVWTAVDKEKNKEVVVKFIKKEKVLEDCWIEDPKLGKVTLEIAILSRVEHANIIKVLDIFENQGFFQLVMEKHGSGLDLFAFIDRHPRLDEPLASYIFRQLVSAVGYLRLKDIIHRDIKDENIVIAEDFTIKLIDFGSAAYLERGKLFYTFCGTIEYCAPEVLMGNPYRGPELEMWSLGVTLYTLVFEENPFCELEETVEAAIHPPYLVSKELMSLVSGLLQPVPERRTTLEKLVTDPWVTQPVNLADYTWEEVFRVNKPESGVLSAASLEMGNRSLSDVAQAQELCGGPVPGEAPNGQGCLHPGDPRLLTS

SEQ ID NO: 57141 - protein, 1143 aa, Homo sapiens
MEDGGLTAFEEDQRCLSQSLPLPVSAEGPAAQTTAEPSRSFSSAHRHLSRRNGLSRLCQSRTALSEDRWSSYCLSSLAAQNICTSKLHCPAAPEHTDPSEPRGSVSCCSLLRGLSSGWSSPLLPAPVCNPNKAIFTVDAKTTEILVANDKACGLLGYSSQDLIGQKLTQFFLRSDSDVVEALSEEHMEADGHAAVVFGTVVDIISRSGEKIPVSVWMKRMRQERRLCCVVVLEPVERVSTWVAFQSDGTVTSCDSLFAHLHGYVSGEDVAGQHITDLIPSVQLPPSGQHIPKNLKIQRSVGRARDGTTFPLSLKLKSQPSSEEATTGEAAPVSGYRASVWVFCTISGLITLLPDGTIHGINHSFALTLFGYGKTELLGKNITFLIPGFYSYMDLAYNSSLQLPDLASCLDVGNESGCGERTLDPWQGQDPAEGGQDPRINVVLAGGHVVPRDEIRKLMESQDIFTGTQTELIAGGQLLSCLSPQPAPGVDNVPEGSLPVHGEQALPKDQQITALGREEPVAIESPGQDLLGESRSEPVDVKPFASCEDSEAPVPAEDGGSDAGMCGLCQKAQLERMGVSGPSGSDLWAGAAVAKPQAKGQLAGGSLLMHCPCYGSEWGLWWRSQDLAPSPSGMAGLSFGTPTLDEPWLGVENDREELQTCLIKEQLSQLSLAGALDVPHAELVPTECQAVTAPVSSCDLGGRDLCGGCTGSSSACYALATDLPGGLEAVEAQEVDVNSFSWNLKELFFSDQTDQTSSNCSCATSELRETPSSLAVGSDPDVGSLQEQGSCVLDDRELLLLTGTCVDLGQGRRFRESCVGHDPTEPLEVCLVSSEHYAASDRESPGHVPSTLDAGPEDTCPSAEEPRLNVQVTSTPVIVMRGAAGLQREIQEGAYSGSCYHRDGLRLSIQFEVRRVELQGPTPLFCCWLVKDLLHSQRDSAARTRLFLASLPGSTHSTAAELTGPSLVEVLRARPWFEEPPKAVELEGLAACEGEYSQKYSTMSPLGSGAFGFVWTAVDKEKNKEVVVKFIKKEKVLEDCWIEDPKLGKVTLEIAILSRVEHANIIKVLDIFENQGFFQLVMEKHGSGLDLFAFIDRHPRLDEPLASYIFRQVRAGQSRVSVNAGLGAWVRWLQRSVIHTRFSL

SEQ ID NO: 57142 - protein, 437 aa, Homo sapiens
MVQMMRQFLYRVLPEDSYKVTTGKLHVSLTRLTDGENVVVSEFTSKEELIEALYCSCFVPVYCGLIPPTYRGVRYIDGGFTGMQPCAFWTDAITISTFSGQQDICPRDCPAIFHDFRMFNCSFQFSLENIARMTHALFPPDLVILHDYYYRGYEDAVLYLRRLNAVYLNSSSKRVIFPRVEVYCQIELALGNECPERSQPSLRARQASLEGATQPHKEWVPKGDGRGSHGPPVSQPVQTLEFTCESPVSAPVSPLEQPPAQPLASSTPLSLSGMPPVSFPAVHKPPSSTPGSSLPTPPPGLSPLSPQQQVQPSGSPARSLHSQAPTSPRPSLGPSTVGAPQTLPRSSLSAFPAQPPVEELGQEQPQAVALLVSSKPKSAVPLVHVKETVSKPYVTESPAEDSNWVNKVFKKNKQKTSGTRKGFPRHSGSKKPSSKVQ

SEQ ID NO: 57143 - protein, 532 aa, Homo sapiens
MEEQVFKGDPDTPHSISFSGSGFLSFYQAGAVDALRDLAPRMLETAHRFAGTSAGAVIAALAICGIEMDEYLRVLNVGVAEVKKSFLGPLSPSCKMVQMMRQFLYRVLPEDSYKVTTGKLHVSLTRLTDGENVVVSEFTSKEELIEALYCSCFVPVYCGLIPPTYRGVRYIDGGFTGMQPCAFWTDAITISTFSGQQDICPRDCPAIFHDFRMFNCSFQFSLENIARMTHALFPPDLVILHDYYYRGYEDAVLYLRRLNAVYLNSSSKRVIFPRVEVYCQIELALGNECPERSQPSLRARQASLEGATQPHKEWVPKGDGRGSHGPPVSQPVQTLEFTCESPVSAPVSPLEQPPAQPLASSTPLSLSGMPPVSFPAVHKPPSSTPGSSLPTPPPGLSPLSPQQQVQPSGSPARSLHSQAPTSPRPSLGPSTVGAPQTLPRSSLSAFPAQPPVEELGQEQPQAVALLVSSKPKSAVPLVHVKETVSKPYVTESPAEDSNWVNKVFKKNKQKTSGTRKGFPRHSGSKKPSSKVQ

SEQ ID NO: 57144 - protein, 533 aa, Homo sapiens
MEEQVFKGDPDTPHSISFSGSGFLSFYQAGAVDALRDLAPRMLETAHRFAGTSAGAVIAALAICGIEMDEYLRVLNVGVAEVKKSFLGPLSPSCKMVQMMRQFLYRVLPEDSYKVTTGKLHVSLTRLTDGENVVVSEFTSKEELIEAALYCSCFVPVYCGLIPPTYRGVRYIDGGFTGMQPCAFWTDAITISTFSGQQDICPRDCPAIFHDFRMFNCSFQFSLENIARMTHALFPPDLVILHDYYYRGYEDAVLYLRRLNAVYLNSSSKRVIFPRVEVYCQIELALGNECPERSQPSLRARQASLEGATQPHKEWVPKGDGRGSHGPPVSQPVQTLEFTCESPVSAPVSPLEQPPAQPLASSTPLSLSGMPPVSFPAVHKPPSSTPGSSLPTPPPGLSPLSPQQQVQPSGSPARSLHSQAPTSPRPSLGPSTVGAPQTLPRSSLSAFPAQPPVEELGQEQPQAVALLVSSKPKSAVPLVHVKETVSKPYVTESPAEDSNWVNKVFKKNKQKTSGTRKGFPRHSGSKKPSSKVQ

SEQ ID NO: 57145 - protein, 446 aa, Homo sapiens
MVQMMRQFLYRVLPEDSYKVTTGKLHVSLTRLTDGENVVVSEFTSKEELIEALYCSCFVPVYCGLIPPTYRGVWAFLTLPPQRYIDGGFTGMQPCAFWTDAITISTFSGQQDICPRDCPAIFHDFRMFNCSFQFSLENIARMTHALFPPDLVILHDYYYRGYEDAVLYLRRLNAVYLNSSSKRVIFPRVEVYCQIELALGNECPERSQPSLRARQASLEGATQPHKEWVPKGDGRGSHGPPVSQPVQTLEFTCESPVSAPVSPLEQPPAQPLASSTPLSLSGMPPVSFPAVHKPPSSTPGSSLPTPPPGLSPLSPQQQVQPSGSPARSLHSQAPTSPRPSLGPSTVGAPQTLPRSSLSAFPAQPPVEELGQEQPQAVALLVSSKPKSAVPLVHVKETVSKPYVTESPAEDSNWVNKVFKKNKQKTSGTRKGFPRHSGSKKPSSKVQ

SEQ ID NO: 57146 - protein, 504 aa, Homo sapiens
MFPREKTWNISFAGCGFLGVYYVGVASCLREHAPFLVANATHIYGASAGALTATALVTGVCLGEAGAKFIEVSKEARKRFLGPLHPSFNLVKIIRSFLLKVLPADSHEHASGRLGISLTRVSDGENVIISHFNSKDELIQANVCSGFIPVYCGLIPPSLQGVRYVDGGISDNLPLYELKNTITVSPFSGESDICPQDSSTNIHELRVTNTSIQFNLRNLYRLSKALFPPEPLVLREMCKQGYRDGLRFLQRNGLLNRPNPLLALPPARPHGPEDKDQAVESAQAEDYSQLPGEDHILEHLPARLNEALLEACVEPTDLLTTLSNMLPVRLATAMMVPYTLPLESALSFTIRLLEWLPDVPEDIRWMKEQTGSICQYLVMRAKRKLGRHLPSRLPEQVELRRVQSLPSVPLSCAAYREALPGWMRNNLSLGDALAKWEECQRQLLLGLFCTNVAFPPEALRMRAPADPAPAPADPASPQHQLAGPAPLLSTPAPEARPVIGALGL

SEQ ID NO: 57147 - protein, 481 aa, Homo sapiens
MYDAERGWSLSFAGCGFLGFYHVGATRCLSEHAPHLLRDARMLFGASAGALHCVGVLSGIPLEQTLQVLSDLVRKARSRNIGIFHPSFNLSKFLRQGLCKCLPANVHQLISGKIGISLTRVSDGENVLVSDFRSKDEVVDALVCSCFIPFYSGLIPPSFRGVRYVDGGVSDNVPFIDAKTTITVSPFYGEYDICPKVKSTNFLHVDITKLSLRLCTGNLYLLSRAFVPPDLKVLGEICLRGYLDAFRFLEEKGICNRPQPGLKSSSEGMDPEVAMPSWANMSLDSSPESAALAVRLEGDELLDHLRLSILPWDESILDTLSPRLATALSEEMKDKGGYMSKICNLLPIRIMSYVMLPCTLPVESAIAIVQRLVTWLPDMPDDVLWLQWVTSQVFTRVLMCLLPASRSQMPVSSQQASPCTPEQDWPCWTPCSPKGCPAETKAEATPRSILRSSLNFFLGNKVPAGAEGLSTFPSFSLEKSL

SEQ ID NO: 57148 - protein, 429 aa, Homo sapiens
MGFLEEEGRWNLSFSGAGYLGAHHVGATECLRQRAPRLLQGARRIYGSSSGALNAVSIVCGKSVDFCCSHLLGMVGQLERLSLSILHPAYAPIEHVKQQLQDALPPDAHVLASQRLGISLTRWPDGRNFLVTDFATCDELIQALVCTLYFPFYCGLIPPEFRGERYIDGALSNNLPFADCPSTITVSPFHGTVDICPQSTSPNLHELNVFNFSFQISTENFFLGLICLIPPSLEVVADNCRQGYLDALRFLERRGLTKEPVLWTLVSKEPPAPADGNWDAGCDQRWKGGLSLNWKVPHVQVKDVPNFEQLSPELEAALKKACTRDPSRWARFWHSGPGQVLTYLLLPCTLPFEYIYFRSRRLVVWLPDVPADLWWMQGLLRNMALEVFSRTKAQLLGPISPPATRVLETSPLQPQIAPHREELGPTHQA

SEQ ID NO: 57149 - protein, 315 aa, Homo sapiens
MGFLEEEGRWNLSFSGAGYLGAHHVGATECLRQRAPRLLQGARRIYGSSSGALNAVSIVCGKSVDCPSTITVSPFHGTVDICPQSTSPNLHELNVFNFSFQISTENFFLGLICLIPPSLEVVADNCRQGYLDALRFLERRGLTKEPVLWTLVSKEPPAPADGNWDAGCDQRWKGGLSLNWKVPHVQVKDVPNFEQLSPELEAALKKACTRDPSRWARFWHSGPGQVLTYLLLPCTLPFEYIYFRSRRLVVWLPDVPADLWWMQGLLRNMALEVFSRTKAQLLGPISPPATRVLETSPLQPQIAPHREELGPTHQA

SEQ ID NO: 57150 - protein, 268 aa, Homo sapiens
MGFLEEEGRWNLSFSGAGYLGAHHVGATECLRQRAPRLLQGARRIYGSSSGALNAVSIVCGKSVDFCCSHLLGMVGQLERLSLSILHPAYAPIEHVKQQLQDALPPDAHVLASQRLGISLTRWPDGRNFLVTDFATCDELIQVVADNCRQGYLDALRFLERRGLTKEPVLWTLVSKEPPAPADGNWDAGCDQRWKGGLSLNWKVPHVQVKDVPNFEQLSPELEAALKKACTRDPSRWARFWHSGPGQVLTYLLLPCTLPFEYIYFRSR

SEQ ID NO: 57151 - protein, 315 aa, Homo sapiens; identical to SEQ ID NO: 57149

SEQ ID NO: 57152 - protein, 1327 aa, Homo sapiens
MEAPLQTGMVLGVMIGAGVAVVVTAVLILLVVRRLRVPKTPAPDGPRYRFRKRDKVLFYGRKIMRKVSQSTSSLVDTSVSATSRPRMRKKLKMLNIAKKILRIQKETPTLQRKEPPPAVLEADLTEGDLANSHLPSEVLYMLKNVRVLGHFEKPLFLELCRHMVFQRLGQGDYVFRPGQPDASIYVVQDGLLELCLPGPDGKECVVKEVVPGDSVNSLLSILDVITGHQHPQRTVSARAARDSTVLRLPVEAFSAVFTKYPESLVRVVQIIMVRLQRVTFLALHNYLGLTNELFSHEIQPLRLFPSPGLPTRTSPVRGSKRMVSTSATDEPRETPGRPPDPTGAPLPGPTGDPVKPTSLETPSAPLLSRCVSMPGDISGLQGGPRSDFDMAYERGRISVSLQEEASGGSLAAPARTPTQEPREQPAGACEYSYCEDESATGGCPFGPYQGRQTSSIFEAAKQELAKLMRIEDPSLLNSRVLLHHAKAGTIIARQGDQDVSLHFVLWGCLHVYQRMIDKAEDVCLFVAQPGELVGQLAVLTGEPLIFTLRAQRDCTFLRISKSDFYEIMRAQPSVVLSAAHTVAARMSPFVRQMDFAIDWTAVEAGRALYRQGDRSDCTYIVLNGRLRSVIQRGSGKKELVGEYGRGDLIGVVEALTRQPRATTVHAVRDTELAKLPEGTLGHIKRRYPQVVTRLIHLLSQKILGNLQQLQGPFPAGSGLGVPPHSELTNPASNLATVAILPVCAEVPMVAFTLELQHALQAIGPTLLLNSDIIRARLGASALDSIQEFRLSGWLAQQEDAHRIVLYQTDASLTPWTVRCLRQADCILIVGLGDQEPTLGQLEQMLENTAVRALKQLVLLHREEGAGPTRTVEWLNMRSWCSGHLHLRCPRRLFSRRSPAKLHELYEKVFSRRADRHSDFSRLARVLTGNTIALVLGGGGARGCSHIGVLKALEEAGVPVDLVGGTSIGSFIGALYAEERSASRTKQRAREWAKSMTSVLEPVLDLTYPVTSMFTGSAFNRSIHRVFQDKQIEDLWLPYFNVTTDITASAMRVHKDGSLWRYVRASMTLSGYLPPLCDPKDGHLLMDGGYINNLPADIARSMGAKTVIAIDVGSQDETDLSTYGDSLSGWWLLWKRLNPWADKVKVPDMAEIQSRLAYVSCVRQLEVVKSSSYCEYLRPPIDCFKTMDFGKFDQIYDVGYQYGKAVFGGWSRGNVIEKMLTDRRSTDLNESRRADVLAFPSSGFTDLAEIVSRIEPPTSYVSDGCADGEESDCLTEYEEDAGPDCSRDEGGSPEGASPSTASEMEEEKSILRQRRCLPQEPPGSATDA

SEQ ID NO: 57153 - protein, 1375 aa, Homo sapiens
MEAPLQTGMMGTSSHGLATNSSGAKVAERDGFQDVLAPGEGSAGRICGAQPVPFVPQVLGVMIGAGVAVVVTAVLILLVVRRLRVPKTPAPDGPRYRFRKRDKVLFYGRKIMRKVSQSTSSLVDTSVSATSRPRMRKKLKMLNIAKKILRIQKETPTLQRKEPPPAVLEADLTEGDLANSHLPSEVLYMLKNVRVLGHFEKPLFLELCRHMVFQRLGQGDYVFRPGQPDASIYVVQDGLLELCLPGPDGKECVVKEVVPGDSVNSLLSILDVITGHQHPQRTVSARAARDSTVLRLPVEAFSAVFTKYPESLVRVVQIIMVRLQRVTFLALHNYLGLTNELFSHEIQPLRLFPSPGLPTRTSPVRGSKRMVSTSATDEPRETPGRPPDPTGAPLPGPTGDPVKPTSLETPSAPLLSRCVSMPGDISGLQGGPRSDFDMAYERGRISVSLQEEASGGSLAAPARTPTQEPREQPAGACEYSYCEDESATGGCPFGPYQGRQTSSIFEAAKQELAKLMRIEDPSLLNSRVLLHHAKAGTIIARQGDQDVSLHFVLWGCLHVYQRMIDKAEDVCLFVAQPGELVGQLAVLTGEPLIFTLRAQRDCTFLRISKSDFYEIMRAQPSVVLSAAHTVAARMSPFVRQMDFAIDWTAVEAGRALYRQGDRSDCTYIVLNGRLRSVIQRGSGKKELVGEYGRGDLIGVVEALTRQPRATTVHAVRDTELAKLPEGTLGHIKRRYPQVVTRLIHLLSQKILGNLQQLQGPFPAGSGLGVPPHSELTNPASNLATVAILPVCAEVPMVAFTLELQHALQAIGPTLLLNSDIIRARLGASALDSIQEFRLSGWLAQQEDAHRIVLYQTDASLTPWTVRCLRQADCILIVGLGDQEPTLGQLEQMLENTAVRALKQLVLLHREEGAGPTRTVEWLNMRSWCSGHLHLRCPRRLFSRRSPAKLHELYEKVFSRRADRHSDFSRLARVLTGNTIALVLGGGGARGCSHIGVLKALEEAGVPVDLVGGTSIGSFIGALYAEERSASRTKQRAREWAKSMTSVLEPVLDLTYPVTSMFTGSAFNRSIHRVFQDKQIEDLWLPYFNVTTDITASAMRVHKDGSLWRYVRASMTLSGYLPPLCDPKDGHLLMDGGYINNLPADIARSMGAKTVIAIDVGSQDETDLSTYGDSLSGWWLLWKRLNPWADKVKVPDMAEIQSRLAYVSCVRQLEVVKSSSYCEYLRPPIDCFKTMDFGKFDQIYDVGYQYGKAVFGGWSRGNVIEKMLTDRRSTDLNESRRADVLAFPSSGFTDLAEIVSRIEPPTSYVSDGCADGEESDCLTEYEEDAGPDCSRDEGGSPEGASPSTASEMEEEKSILRQRRCLPQEPPGSATDA

SEQ ID NO: 57154 - protein, 1327 aa, Homo sapiens; identical to SEQ ID NO: 57152

SEQ ID NO: 57155 - protein, 456 aa, Homo sapiens
MRKVSQSTSSLVDTSVSATSRPRMRKKLKMLNIAKKILRIQKETPTLQRKEPPPAVLEADLTEGDLANSHLPSEVLYMLKNVRVLGHFEKPLFLELCRHMVFQRLGQGDYVFRPGQPDASIYVVQDGLLELCLPGPDGKECVVKEVVPGDSVNSLLSILDVITGHQHPQRTVSARAARDSTVLRLPVEAFSAVFTKYPESLVRVVQIIMVRLQRVTFLALHNYLGLTNELFSHEIQPLRLFPSPGLPTRTSPVRGSKRMVSTSATDEPRETPGRPPDPTGAPLPGPTGDPVKPTSLETPSAPLLSRCVSMPGDISGLQGGPRSDFDMAYERGRISVSLQEEASGGSLAAPARTPTQEPREQPAGACEYSYCEDESATGGCPFGPYQGRQTSSIFEAAKQELAKLMRIEDPSLLNSRVLLHHAKAGTIIARQGDQDVSGPHTGLTCPERGCSVALMT

SEQ ID NO: 57156 - protein, 1300 aa, Homo sapiens
MEAPLQTGMVLGVMIGAGVAVVVTAVLILLVVRRLRVPKTPAPDGPRYRFRKRDKVLFYGRKIMRKVSQSTSSLVDTSVSATSRPRMRKKLKMLNIAKKILRIQKETPTLQRKEPPPAVLEADLTEGDLANSHLPSEVLYMLKNVRVLGHFEKPLFLELCRHMVFQRLGQGDYVFRPGQPDASIYVVQDGLLELCLPGPDGKECVVKEVVPGDSVNSLLSILDVITGHQHPQRTVSARAARDSTVLRLPVEAFSAVFTKYPESLVRVVQIIMVRLQRVTFLALHNYLGLTNELFSHEIQPLRLFPSPGLPTRTSPVRGSKRMVSTSATDEPRETPGRPPDPTGAPLPGPTGDPVKPTSLETPSAPLLSRCVSMPGDISGLQGGPRSDFDMAYERGRISVSLQEEASGGSLAAPARTPTQEPREQPAGACEYSYCEDESATGGCPFGPYQGRQTSSIFEAAKQELAKLMRIEDVSLHFVLWGCLHVYQRMIDKAEDVCLFVAQPGELVGQLAVLTGEPLIFTLRAQRDCTFLRISKSDFYEIMRAQPSVVLSAAHTVAARMSPFVRQMDFAIDWTAVEAGRALYRQGDRSDCTYIVLNGRLRSVIQRGSGKKELVGEYGRGDLIGVVEALTRQPRATTVHAVRDTELAKLPEGTLGHIKRRYPQVVTRLIHLLSQKILGNLQQLQGPFPGSGLGVPPHSELTNPASNLATVAILPVCAEVPMVAFTLELQHALQAIGPTLLLNSDIIRARLGASALDSIQEFRLSGWLAQQEDAHRIVLYQTDASLTPWTVRCLRQADCILIVGLGDQEPTLGQLEQMLENTAVRALKQLVLLHREEGAGPTRTVEWLNMRSWCSGHLHLRCPRRLFSRRSPAKLHELYEKVFSRRADRHSDFSRLARVLTGNTIALVLGGGGARGCSHIGVLKALEEAGVPVDLVGGTSIGSFIGALYAEERSASRTKQRAREWAKSMTSVLEPVLDLTYPVTSMFTGSAFNRSIHRVFQDKQIEDLWLPYFNVTTDITASAMRVHKDGSLWRYVRASMTLSGYLPPLCDPKDGHLLMDGGYINNLPADIARSMGAKTVIAIDVGSQDETDLSTYGDSLSGWWLLWKRLNPWADKVKVPDMAEIQSRLAYVSCVRQLEVVKSSSYCEYLRPPIDCFKTMDFGKFDQIYDVGYQYGKAVFGGWSRGNVIEKMLTDRRSTDLNESRRADVLAFPSSGFTDLAEIVSRIEPPTSYVSDGCADGEESDCLTEYEEDAGPDCSRDEGGSPEGASPSTASEMEEEKSILRQRRCLPQEPPGSATDA

SEQ ID NO: 57157 - protein, 1317 aa, Homo sapiens
MEEEKDDSPQLTGIAVGALLALALVGVLILFMFRRLRQFRQAQPTPQYRFRKRDKVMFYGRKIMRKVTTLPNTLVENTALPRQRARKRTKVLSLAKRILRFKKEYPALQPKEPPPSLLEADLTEFDVKNSHLPSEVLYMLKNVRVLGHFEKPLFLELCKHIVFVQLQEGEHVFQPREPDPSICVVQDGRLEVCIQDTDGTEVVVKEVLAGDSVHSLLSILDIITGHAAPYKTVSVRAAIPSTILRLPAAAFHGVFEKYPETLVRVVQIIMVRLQRVTFLALHNYLGLTTELFNAESQAIPLVSVASVAAGKAKKQVFYGEEERLKKPPRLQESCDSDHGGGRPAAAGPLLKRSHSVPAPSIRKQILEELEKPGAGDPDPSAPQGGPGSATSDLGMACDRARVFLHSDEHPGSSVASKSRKSVMVAEIPSTVSQHSESHTDETLASRKSDAIFRAAKKDLLTLMKLEDSSLLDGRVALLHVPAGTVVSRQGDQDASILFVVSGLLHVYQRKIGSQEDTCLFLTRPGEMVGQLAVLTGEPLIFTVKANRDCSFLSISKAHFYEIMRKQPTVVLGVAHTVVKRMSSFVRQIDFALDWVEVEAGRAIYRQGDKSDCTYIMLSGRLRSVIRKDDGKKRLAGEYGRGDLVGVVETLTHQARATTVHAVRDSELAKLPAGALTSIKRRYPQVVTRLIHLLGEKILGSLQQGPVTGHQLGLPTEGSKWDLGNPAVNLSTVAVMPVSEEVPLTAFALELEHALSAIGPTLLLTSDNIKRRLGSAALDSVHEYRLSSWLGQQEDTHRIVLYQVDGTLTPWTQRCVRQADCILIVGLGDQEPTVGELERMLESTAVRAQKQLILLHREEGPAPARTVEWLNMRSWCSGHLHLCCPRRVFSRRSLPKLVEMYKHVFQRPPDRHSDFSRLARVLTGNAIALVLGGGGARGCAQVGVLKALAECGIPVDMVGGTSIGAFVGALYSEERNYSQMRIRAKQWAEGMTSLMKAALDLTYPITSMFSGAGFNSSIFSVFKDQQIEDLWIPYFAITTDITASAMRVHTDGSLWWYVRASMSLSGYMPPLCDPKDGHLLMDGGYINNLPADVARSMGAKVVIAIDVGSRDETDLTNYGDALSGWWLLWKRWNPLATKVKVLNMAEIQTRLAYVCCVRQLEVVKSSDYCEYLRPPIDSYSTLDFGKFNEICEVGYQHGRTVFDIWGRSGVLEKMLRDQQGPSKKPASAVLTCPNASFTDLAEIVSRIEPAKPAMVDDESDYQTEYEEELLDVPRDAYADFQSTSAQQGSDLEDESSLRHRHPSLAFPKLSEGSSDQDG

SEQ ID NO: 57158 - protein, 725 aa, Homo sapiens
MVRLQRVTFLALHNYLGLTTELFNAESQAIPLVSVASVAAGKAKKQVFYGEEERLKKPPRLQESCDSADHGGGRPAAAGPLLKRSHSVPAPSIRKQILEELEKPGAGDPDPSAPQGHQLGLPTEGSKWDLGNPAVNLSTVAVMPVSEEVPLTAFALELEHALSAIGPTLLLTSDNIKRRLGSAALDSVHEYRLSSWLGQQEDTHRIVLYQVDGTLTPWTQRCVRQADCILIVGLGDQEPTVGELERMLESTAVRAQKQLILLHREEGPAPARTVEWLNMRSWCSGHLHLCCPRRVFSRRSLPKLVEMYKHVFQRPPDRHSDFSRLARVLTGNAIALVLGGGGARGCAQVGVLKALAECGIPVDMVGGTSIGAFVGALYSEERNYSQMRIRAKQWAEGMTSLMKAALDLTYPITSMFSGAGFNSSIFSVFKDQQIEDLWIPYFAITTDITASAMRVHTDGSLWWYVRASMSLSGYMPPLCDPKDGHLLMDGGYINNLPADVARSMGAKVVIAIDVGSRDETDLTNYGDALSGWWLLWKRWNPLATKVKVLNMAEIQTRLAYVCCVRQLEVVKSSDYCEYLRPPIDSYSTLDFGKFNEICEVGYQHGRTVFDIWGRSGVLEKMLRDQQGPSKKPASAVLTCPNASFTDLAEIVSRIEPAKPAMVDDESDYQTEYEEELLDVPRDAYADFQSTSAQQGSDLEDESSLRHRHPSLAFPKLSEGSSDQDG

SEQ ID NO: 57159 - protein, 458 aa, Homo sapiens
MEEEKDDSPQADFCLGTALHSWGLWFTEEGSPSTMLTGIAVGALLALALVGVLILFMFRRLRQFRQAQPTPQYRFRKRDKVMFYGRKIMRKVTTLPNTLVENTALPRQRARKRTKVLSLAKRILRFKKEYPALQPKEPPPSLLEADLTEFDVKNSHLPSEVLYMLKNVRVLGHFEKPLFLELCKHIVFVQLQEGEHVFQPREPDPSICVVQDGRLEVCIQDTDGTEVVVKEVLAGDSVHSLLSILDIITGHAAPYKTVSVRAAIPSTILRLPAAAFHGVFEKYPETLVRVVQIIMVRLQRVTFLALHNYLGLTTELFNAESQAIPLVSVASVAAGKAKKQVFYGEEERLKKPPRLQESCDSDHGGGRPAAAGPLLKRSHSVPAPSIRKQILEELEKPGAGDPDPSAPQARVLCLLPQCLGGLPPTDTSVYSSASSDCCGCSMPVLCIMGHKPHVTVDT

SEQ ID NO: 57160 - protein, 1254 aa, Homo sapiens
MEEEKDDSPQLTGIAVGALLALALVGVLILFMFRRLRQFRQAQPTPQYRFRKRDKVMFYGRKIMRKVTTLPNTLVENTALPRQRARKRTKVLSLAKRILRFKKEYPALQPKEPPPSLLEADLTEFDVKNSHLPSEVLYMLKNVRVLGHFEKPLFLELCKHIVFVQLQEGEHVFQPREPDPSICVVQDGRLEVCIQDTDGTEVVVKEVLAGDSVHSLLSILDIITGHAAPYKTVSVRAAIPSTILRLPAAAFHGVFEKYPETLVRVVQIIMVRLQRVTFLALHNYLGLTTELFNAESQAIPLVSVASVAAGKAKKQVFYGEEERLKKPPRLQESCDSDHGGGRPAAAGPLLKRSHSVPAPSIRKQILEELEKPGAGDPDPSAPQGGPGSATSDLGMACDRARVFLHSDEHPGSSVASKSRKSVMVAEIPSTVSQHSESHTDETLASRKSDAIFRAAKKDLLTLMKLEDSSLLDGRVALLHVPAGTVVSRQGDQDASILFVVSGLLHVYQRKIGSQEDTCLFLTRPGEMVGQLAVLTGEPLIFTVKANRDCSFLSISKAHFYEIMRKQPTVVLGVAHTVVKRMSSFVRQIDFALDWVEVEAGRAIYRQGDKSDCTYIMLSGRLRSVIRKDDGKKRLAGEYGRGDLVGVVETLTHQARATTVHAVRDSELAKLPAGALTSIKRRYPQVVTRLIHLLGEKILGSLQQGPVTGHQLGLPTEGSKWDLGNPAVNLSTVAVMPVSEEVPLTAFALELEHALSAIGPTLLLTSDNIKRRLGSAALDSVHEYRLSSWLGQQEDTHRIVLYQVDGTLTPWTQRCVRQADCILIVGLGDQEPTVGELERMLESTAVRAQKQLILLHREEGPAPARTVEWLNMRSWCSGHLHLCCPRRVFSRRSLPKLVEMYKHVFQRPPDRHSDFSRLARVLTGNAIALVLGGGGARGCAQVGVLKALAECGIPVDMVGGTSIGAFVGALYSEERNYSQMRIRAKQWAEGMTSLMKAALDLTYPITSMFSGAGFNSSIFSVFKDQQIEDLWIPYFAITTDITASAMRVHTDGSLWWYVRASMSLSGYMPPLCDPKDGHLLMDGGYINNLPADVARSMGAKVVIAIDVGSRDETDLTNYGDALSGWWLLWKRWNPLATKVKVLNMAEIQTRLAYVCCVRQLEVVKSSDYCEYLRPPIDSYSTLDFGKFNEICVPDESDYQTEYEEELLDVPRDAYADFQSTSAQQGSDLEDESSLRHRHPSLAFPKLSEGSSDQDG

SEQ ID NO: 57161 - protein, 923 aa, Homo sapiens
MACDRARVFLHSDEHPGSSVASKSRKSVMVAEIPSTVSQHSESHTDETLASRKSDAIFRAAKKDLLTLMKLEDSSLLDGRVALLHVPAGTVVSRQGDQDASILFVVSGLLHVYQRKIGSQEDTCLFLTRPGEMVGQLAVLTGEPLIFTVKANRDCSFLSISKAHFYEIMRKQPTVVLGVAHTVVKRMSSFVRQIDFALDWVEVEAGRAIYRQGDKSDCTYIMLSGRLRSVIRKDDGKKRLAGEYGRGDLVGVVETLTHQARATTVHAVRDSELAKLPAGALTSIKRRYPQVVTRLIHLLGEKILGSLQQGPVTGHQLGLPTEGSKWDLGNPAVNLSTVAVMPVSEEVPLTAFALELEHALSAIGPTLLLTSDNIKRRLGSAALDSVHEYRLSSWLGQQEDTHRIVLYQVDGTLTPWTQRCVRQADCILIVGLGDQEPTVGELERMLESTAVRAQKQLILLHREEGPAPARTVEWLNMRSWCSGHLHLCCPRRVFSRRSLPKLVEMYKHVFQRPPDRHSDFSRLARVLTGNAIALVLGGGGARGCAQVGVLKALAECGIPVDMVGGTSIGAFVGALYSEERNYSQMRIRAKQWAEGMTSLMKAALDLTYPITSMFSGAGFNSSIFSVFKDQQIEDLWIPYFAITTDITASAMRVHTDGSLWWYVRASMSLSGYMPPLCDPKDGHLLMDGGYINNLPADVARSMGAKVVIAIDVGSRDETDLTNYGDALSGWWLLWKRWNPLATKVKVLNMAEIQTRLAYVCCVRQLEVVKSSDYCEYLRPPIDSYSTLDFGKFNEICEVGYQHGRTVFDIWGRSGVLEKMLRDQQGPSKKPASAVLTCPNASFTDLAEIVSRIEPAKPAMVDDESDYQTEYEEELLDVPRDAYADFQSTSAQQGSDLEDESSLRHRHPSLAFPKLSEGSSDQDG

SEQ ID NO: 57162 - protein, 1342 aa, Homo sapiens
MEEEKDDSPQADFCLGTALHSWGLWFTEEGSPSTMLTGIAVGALLALALVGVLILFMFRRLRQFRQAQPTPQYRFRKRDKVMFYGRKIMRKVTTLPNTLVENTALPRQRARKRTKVLSLAKRILRFKKEYPALQPKEPPPSLLEADLTEFDVKNSHLPSEVLYMLKNVRVLGHFEKPLFLELCKHIVFVQLQEGEHVFQPREPDPSICVVQDGRLEVCIQDTDGTEVVVKEVLAGDSVHSLLSILDIITGHAAPYKTVSVRAAIPSTILRLPAAAFHGVFEKYPETLVRVVQIIMVRLQRVTFLALHNYLGLTTELFNAESQAIPLVSVASVAAGKAKKQVFYGEEERLKKPPRLQESCDSDHGGGRPAAAGPLLKRSHSVPAPSIRKQILEELEKPGAGDPDPSAPQGGPGSATSDLGMACDRARVFLHSDEHPGSSVASKSRKSVMVAEIPSTVSQHSESHTDETLASRKSDAIFRAAKKDLLTLMKLEDSSLLDGRVALLHVPAGTVVSRQGDQDASILFVVSGLLHVYQRKIGSQEDTCLFLTRPGEMVGQLAVLTGEPLIFTVKANRDCSFLSISKAHFYEIMRKQPTVVLGVAHTVVKRMSSFVRQIDFALDWVEVEAGRAIYRQGDKSDCTYIMLSGRLRSVIRKDDGKKRLAGEYGRGDLVGVVETLTHQARATTVHAVRDSELAKLPAGALTSIKRRYPQVVTRLIHLLGEKILGSLQQGPVTGHQLGLPTEGSKWDLGNPAVNLSTVAVMPVSEEVPLTAFALELEHALSAIGPTLLLTSDNIKRRLGSAALDSVHEYRLSSWLGQQEDTHRIVLYQVDGTLTPWTQRCVRQADCILIVGLGDQEPTVGELERMLESTAVRAQKQLILLHREEGPAPARTVEWLNMRSWCSGHLHLCCPRRVFSRRSLPKLVEMYKHVFQRPPDRHSDFSRLARVLTGNAIALVLGGGGARGCAQVGVLKALAECGIPVDMVGGTSIGAFVGALYSEERNYSQMRIRAKQWAEGMTSLMKAALDLTYPITSMFSGAGFNSSIFSVFKDQQIEDLWIPYFAITTDITASAMRVHTDGSLWWYVRASMSLSGYMPPLCDPKDGHLLMDGGYINNLPADVARSMGAKVVIAIDVGSRDETDLTNYGDALSGWWLLWKRWNPLATKVKVLNMAEIQTRLAYVCCVRQLEVVKSSDYCEYLRPPIDSYSTLDFGKFNEICEVGYQHGRTVFDIWGRSGVLEKMLRDQQGPSKKPASAVLTCPNASFTDLAEIVSRIEPAKPAMVDDESDYQTEYEEELLDVPRDAYADFQSTSAQQGSDLEDESSLRHRHPSLAFPKLSEGSSDQDG

SEQ ID NO: 57163 - protein, 1281 aa, Homo sapiens
MLTGIAVGALLALALVGVLILFMFRRLRQFRQAQPTPQYRFRKRDKVMFYGRKIMRKVTTLPNTLVENTALPRQRARKRTKVLSLAKRILRFKKEYPALQPKEPPPSLLEADLTEFDVKNSHLPSEVLYMLKNVRVLGHFEKPLFLELCKHIVFVQLQEGEHVFQPREPDPSICVVQDGRLEVCIQDTDGTEVVVKEVLAGDSVHSLLSILDIITGHAAPYKTVSVRAAIPSTILRLPAAAFHGVFEKYPETLVRVVQIIMVRLQRVTFLALHNYLGLTTELFNAESQAIPLVSVASVAAGKAKKQVFYGEEERLKKPPRLQESCDSDHGGGRPAAAGPLLKRSHSVPAPSIRKQILEELEKPGAGDPDPSAPQGGPGSATSDLGMACDRARVFLHSDEHPGSSVASKSRKSVMVAEIPSTVSQHSESHTDETLASRKSDAIFRAAKKDLLTLMKLEDSSLLDGRVALLHVPAGTVVSRQGDQDASILFVVSGLLHVYQRKIGSQEDTCLFLTRPGEMVGQLAVLTGEPLIFTVKANRDCSFLSISKAHFYEIMRKQPTVVLGVAHTVVKRMSSFVRQIDFALDWVEVEAGRAIYRQGDKSDCTYIMLSGRLRSVIRKDDGKKRLAGEYGRGDLVGVVETLTHQARATTVHAVRDSELAKLPAGALTSIKRRYPQVVTRLIHLLGEKILGSLQQGPVTGHQLGLPTEGSKWDLGNPAVNLSTVAVMPVSEEVPLTAFALELEHALSAIGPTLLLTSDNIKRRLGSAALDSVHEYRLSSWLGQQEDTHRIVLYQVDGTLTPWTQRCVRQADCILIVGLGDQEPTVGELERMLESTAVRAQKQLILLHREEGPAPARTVEWLNMRSWCSGHLHLCCPRRVFSRRSLPKLVEMYKHVFQRPPDRHSDFSRLARVLTGNAIALVLGGGGARGCAQVGVLKALAECGIPVDMVGGTSIGAFVGALYSEERNYSQMRIRAKQWAEGMTSLMKAALDLTYPITSMFSGAGFNSSIFSVFKDQQIEDLWIPYFAITTDITASAMRVHTDGSLWWYVRASMSLSGYMPPLCDPKDGHLLMDGGYINNLPADVARSMGAKVVIAIDVGSRDETDLTNYGDALSGWWLLWKRWNPLATKVKVLNMAEIQTRLAYVCCVRQLEVVKSSDYCEYLRPPIDSYSTLDFGKFNEICEVGYQHGRTVFDIWGRSGVLEKMLRDQQGPSKKPASAVLTCPNASFTDLAEIVSRIEPAKPAMVDDESDYQTEYEEELLDVPRDAYADFQSTSAQQGSDL

SEQ ID NO: 57164 - protein, 782 aa, Homo sapiens
MSINLTVDIYIYLLSNARSVCGKQRSKQLYFLFSPKHYWRISHISLQRGFHTNIIRCKWTKSEAHSCSKHCYSPSNHGLHIGILKLSTSAPKGLTKVNICMSRIKSTLNSVSKAVFGNQNEMISRLAQFKPSSQILRKVSDSGWLKQKNIKQAIKSLKKYSDKSAEKSPFPEEKSHIIDKEEDIGKRSLFHYTSSITTKFGDSFYFLSNHINSYFKRKEKMSQQKENEHFRDKSELEDKKVEEGKLRSPDPGILAYKPGSESVHTVDKPTSPSAIPDVLQVSTKQSIANFLSRPTEGVQALVGGYIGGLVPKLKYDSKSQSEEQEEPAKTDQAVSKDRNAEEKKRLSLQREKIIARVSIDNRTRALVQALRRTTDPKLCITRVEELTFHLLEFPEGKGVAVKERIIPYLLRLRQIKDETLQAAVREILALIGYVDPVKGRGIRILSIDGGGTRGVVALQTLRKLVELTQKPVHQLFDYICGVSTGAILAFMLGLFHMPLDECEELYRKLGSDVFSQNVIVGTVKMSWSHAFYDSQTWENILKDRMGSALMIETARNPTCPKVAAVSTIVNRGITPKAFVFRNYGHFPGINSHYLGGCQYKMWQAIRASSAAPGYFAEYALGNDLHQDGGLLLNNPSALAMHECKCLWPDVPLECIVSLGTGRYESDVRNTVTYTSLKTKLSNVINSATDTEEVHIMLDGLLPPDTYFRFNPVMCENIPLDESRNEKLDQLQLEGLKYIERNEQKMKKVAKILSQEKTTLQKINDWIKLKTDMYEGLPFFSKL

SEQ ID NO: 57165 - protein, 720 aa, Homo sapiens
MSINLTVDIYIYLLSNARSVCGKQRSKQLYFLFSPKHYWRISHISLQRGFHTNIIRCKWTKSEAHSCSKHCYSPSNHGLHIGILKLSTSAPKGLTKVNICMSRIKSTLNSVSKAVFGNQNEMISRLAQFKPSSQILRKVSDSGWLKQKNIKQAIKSLKKYSDKSAEKSPFPEEKSHIIDKEEDIGKRSLFHYTSSITTKFGDSFYFLSNHINSYFKRKEKMSQQKENEHFRDKSELEDKKVEEGKLRSPDPGILAYKPGSESVHTVDKPTSPSAIPDVLQVSTKQSIANFLSRPTEGVQALVGGYIGGLVPKLKYDSKSQSEEQEEPAKTDQAVSKDRNAEEKKRLSLQREKIIARVSIDNRTRALVQALRRTTDPKLCITRVEELTFHLLEFPEGKGVAVKERIIPYLLRLRQIKDETLQAAVREILALIGYVDPVKGRGIRILSIDGGGTRGVVALQTLRKLVELTQKPVHQLFDYICGVSTGAILAFMLGLFHMPLDECEELYRKLGSDVFSQNVIVGTVKMSWSHAFYDSQTWENILKDRMGSALMIETARNPTCPKVRKDGGLLLNNPSALAMHECKCLWPDVPLECIVSLGTGRYESDVRNTVTYTSLKTKLSNVINSATDTEEVHIMLDGLLPPDTYFRFNPVMCENIPLDESRNEKLDQLQLEGLKYIERNEQKMKKVAKILSQEKTTLQKINDWIKLKTDMYEGLPFFSKL

SEQ ID NO: 57166 - protein, 55 aa, Homo sapiens
MSINLTVDIYIYLLSNARSVCGKQRSKQLYFLFSPKHYWRISHISLQRGFHTNII

SEQ ID NO: 57167 - protein, 782 aa, Homo sapiens; identical to SEQ ID NO: 57164

SEQ ID NO: 57168 - protein, 193 aa, Homo sapiens
MSINLTVDIYIYLLSNARSVCGKQRSKQLYFLFSPKHYWRISHISLQRGFHTNIIRCKWTKSEAHSCSKHCYSPSNHGLHIGILKLSTSAPKGLTKVNICMSRIKSTLNSVSKAVFGNQNEMISRLAQFKPSSQILRKVSDSGWLKQKNIKQAIKSLKKYSDKSAEKSPFPEEKSHIIDKEEDIGKRSLFHYT

SEQ ID NO: 57169 - protein, 782 aa, Homo sapiens; identical to SEQ ID NO: 57164

SEQ ID NO: 57170 - protein, 717 aa, Homo sapiens
MSINLTVDIYIYLLSNARSVCGKQRSKQLYFLFSPKHYWRISHISLQRGFHTNIIRCKWTKSEAHSCSKHCYSPSNHGLHIGILKLSTSAPKGLTKVNICMSRIKSTLNSVSKAVFGNQNEMISRLAQFKPSSQILRKVSDSGWLKQKNIKQAIKSLKKYSDKSAEKSPFPEEKSHIIDKEEDIGKRSLFHYTSSITTKFGDSFYFLSNHINSYFKRKEKMSQQKENEHFRDKSELEDKKVEEGKLRSPDPGILAYKPGSESVHTVDKPTSPSAIPDVLQVSTKQSIANFLSRPTEGVQALVGGYIGGLVPKLKYDSKSQSEEQEEPAKTDQAVSKDRNAEEKKRLSLQREKIIARVSIDNRTRALVQALRRTTDPKLCITRVEELTFHLLEFPEGKGVAVKERIIPYLLRLRQIKDETLQAAVREILALIGYVDPVKGRGIRILSIDGGGTRGVVALQTLRKLVELTQKPVHQLFDYICGVSTGAILAFMLGLFHMPLDECEELYRKLGSDVFSQNVIVGTVKMSWSHAFYDSQTWENILKDRMGSALMIETARNPTCPKDGGLLLNNPSALAMHECKCLWPDVPLECIVSLGTGRYESDVRNTVTYTSLKTKLSNVINSATDTEEVHIMLDGLLPPDTYFRFNPVMCENIPLDESRNEKLDQLQLEGLKYIERNEQKMKKVAKILSQEKTTLQKINDWIKLKTDMYEGLPFFSKL

SEQ ID NO: 57171 - protein, 682 aa, Homo sapiens
MSRIKSTLNSVSKAVFGNQNEMISRLAQFKPSSQILRKVSDSGWLKQKNIKQAIKSLKKYSDKSAEKSPFPEEKSHIIDKEEDIGKRSLFHYTSSITTKFGDSFYFLSNHINSYFKRKEKMSQQKENEHFRDKSELEDKKVEEGKLRSPDPGILAYKPGSESVHTVDKPTSPSAIPDVLQVSTKQSIANFLSRPTEGVQALVGGYIGGLVPKLKYDSKSQSEEQEEPAKTDQAVSKDRNAEEKKRLSLQREKIIARVSIDNRTRALVQALRRTTDPKLCITRVEELTFHLLEFPEGKGVAVKERIIPYLLRLRQIKDETLQAAVREILALIGYVDPVKGRGIRILSIDGGGTRGVVALQTLRKLVELTQKPVHQLFDYICGVSTGAILAFMLGLFHMPLDECEELYRKLGSDVFSQNVIVGTVKMSWSHAFYDSQTWENILKDRMGSALMIETARNPTCPKVAAVSTIVNRGITPKAFVFRNYGHFPGINSHYLGGCQYKMWQAIRASSAAPGYFAEYALGNDLHQDGGLLLNNPSALAMHECKCLWPDVPLECIVSLGTGRYESDVRNTVTYTSLKTKLSNVINSATDTEEVHIMLDGLLPPDTYFRFNPVMCENIPLDESRNEKLDQLQLEGLKYIERNEQKMKKVAKILSQEKTTLQKINDWIKLKTDMYEGLPFFSKL

SEQ ID NO: 57172 - protein, 1203 aa, Homo sapiens
MTRSPPLRELPPSYTPPARTAAPQILAGSLKAPLWLRAYFQGLLFSLGCGIQRHCGKVLFLGLLAFGALALGLRMAIIETNLEQLWVEVGSRVSQELHYTKEKLGEEAAYTSQMLIQTARQEGENILTPEALGLHLQAALTASKVQVSLYGKSWDLNKICYKSGVPLIENGMIERMIEKLFPCVILTPLDCFWEGAKLQGGSAYLPGRPDIQWTNLDPEQLLEELGPFASLEGFRELLDKAQVGQAYVGRPCLHPDDLHCPPSAPNHHSRQAPNVAHELSGGCHGFSHKFMHWQEELLLGGMARDPQGELLRAEALQSTFLLMSPRQLYEHFRGDYQTHDIGWSEEQASTVLQAWQRRFVQLAQEALPENASQQIHAFSSTTLDDILHAFSEVSAARVVGGYLLMLAYACVTMLRWDCAQSQGSVGLAGVLLVALAVASGLGLCALLGITFNAATTQVLPFLALGIGVDDVFLLAHAFTEALPGTPLQERMGECLQRTGTSVVLTSINNMAAFLMAALVPIPALRAFSLQAAIVVGCTFVAVMLVFPAILSLDLRRRHCQRLDVLCCFSSPCSAQVIQILPQELGDGTVPVGIAHLTATVQAFTHCEASSQHVVTILPPQAHLVPPPSDPLGSELFSPGGSTRDLLGQEEETRQKAACKSLPCARWNLAHFARYQFAPLLLQSHAKAIVLVLFGALLGLSLYGATLVQDGLALTDVVPRGTKEHAFLSAQLRYFSLYEVALVTQGGFDYAHSQRALFDLHQRFSSLKAVLPPPATQAPRTWLHYYRNWLQGIQAAFDQDWASGRITRHSYRNGSEDGALAYKLLIQTGDAQEPLDFSQLTTRKLVDREGLIPPELFYMGLTVWVSSDPLGLAASQANFYPPPPEWLHDKYDTTGENLRIPPAQPLEFAQFPFLLRGLQKTADFVEAIEGARAACAEAGQAGVHAYPSGSPFLFWEQYLGLRRCFLLAVCILLVCTFLVCALLLLNPWTAGLIVLVLAMMTVELFGIMGFLGIKLSAIPVVILVASVGIGVEFTVHVALGFLTTQGSRNLRAAHALEHTFAPVTDGAISTLLGLLMLAGSHFDFIVRYFFAALTVLTLLGLLHGLVLLPVLLSILGPPPEVIQMYKESPEILSPPAPQGGGLRWGASSSLPQSFARVTTSMTVAIHPPPLPGAYIHPAPDEPPWSPAATSSGNLSSRGPGPATG

SEQ ID NO: 57173 - protein, 88 aa, Homo sapiens
  VARIANT 1: note = MOD_RES - Any amino acid
XFDFIVRYFFAALTVLTLLGLLHGLVLLPVLLSILGPPPEVIQMYKESPEILSPPAPQGGGLRVGSLQVNISYWKELLWCQDLRPEEI

SEQ ID NO: 57174 - protein, 1146 aa, Homo sapiens
MTRSPPLRELPPSYTPPARTAAPQILAGSLKAPLWLRAYFQGLLFSLGCGIQRHCGKVLFLGLLAFGALALGLRMAIIETNLEQLWVEVGSRVSQELHYTKEKLGEEAAYTSQMLIQTARQEGENILTPEALGLHLQAALTASKVQVSLYGKSWDLNKICYKSGVPLIENGMIERMIEKLFPCVILTPLDCFWEGAKLQGGSAYLPGRPDIQWTNLDPEQLLEELGPFASLEGFRELLDKAQVGQAYVGRPCLHPDDLHCPPSAPNHHSRQAPNVAHELSGGCHGFSHKFMHWQEELLLGGMARDPQGELLRAEALQSTFLLMSPRQLYEHFRGDYQTHDIGWSEEQASTVLQAWQRRFVQLAQEALPENASQQIHAFSSTTLDDILHAFSEVSAARVVGGYLLMLAYACVTMLRWDCAQSQGSVGLAGVLLVALAVASGLGLCALLGITFNAATTQVLPFLALGIGVDDVFLLAHAFTEALPGTPLQERMGECLQRTGTSVVLTSINNMAAFLMAALVPIPALRAFSLQAAIVVGCTFVAVMLVFPAILSLDLRRRHCQRLDVLCCFSSPCSAQVIQILPQELGDGTVPVGIAHLTATVQAFTHCEASSQHVVTILPPQAHLVPPPSDPLGSELFSPGGSTRDLLGQEEETRQKAACKSLPCARWNLAHFARYQFAPLLLQSHAKAIVLVLFGALLGLSLYGATLVQDGLALTDVVPRGTKEHAFLSAQLRYFSLYEVALVTQGGFDYAHSQRALFDLHQRFSSLKAVLPPPATQAPRTWLHYYRNWLQGIQAAFDQDWASGRITRHSYRNGSEDGALAYKLLIQTGDAQEPLDFSQLTTRKLVDREGLIPPELFYMGLTVWVSSDPLGLAASQANFYPPPPEWLHDKYDTTGENLRIPPAQPLEFAQFPFLLRGLQKTADFVEAIEGARAACAEAGQAGVHAYPSGSPFLFWEQYLGLRRCFLLAVCILLVCTFLVCALLLLNPWTAGLIVLVLAMMTVELFGIMGFLGIKLSAIPVVILVASVGIGVEFTVHVALGFLTTQGSRNLRAAHALEHTFAPVTDGAISTLLGLLMLAGSHFDFIVRYFFAALTVLTLLGLLHGLVLLPVLLSILGPPPEVIQMYKESPEILSPPAPQGGGLRPEEI

SEQ ID NO: 57175 - protein, 888 aa, Homo sapiens
MLRQVLHRGLRTCFSRLGHFIASHPVFFASAPVLISILLGASFSRYQVEESVEHLLAPQHSLAKIERNLVNSLFPVNRSKHRLYSDLQTPGRYGRVIVTSFQKANMLDQHHTDLILKLHAAVTKIQVPRPGFNYTFAHICILNNDKTCIVDDIVHVLEELKNARATNRTNFAITYPITHLKDGRAVYNGHQLGGVTVHSKDRVKSAEAIQLTYYLQSINSLNDMVAERWESSFCDTVRLFQKSNSKVKMYPYTSSSLREDFQKTSRVSERYLVTSLILVVTMAILCCSMQDCVRSKPWLGLLGLVTISLATLTAAGIINLTGGKYNSTFLGVPFVMLGHGLYGTFEMLSSWRKTREDQHVKERTAAVYADSMLSFSLTTAMYLVTFGIGASPFTNIEAARIFCCNSCIAIFFNYLYVLSFYGSSLVFTGYIENNYQHSIFCRKVPKPEALQEKPAWYRFLLTARFSEDTAEGEEANTYESHLLVCFLKRYYCDWITNTYVKPFVVLFYLIYISFALMGYLQVSEGSDLSNIVATATQTIEYTTAQQKYFSNYSPVIGFYIYESIEYWNTSVQEDVLEYTKGFVRISWFESYLNYLRKLNVSTGLPKKNFTDMLRNSFLKAPQFSHFQEDIIFSKKYNDEVDVVASRMFLVAKTMETNREELYDLLETLRRLSVTSKVKFIVFNPSFVYMDRYASSLGAPLHNSCISALFLLFFSAFLVADSLINVWITLTVVSVEFGVIGFMTLWKVELDCISVLCLIYGINYTIDNCAPMLSTFVLGKDFTRTKWVKNALEVHGVAILQSYLCYIVGLIPLAAVPSNLTCTLFRCLFLIAFVTFFHCFAILPVILTFLPPSKKKRKEKKNPENREEIECVEMVDIDSTRVVDQITTV

SEQ ID NO: 57176 - protein, 1392 aa, Homo sapiens
MDTEDDPLLQDVWLEEEQEEEEATGETFLGAQKPGPQPGAGGQCCWRHWPLASRPPASGFWSTLGWAFTNPCCAGLVLFLGCSIPMALSAFMFLYYPPLDIDISYNAFEIRNHEASQRFDALTLALKSQFGSWGRNRRDLADFTSETLQRLISEQLQQLHLGNRSRQASRAPRVIPAASLGGPGPYRDTSAAQKPTANRSGRLRRETPPLEDLAANQSEDPRNQRLSKNGRYQPSIPPHAAVAANQSRARRGASRWDYSRAYVSANTQTHAHWRIELIFLARGDAERNIFTSERLVTIHEIERKIMDHPGFREFCWKPHEVLKDLPLGSYSYCSPPSSLMTYFFPTERGGKIYYDGMGQDLADIRGSLELAMTHPEFYWYVDEGLSADNLKSSLLRSEILFGAPLPNYYSVDDRWEEQRAKFQSFVVTYVAMLAKQSTSKVQVLYGGTDLFDYEVRRTFNNDMLLAFISSSCIAALVYILTSCSVFLSFFGIASIGLSCLVALFLYHVVFGIQYLGILNGVAAFVIVGIGVDDVFVFINTYRQATHLEDPQLRMIHTVQTAGKATFFTSLTTAAAYAANVFSQIPAVHDFGLFMSLIVSCCWLAVLVTMPAALGLWSLYLAPLESSCQTSCHQNCSRKTSLHFPGDVFAAPEQVGGSPAQGPIPYLDDDIPLLEVEEEPVSLELGDVSLVSVSPEGLQPASNTGSRGHLIVQLQELLHHWVLWSAVKSRWVIVGLFVSILILSLVFASRLRPASRAPLLFRPDTNIQVLLDLKYNLSAEGISCITCSGLFQEKPHSLQNNIRTSLEKKRRGSGVPWASRPEATLQDFPGTVYISKVKSQGHPAVYRLSLNASLPAPWQAVSPGDGEVPSFQVYRAPFGNFTKKLTACMSTVGLLQAASPSRKWMLTTLACDAKRGWKFDFSFYVATKEQQHTRKLYFAQSHKPPFHGRVCMAPPGCLLSSSPDGPTKGFFFVPSEKVPKARLSATFGFNPCVNTGCGKPAVRPLVDTGAMVFVVFGIIGVNRTRQVDNHVIGDPGSVVYDSSFDLFKEIGHLCHLCKAIAANSELVKPGGAQCLPSGYSISSFLQMLHPECKELPEPNLLPGQLSHGAVGVREGRVQWISMAFESTTYKGKSSFQTYSDYLRWESFLQQQLQALPEGSVLRRGFQTCEHWKQIFMEIVGVQSALCGLVLSLLICVAAVAVFTTHILLLLPVLLSILGIVCLVVTIMYWSGWEMGAVEAISLSILVGSSVDYCVHLVEGYLLAGENLPPHQAEDARTQRQWRTLEAVRHVGVAIVSSALTTVIATVPLFFCIIAPFAKFGKIVALNTGVSILYTLTVSTALLGIMAPSSFTRTRTSFLKALGAVLLAGALGLGACLVLLQSGYKIPLPAGASL

SEQ ID NO: 57177 - protein, 1392 aa, Homo sapiens
MDTEDDPLLQDVWLEEEQEEEEATGETFLGAQKPGPQPGAGGQCCWRHWPLASRPPASGFWSTLGWAFTNPCCAGLVLFLGCSIPMALSAFMFLYYPPLDIDISYNAFEIRNHEASQRFDALTLALKSQFGSWGRNRRDLADFTSETLQRLISEQLQQLHLGNRSRQASRAPRVIPAASLGGPGPYRDTSAAQKPTANRSGRLRRETPPLEDLAANQSEDPRNQRLSKNGRYQPSIPPHAAVAANQSRARRGASRWDYSRAYVSANTQTHAHWRIELIFLARGDAERNIFTSERLVTIHEIERKIMDHPGFREFCWKPHEVLKDLPLGSYSYCSPPSSLMTYFFPTERGGKIYYDGMGQDLADIRGSLELAMTHPEFYWYVDEGLSADNLKSSLLRSEILFGAPLPNYYSVDDRWEEQRAKFQSFVVTYVAMLAKQSTSKVQVLYGGTDLFDYEVRRTFNNDMLLAFISSSCIAALVYILTSCSVFLSFFGIASIGLSCLVALFLYHVVFGIQYLGILNGVAAFVIVGIGVDDVFVFINTYRQATHLEDPQLRMIHTVQTAGKATFFTSLTTAAAYAANVFSQIPAVHDFGLFMSLIVSCCWLAVLVTMPAALGLWSLYLAPLESSCQTSCHQNCSRKTSLHFPGDVFAAPEQVGGSPAQGPIPYLDDDIPLLEVEEEPVSLELGDVSLVSVSPEGLQPASNTGSRGHLIVQLQELLHHWVLWSAVKSRWVIVGLFVSILILSLVFASRLRPASRAPLLFRPDTNIQVLLDLKYNLSAEGISCITCSGLFQEKPHSLQNNIRTSLEKKRRGSGVPWASRPEATLQDFPGTVYISKVKSQGHPAVYRLSLNASLPAPWQAVSPGDGEVPSFQVYRAPFGNFTKKLTACMSTVGLLQAASPSRKWMLTTLACDAKRGWKFDFSFYVATKEQQHTRKLYFAQSHKPPFHGRVCMAPPGCLLSSSPDGPTKGFFFVPSEKVPKARLSATFGFNPCVNTGCGKPAVRPLVDTGAMVFVVFGIIGVNRTRQVDNHVIGDPGSVVYDSSFDLFKEIGHLCHLCKAIAANSELVKPGGAQCLPSGYSISSFLQMLHPECKELPEPNLLPGQLSHGAVGVREGRVQWISMAFESTTYKGKSSFQTYSDYLRWESFLQQQLQALPEGSVLRRGFQTCEHWKQIFMEIAGVQSALCGLVLSLLICVAAVAVFTTHILLLLPVLLSILGIVCLVVTIMYWSGWEMGAVEAISLSILVGSSVDYCVHLVEGYLLAGENLPPHQAEDARTQRQWRTLEAVRHVGVAIVSSALTTVIATVPLFFCIIAPFAKFGKIVALNTGVSILYTLTVSTALLGIMAPSSFTRTRTSFLKALGAVLLAGALGLGACLVLLQSGYKIPLPAGASL

SEQ ID NO: 57178 - protein, 767 aa, Homo sapiens
MPWVEPKPRPGPEQKPKLTKPDSATGPQWYQESQESESEGKQPPPGPLAPPKSPEPSGPLASEQDAPLPEGDDAPPRPSMLDDAPRLPLELDDAPLPEEETPEPTAICRHRHRCHTDCLEGLLSRTFQWLGWQVGAHPWIFLLAPLMLTAALGTGFLYLPKDEEEDLEEHYTPVGSPAKAERRFVQGHFTTNDSYRFSASRRSTEANFVSLLVVSYSDSLLDPATFAEVSKLDGAVQDLRVAREKGSQIQYQQVCARYRALCVPPNPILYAWQVNKTLNLSSISFPAYNHGRHPLYLTGFFGGYILGGSLGMGQLLLRAKAMRLLYYLKTEDPEYDVQSKQWLTHLLDQFTNIKNILALKKIEVVHFTSLSRQLEFEATSVTVIPVFHLAYILIILFAVTSCFRFDCIRNKMCVAAFGVISAFLAVVSGFGLLLHIGVPFVIIVANSPFLILGVGVDDMFIMISAWHKTNLADDIRERMSNVYSKAAVSITITTITNILALYTGIMSSFRSVQCFCIYTGMTLLFCYFYNITCFGAFMALDGKREVVCLCWLKKADPKWPSFKKFCCFPFGSVPDEHGTDIHPISLFFRDYFGPFLTRSESKYFVVFIYVLYIISSIYGCFHVQEGLDLRNLASDDSYITPYFNVEENYFSDYGPRVMVIVTKKVDYWDKDVRQKLENCTKIFEKNVYVDKNLTEFWLDAYVQYLKGNSQDPNEKNTFMNNIPDFLSNFPNFQHDINISSSNEIISSRGFIQTTDVSSSAKKKILLF

SEQ ID NO: 57179 - protein, 325 aa, Homo sapiens
MTERRRDELSEEINNLREKVMKQSEENNNLQSQVQKLTEENTTLREQVEPTPEDEDDDIELRGAAAAAAPPPPIEEECPEDLPEKFDGNPDMLAPFMAQCQIFMEKSTRDFSVDRVRVCFVTSMMTGRAARWASAKLERSHYLMHNYPAFMMEMKHVFEDPQRREVAKRKIRRLRQGMGSVIDYSNAFQMIAQDLDWNEPALIDQYHEGLSDHIQEELSHLEVAKSLSALIGQCIHIERRLARAAAARKPRSPPRALVLPHIASHHQVDPTEPVGGARMRLTQEEKERRRKLNLCLYCGTGGHYADNCPAKASKSSPAGNSPAPL

SEQ ID NO: 57180 - protein, 325 aa, Homo sapiens; identical to SEQ ID NO: 57179

SEQ ID NO: 57181 - protein, 436 aa, Homo sapiens
MMATQTLSIDSYQDGQQMQVVTELKTEQDPNCSEPDAEGVSPPPVESQTPMDVDKQAIYRHPLFPLLALLFEKCEQSTQGSEGTTSASFDVDIENFVRKQEKEGKPFFCEDPETDNLMVKAIQVLRIHLLELEKVNELCKDFCSRYIACLKTKMNSETLLSGEPGSPYSPVQSQQIQSAITGTISPQGIVVPASALQQGNVAMATVAGGTVYQPVTVVTPQGQVVTQTLSPGTIRIQNSQLQLQLNQDLSILHQDDGSSKNKRGVLPKHATNVMRSWLFQHIGHPYPTEDEKKQIAAQTNLTLLQVNNWFINARRRILQPMLDSSCSETPKTKKKTAQNRPVQRFWPDSIASGVAQPPPSELTMSEGAVVTITTPVNMNVDSLQSLSSDGATLAVQQVMMAGQSEDESVDSTEEDAGALAPAHISGLVLENSDSLQ

SEQ ID NO: 57182 - protein, 319 aa, Homo sapiens
MVKAIQVLRIHLLELEKVNELCKDFCSRYIACLKTKMNSETLLSGEPGSPYSPVQSQQIQSAITGTISPQGIVVPASALQQGNVAMATVAGGTVYQPVTVVTPQGQVVTQTLSPGTIRIQNSQLQLQLNQDLSILHQDDGSSKNKRGVLPKHATNVMRSWLFQHIGHPYPTEDEKKQIAAQTNLTLLQVNNWFINARRRILQPMLDSSCSETPKTKKKTAQNRPVQRFWPDSIASGVAQPPPSELTMSEGAVVTITTPVNMNVDSLQSLSSDGATLAVQQVMMAGQSEDESVDSTEEDAGALAPAHISGLVLENSDSLQ

SEQ ID NO: 57183 - protein, 419 aa, Homo sapiens
MMATQTLSIDSYQDGQQMQVVTELKTEQDPNCSEPDAEGVSPPPVESQTPMDVDKQAIYRHPLFPLLALLFEKCEQSTQGSEGTTSASFDVDIENFVRKQEKEGKPFFCEDPETDNLMVKAIQVLRIHLLELEKVNELCKDFCSRYIACLKTKMNSETLLSGEPGSPYSPVQSQQIQSAITGTISPQGIVVPASALQQGNVAMATVAGGTVYQPVTVVTPQGQVVTQTLSPGTIRIQNSQLQLQLNQDLSILHQDDGSSKNKRGVLPKHATNVMRSWLFQHIGHPYPTEDEKKQIAAQTNLTLLQVNNWFINARRRILQPMLDSSCSETPKTKKKTAQNRPVQRFWPDSIASGVAQPPPSELTMSEGTGGRPRPDMVDHGVGIMNKRPGSGLLAPPRPAENDILKPPLRSSFVNCLLIF

SEQ ID NO: 57184 - protein, 472 aa, Homo sapiens
MMQHASPAPALTMMATQNVPPPPYQDSPQMTATAQPPSKAQAVHISAPSAAASTPVPSAPIDPQAQLEADKRAVYRHPLFPLLTLLFEKCEQATQGSECITSASFDVDIENFVHQQEQEHKPFFSDDPELDNLMVKAIQVLRIHLLELEKVNELCKDFCNRYITCLKTKMHSDNLLRNDLGGPYSPNQPSINLHSQDLLQNSPNSMSGVSNNPQGIVVPASALQQGNIAMTTVNSQVVSGGALYQPVTMVTSQGQVVTQAIPQGAIQIQNTQVNLDLTSLLDNEDKKSKNKRGVLPKHATNIMRSWLFQHLMHPYPTEDEKRQIAAQTNLTLLQVNNWFINARRRILQPMLDASNPDPAPKAKKIKSQHRPTQRFWPNSIAAGVLQQQGGAPGTNPDGSINLDNLQSLSSDSATMAMQQAMMAAHDDSLDGTEEEDEDEMEEEEEEELEEEVDELQTTNVSDLGLEHSDSLE

SEQ ID NO: 57185 - protein, 39 aa, Homo sapiens
MMQHASPAPALTMMATQNVPPPPYQDSPQMTATAQPPSK

SEQ ID NO: 57186 - protein, 443 aa, Homo sapiens
MTATAQPPSKAQAVHISAPSAAASTPVPSAPIDPQAQLEADKRAVYRHPLFPLLTLLFEKCEQATQGSECITSASFDVDIENFVHQQEQEHKPFFSDDPELDNLMVKAIQVLRIHLLELEKVNELCKDFCNRYITCLKTKMHSDNLLRNDLGGPYSPNQPSINLHSQDLLQNSPNSMSGVSNNPQGIVVPASALQQGNIAMTTVNSQVVSGGALYQPVTMVTSQGQVVTQAIPQGAIQIQNTQVNLDLTSLLDNEDKKSKNKRGVLPKHATNIMRSWLFQHLMHPYPTEDEKRQIAAQTNLTLLQVNNWFINARRRILQPMLDASNPDPAPKAKKIKSQHRPTQRFWPNSIAAGVLQQQGGAPGTNPDGSINLDNLQSLSSDSATMAMQQAMMAAHDDSLDGTEEEDEDEMEEEEEEELEEEVDELQTTNVSDLGLEHSDSLE

SEQ ID NO: 57187 - protein, 443 aa, Homo sapiens; identical to SEQ ID NO: 57186

SEQ ID NO: 57188 - protein, 40 aa, Homo sapiens
MMQHASPAPALTMMATQNVPPPPYQDSPQMTATAQPPSKA

SEQ ID NO: 57189 - protein, 306 aa, Homo sapiens
MMATQNVPPPPYQDSPQMTATAQPPSKAQAVHISAPSAAASTPVPSAPIDPQAQLEADKRAVYRHPLFPLLTLLFEKCEQATQGSECITSASFDVDIENFVHQQEQEHKPFFSDDPELDNLMVKAIQVLRIHLLELEKVNELCKDFCNRYITCLKTKMHSDNLLRNDLGGPYSPNQPSINLHSQDLLQNSPNSMSGVSNNPQGIVVPASALQQGNIAMTTVNSQVVSGGALYQPVTMVTSQGQVVTQAIPQGAIQIQNTQVNLDLTSLLDNEDKKSKNKRGVLPKHATNIMRSWLFQHHAPLPHGG

SEQ ID NO: 57190 - protein, 408 aa, Homo sapiens
MSRPHPTRTAHRHPLFPLLTLLFEKCEQATQGSECITSASFDVDIENFVHQQEQEHKPFFSDDPELDNLMVKAIQVLRIHLLELEKVNELCKDFCNRYITCLKTKMHSDNLLRNDLGGPYSPNQPSINLHSQDLLQNSPNSMSGVSNNPQGIVVPASALQQGNIAMTTVNSQVVSGGALYQPVTMVTSQGQVVTQAIPQGAIQIQNTQVNLDLTSLLDNEDKKSKNKRGVLPKHATNIMRSWLFQHLMHPYPTEDEKRQIAAQTNLTLLQVNNWFINARRRILQPMLDASNPDPAPKAKKIKSQHRPTQRFWPNSIAAGVLQQQGGAPGTNPDGSINLDNLQSLSSDSATMAMQQAMMAAHDDSLDGTEEEDEDEMEEEEEEELEEEVDELQTTNVSDLGLEHSDSLE

SEQ ID NO: 57191 - protein, 98 aa, Homo sapiens
MMQHASPAPALTMMATQNVPPPPYQDSPQMTATAQPPSKAQAVHISAPSAAASTPVPSAPIDPQAQLEADKRAVYRHPLFPLLTLLFEKCEQATQGSE

SEQ ID NO: 57192 - protein, 77 aa, Homo sapiens
MMQHASPAPALTMMATQNVPPPPYQDSPQMTATAQPPSKAQAVHISAPSAAASTPVPSAPIDPQAQLEADKRAVYRW

SEQ ID NO: 57193 - protein, 329 aa, Homo sapiens
MTRDFKPGDLIFAKMKGYPHWPARVDEVPDGAVKPPTNKLPIFFFGTHETAFLGPKDIFPYSENKEKYGKPNKRKGFNEGLWEIDNNPKVKFSSQQAATKQSNASSDVEVEEKETSVSKEDTDHEEKASNEDVTKAVDITTPKAARRGRKRKAEKQVETEEAGVVTTATASVNLKVSPKRGRPAATEVKIPKPRGRPKMVKQPCPSESDIITEEDKSKKKGQEEKQPKKQPKKDEEGQKEEDKPRKEPDKKEGKKEVESKRKNLAKTGVTSTSDSEEEGDDQEGEKKRKGGRNFQTAHRRNMLKGQHEKEAADRKRKQEEQMETEHFAL

SEQ ID NO: 57194 - protein, 333 aa, Homo sapiens
MTRDFKPGDLIFAKMKGYPHWPARVDEVPDGAVKPPTNKLPIFFFGTHETAFLGPKDIFPYSENKEKYGKPNKRKGFNEGLWEIDNNPKVKFSSQQAATKQSNASSDVEVEEKETSVSKEDTDHEEKASNEDVTKAVDITTPKAARRGRKRKAEKQVETEEAGVVTTATASVNLKVSPKRGRPAATEVKIPKPRGRPKMVKQPCPSESDIITEEDKSKKKGQEEKQPKKQPKKDEEGQKEEDKPRKEPDKKEGKKEVESKRKNLAKTGVTSTSDSEEEGDDQEGEKKRKGGRNFQTAHRRNMLKGQHEKEAADRKRKQEEQMETEHQTTCNLQ

SEQ ID NO: 57195 - protein, 530 aa, Homo sapiens
MTRDFKPGDLIFAKMKGYPHWPARVDEVPDGAVKPPTNKLPIFFFGTHETAFLGPKDIFPYSENKEKYGKPNKRKGFNEGLWEIDNNPKVKFSSQQAATKQSNASSDVEVEEKETSVSKEDTDHEEKASNEDVTKAVDITTPKAARRGRKRKAEKQVETEEAGVVTTATASVNLKVSPKRGRPAATEVKIPKPRGRPKMVKQPCPSESDIITEEDKSKKKGQEEKQPKKQPKKDEEGQKEEDKPRKEPDKKEGKKEVESKRKNLAKTGVTSTSDSEEEGDDQEGEKKRKGGRNFQTAHRRNMLKGQHEKEAADRKRKQEEQMETEQQNKDEGKKPEVKKVEKKRETSMDSRLQRIHAEIKNSLKIDNLDVNRCIEALDELASLQVTMQQAQKHTEMITTLKKIRRFKVSQVIMEKSTMLYNKFKNMFLVGEGDSVITQVLNKSLAEQRQHEEANKTKDQGKKGPNKKLEKEQTGSKTLNGGSDAQDGNQPQHNGESNEDSKDNHEASTKKKPSSEERETEISLKDSTLDN

SEQ ID NO: 57196 - protein, 530 aa, Homo sapiens; identical to SEQ ID NO: 57195

SEQ ID NO: 57197 - protein, 333 aa, Homo sapiens; identical to SEQ ID NO: 57194

SEQ ID NO: 57198 - protein, 453 aa, Homo sapiens
MAHITINQYLQQVYEAIDSRDGASCAELVSFKHPHVANPRLQMASPEEKCQQVLEPPYDEMFAAHLRCTYAVGNHDFIEAYKCQTVIVQYPLSFMAAVPHRTHAVDYLGLETRKHWASCSFLQLERNDSVLEQKLVSALSLGTSFLRAFQAHKEENWALPVMYAVALDLRVFANNADQQLVKKGKSKVGDMLEKAAELLMSCFRVCASDTRAGIEDSKKWGMLFLVNQLFKIYFKINKLHLCKPLIRAIDSSNLKDDYSTAQRVTYKYYVGRKAMFDSDFKQAEEYLSFAFEHCHRSSQKNKRMILIYLLPVKMLLGHMPTVELLKKYHLMQFAEVTRAVSEGNLLLLHEALAKHEAFFIRCGIFLILEKLKIITYRNLFKKVYLLLKTHQLSLDAFLVALKFMQVEDVDIDEVQCILANLIYMGHVKGYISHQHQKLVVSKQNPFPPLSTVC

SEQ ID NO: 57199 - protein, 399 aa, Homo sapiens
MRLTDVVQQLVYEAIDSRDGASCAELVSFKHPHVANPRLQMASPEEKCQQVLEPPYDEMFAAHLRCTYAVGNHDFIEAYKCQTVIVQYTSFLRAFQAHKEENWALPVMYAVALDLRVFANNADQQLVKKGKSKVGDMLEKAAELLMSCFRVCASDTRAGIEDSKKWGMLFLVNQLFKIYFKINKLHLCKPLIRAIDSSNLKDDYSTAQRVTYKYYVGRKAMFDSDFKQAEEYLSFAFEHCHRSSQKNKRMILIYLLPVKMLLGHMPTVELLKKYHLMQFAEVTRAVSEGNLLLLHEALAKHEAFFIRCGIFLILEKLKIITYRNLFKKVYLLLKTHQLSLDAFLVALKFMQVEDVDIDEVQCILANLIYMGHVKGYISHQHQKLVVSKQNPFPPLSTVC

SEQ ID NO: 57200 - protein, 399 aa, Homo sapiens
MAHITINQYLQQVYEAIDSRDGASCAELVSFKHPHVANPRLQMASPEEKCQQVLEPPYDEMFAAHLRCTYAVGNHDFIEAYKCQTVIVQSFLRAFQAHKEENWALPVMYAVALDLRVFANNADQQLVKKGKSKVGDMLEKAAELLMSCFRVCASDTRAGIEDSKKWGMLFLVNQLFKIYFKINKLHLCKPLIRAIDSSNLKDDYSTAQRVTYKYYVGRKAMFDSDFKQAEEYLSFAFEHCHRSSQKNKRMILIYLLPVKMLLGHMPTVELLKKYHLMQFAEVTRAVSEGNLLLLHEALAKHEAFFIRCGIFLILEKLKIITYRNLFKKVYLLLKTHQLSLDAFLVALKFMQVEDVDIDEVQCILANLIYMGHVKGYISHQHQKLVVSKQNPFPPLSTVC

SEQ ID NO: 57201 - protein, 376 aa, Homo sapiens
MAHITINQYLQQVYEAIDSRDGASCAELVSFKHPHVANPRLQMASPEEKCQQVLEPPYDEMFAAHLRCTYAVGNHDFIEAYKCQTVIVQYPLSFMAAVADQQLVKKGKSKVGDMLEKAAELLMSCFRVCASDTRAGIEDSKKWGMLFLVNQLFKIYFKINKLHLCKPLIRAIDSSNLKDDYSTAQRVTYKYYVGRKAMFDSDFKQAEEYLSFAFEHCHRSSQKNKRMILIYLLPVKMLLGHMPTVELLKKYHLMQFAEVTRAVSEGNLLLLHEALAKHEAFFIRCGIFLILEKLKIITYRNLFKKVYLLLKTHQLSLDAFLVALKFMQVEDVDIDEVQCILANLIYMGHVKGYISHQHQKLVVSKQNPFPPLSTVC

SEQ ID NO: 57202 - protein, 399 aa, Homo sapiens; identical to SEQ ID NO: 57200

SEQ ID NO: 57203 - protein, 399 aa, Homo sapiens; identical to SEQ ID NO: 57200

SEQ ID NO: 57204 - protein, 397 aa, Homo sapiens
MRLTDVVQQLVYEAIDSRDGASCAELVSFKHPHVANPRLQMASPEEKCQQVLEPPYDEMFAAHLRCTYAVGNHDFIEAYKCQTVIVQSFLRAFQAHKEENWALPVMYAVALDLRVFANNADQQLVKKGKSKVGDMLEKAAELLMSCFRVCASDTRAGIEDSKKWGMLFLVNQLFKIYFKINKLHLCKPLIRAIDSSNLKDDYSTAQRVTYKYYVGRKAMFDSDFKQAEEYLSFAFEHCHRSSQKNKRMILIYLLPVKMLLGHMPTVELLKKYHLMQFAEVTRAVSEGNLLLLHEALAKHEAFFIRCGIFLILEKLKIITYRNLFKKVYLLLKTHQLSLDAFLVALKFMQVEDVDIDEVQCILANLIYMGHVKGYISHQHQKLVVSKQNPFPPLSTVC

SEQ ID NO: 57205 - protein, 181 aa, Homo sapiens
MPKGGRKGGHKGRARQYTSPEEIDAQLQAEKQKAREEEEQKEGGDGAAGDPKKEKKSLDSDESEDEEDDYQQKRKGVEGLIDIENPNRVAQTTKKVTQLDLDGPKELSRREREEIEKQKAKERYMKMHLAGKTEQAKADLARLAIIRKQREEAARKKEEERKAKDDATLSGKRMQSLSLNK

SEQ ID NO: 57206 - protein, 341 aa, Homo sapiens
MVSSQPKYDLIREVGRGSYGVVYEAVIRKTSARVAVKKIRCHAPENVELALREFWALSSIKSQHPNVIHLEECILQKDGMVQKMSHGSNSSLYLQLVETSLKGEIAFDPRSAYYLWFVMDFCDGGDMNEYLLSRKPNRKTNTSFMLQLSSALAFLHKNQIIHRDLKPDNILISQTRLDTSDLEPTLKVADFGLSKVCSASGQNPEEPVSVNKCFLSTACGTDFYMAPEVWEGHYTAKADIFALGIIIWAMLERITFIDTETKKELLGSYVKQGTEIVPVGEALLENPKMELLIPVKKKSMNGRMKQLIKEMLAANPQDRPDAFELELRLVQIAFKDSSWET

SEQ ID NO: 57207 - protein, 341 aa, Homo sapiens; identical to SEQ ID NO: 57206

SEQ ID NO: 57208 - protein, 191 aa, Homo sapiens
MVSSQPKYDLIREVGRGSYGVVYEAVIRKTSARVAVKKIRCHAPENVELALREFWALSSIKSQHPNVIHLEECILQKDGMVQKMSHGSNSSLYLQLVETSLKGEIAFDPRSAYYLWFVMDFCDGGDMNEYLLSRKPNRKTNTSFMLQLSSALAFLHKNQIIHRDLKPDNILISQTRLDTSDLEPTLKVADF

SEQ ID NO: 57209 - protein, 1337 aa, Homo sapiens
MDFTAQPKPATALCGVVSADGKIAYPPGVKEITDKITTDEMIKRLKMVVKTFMDMDQDSEDEKQQYLPLALHLASEFFLRNPNKDVRLLVACCLADIFRIYAPEAPYTSHDKLKDIFLFITRQLKGLEDTKSPQFNRYFYLLENLAWVKSYNICFELEDCNEIFIQLFRTLFSVINNSHNKKVQMHMLDLMSSIIMEGDGVTQELLDSILINLIPAHKNLNKQSFDLAKVLLKRTVQTIEACIANFFNQVLVLGRSSVSDLSEHVFDLIQELFAIDPHLLLSVMPQLEFKLKSNDGEERLAVVRLLAKLFGSKDSDLATQNRPLWQCFLGRFNDIHVPVRLESVKFASHCLMNHPDLAKDLTEYLKVRSHDPEEAIRHDVIVTIITAAKRDLALVNDQLLGFVRERTLDKRWRVRKEAMMGLAQLYKKYCLHGEAGKEAAEKVSWIKDKLLHIYYQNSIDDKLLVEKIFAQYLVPHNLETEERMKCLYYLYASLDPNAVKALNEMWKCQNMLRSHVRELLDLHKQPTSEANCSAMFGKLMTIAKNLPDPGKAQDFVKKFNQVLGDDEKLRSQLELLISPTCSCKQADICVREIARKLANPKQPTNPFLEMVKFLLERIAPVHIDSEAISALVKLMNKSIEGTADDEEEGVSPDTAIRSGLELLKVLSFTHPTSFHSAETYESLLQCLRMEDDKVAEAAIQIFRNTGHKIETDLPQIRSTLIPILHQKAKRGTPHQAKQAVHCIHAIFTNKEVQLAQIFEPLSRSLNADVPEQLITPLVSLGHISMLAPDQFASPMKSVVANFIVKDLLMNDRSTGEKNGKLWSPDEEVSPEVLAKVQAIKLLVRWLLGMKNNQSKSANSTLRLLSAMLVSEGDLTEQKRISKSDMSRLRLAAGSAIMKLAQEPCYHEIITPEQFQLCALVINDECYQVRQIFAQKLHKALVKLLLPLEYMAIFALCAKDPVKERRAHARQCLLKNISIRREYIKQNPMATEKLLSLLPEYVVPYMIHLLAHDPDFTRSQDVDQLRDIKECLWFMLEVLMTKNENNSHAFMKKMAENIKLTRDAQSPDESKTNEKLYTVCDVALCVINSKSALCNADSPKDPVLPMKFFTQPEKDFCNDKSYISEETRVLLLTGKPKPAGVLGAVNKPLSATGRKPYVRSTGTETGSNINVNSELNPSTGNRSREQSSEAAETGVSENEENPVRIISVTPVKNIDPVKNKEINSDQATQGNISSDRGKKRTVTAAGAENIQQKTDEKVDESGPPAPSKPRRGRRPKSESQGNATKNDDLNKPINKGRKRAAVGQESPGGLEAGNAKAPKLQDLAKKAAPAERQIDLQR

SEQ ID NO: 57210 - protein, 600 aa, Homo sapiens
MDFTAQPKPATALCGVVSADGKIAYPPGVKEITDKITTDEMIKRLKMVVKTFMDMDQDSEDEKQQYLPLALHLASEFFLRNPNKDVRLLVACCLADIFRIYAPEAPYTSHDKLKDIFLFITRQLKGLEDTKSPQFNRYFYLLENLAWVKSYNICFELEDCNEIFIQLFRTLFSVINNSHNKKVQMHMLDLMSSIIMEGDGVTQELLDSILINLIPAHKNLNKQSFDLAKVLLKRTVQTIEACIANFFNQVLVLGRSSVSDLSEHVFDLIQELFAIDPHLLLSVMPQLEFKLKSNDGEERLAVVRLLAKLFGSKDSDLATQNRPLWQCFLGRFNDIHVPVRLESVKFASHCLMNHPDLAKDLTEYLKVRSHDPEEAIRHDVIVTIITAAKRDLALVNDQLLGFVRERTLDKRWRVRKEAMMGLAQLYKKYCLHGEAGKEAAEKVSWIKDKLLHIYYQNSIDDKLLVEKIFAQYLVPHNLETEERMKCLYYLYASLDPNAVKALNEMWKCQNMLRSHVRELLDLHKQPTSEANCSAMFGKLMTIAKNLPDPGKAQDFVKKFNQVLGDDEKLRSQLELLISPTCSCKQADICVVSKSYFTLFL

SEQ ID NO: 57211 - protein, 329 aa, Homo sapiens
MTTQQIDLQGPGPWGFRLVGGKDFEQPLAISRVTPGSKAALANLCIGDVITAIDGENTSNMTHLEAQNRIKGCTDNLTLTVARSEHKVWSPLVTEEGKRHPYKMNLASEPQEVLHIGSAHNRSAMPFTASPASSTTARVITNQYNNPAGLYSSENISNFNNALESKTAASGVEANSRPLDHAQPPSSLVIDKESEVYKMLQEKQELNEPPKQSTSFLVLQEILESEEKGDPNKPSGFRSVKAPVTKVAASIGNAQKLPMCDKCGTGIVGVFVKLRDRHRHPECYVCTDCGTNLKQKGHFFVEDQIYCEKHARERVTPPEGYEVVTVFPK

SEQ ID NO: 57212 - protein, 366 aa, Homo sapiens
MALTVDVAGPAPWGFRITGGRDFHTPIMVTKVAERGKAKDADLRPGDIIVAINGESAEGMLHAEAQSKIRQSPSPLRLQLDRSQATSPGQTNGDSSLEVLATRFQGSVRTYTESQSSLRSSYSSPTSLSPRAGSPFSPPPSSSSLTGEAAISRSFQSLACSPGLPAADRLSYSGRPGSRQAGLGRAGDSAVLVLPPSPGPRSSRPSMDSEGGSLLLDEDSEVFKMLQENREGRAAPRQSSSFRLLQEALEAEERGGTPAFLPSSLSPQSSLPASRALATPPKLHTCEKCSTSIANQAVRIQEGRYRHPGCYTCADCGLNLKMRGHFWEDACAMEGMRLSLEALEGMVEGAKRRDRRKTRRPIQPSW

SEQ ID NO: 57213 - protein, 602 aa, Homo sapiens
MRGGRARPAWESFMGLPPRSSAKWGAGQSLDRLCCAPGSRGLAGAPGRMRAPPAGRSQPAGGPGDSLPHPPGGLGPGGSAWARRAEAAASRARGGGRGGPGITWAEAGPGAPGGLSPESGRRQRERWRLPAFPPSRAWAPSRTGERQPGERAHLRLSARPALPGAGLLSAPLSARNPGLVRGPAPWSLASAGAPPRAALSPAGALLLQPPARRVLCPRSEGGSRTGRAGPSGWAPPRGARSAESTDRLKGMALTVDVAGPAPWGFRITGGRDFHTPIMVTKVAERGKAKDADLRPGDIIVAINGESAEGMLHAEAQSKIRQSPSPLRLQLDRSQATSPGQTNGDSSLEVLATRFQGSVRTYTESQSSLRSSYSSPTSLSPRAGSPFSPPPSSSSLTGEAAISRSFQSLACSPGLPAADRLSYSGRPGSRQAGLGRAGDSAVLVLPPSPGPRSSRPSMDSEGGSLLLDEDSEVFKMLQENREGRAAPRQSSSFRLLQEALEAEERGGTPAFLPSSLSPQSSLPASRALATPPKLHTCEKCSTSIANQAVRIQEGRYRHPGCYTCADCGLNLKMRGHFWVGDELYCEKHARQRYSAPATLSSRA

SEQ ID NO: 57214 - protein, 278 aa, Homo sapiens
MALTVDVAGPAPWGFRITGGRDFHTPIMVTKVAERGKAKDADLRPGDIIVAINGESAEGMLHAEAQSKIRQSPSPLRLQLDRSQATSPGQTNGDSSLEVLATRFQGSVRTYTESQSSLRSSYSSPTSLSPRAGSPFSPPPSSSSLTGEAAISRSFQSLACSPGLPAADRLSYSGRPGSRQAGLGRAGDSAVLVLPPSPGPRSSRPSMDSEGGSLLLDEDSEVFKMLQENREGRAAPRQSSSFRLLQEALEAEERGTRLCASRRAGTATPAATPVPTVG

SEQ ID NO: 57215 - protein, 224 aa, Homo sapiens
MALTVDVAGPAPWGFRITGGRDFHTPIMVTKVAERGKAKDADLRPGDIIVAINGESAEGMLHAEAQSKIRQSPSPLRLQLDRSQATSPGQTNGDSSLEVLATRFQGSVRTYTESQSSLRSSYSSPTSLSPRAGSPFSPPPSSSSLTGEAAISRSRPRPRWRLGGAGAAAFPGPSFLQAQHGLGRGKPPPGRGLGSLQDAAGKSRGTGGPPTVQLLSALAGSPGG

SEQ ID NO: 57216 - protein, 352 aa, Homo sapiens
MALTVDVAGPAPWGFRITGGRDFHTPIMVTKVAERGKAKDADLRPGDIIVAINGESAEGMLHAEAQSKIRQSPSPLRLQLDRSQATSPGQTNGDSSLEVLATRFQGSVRTYTESQSSLRSSYSSPTSLSPRAGSPFSPPPSSSSLTGEAAISRSFQSLACSPGLPAADRLSYSGRPGSRQAGLGRAGDSAVLVLPPSPGPRSSRPSMDSEGGSLLLDEDSEVFKMLQENREGRAAPRQSSSFRLLQEALEAEERGGTPAFLPSSLSPQSSLPASRALATPPKLHTCEKCSTSIANQAVRIQEGRYRHPGCYTCADCGLNLKMRGHFWVGDELYCEKHARQRYSAPATLSSRA

SEQ ID NO: 57217 - protein, 352 aa, Homo sapiens; identical to SEQ ID NO: 57216

SEQ ID NO: 57218 - protein, 278 aa, Homo sapiens; identical to SEQ ID NO: 57214

SEQ ID NO: 57219 - protein, 352 aa, Homo sapiens; identical to SEQ ID NO: 57216

SEQ ID NO: 57220 - protein, 519 aa, Homo sapiens
MTSTFNPRECKLSKQEGQNYGFFLRIEKDTEGHLVRVVEKCSPAEKAGLQDGDRVLRINGVFVDKEEHMQVVDLVRKSGNSVTLLVLDGDSYEKAVKTRVDLKELGQSQKEQGLSDNILSPVMNGGVQTWTQPRLCYLVKEGGSYGFSLKTVQGKKGVYMTDITPQGVAMRAGVLADDHLIEVNGENVEDASHEEVVEKVKKSGSRVMFLLVDKETDKRHVEQKIQFKRETASLKLLPHQPRIVEMKKGSNGYGFYLRAGSEQKGQIIKDIDSGSPAEEAGLKNNDLVVAVNGESVETLDHDSVVEMIRKGGDQTSLLVVDKETDNMYRLAHFSPFLYYQSQELPNGSVKEAPAPTPTSLEVSSPPDTTEEVDHKPKLCRLAKGENGYGFHLNAIRGLPGSFIKEVQKGGPADLAGLEDEDVIIEVNGVNVLDEPYEKVVDRIQSSGKNVTLLVCGKKAYDYFQAKKIPIVSSLADPLDTPPDSKEGIVVESNHDSHMAKERAHSTASHSSSNSEDTEM

SEQ ID NO: 57221 - protein, 519 aa, Homo sapiens; identical to SEQ ID NO: 57220

SEQ ID NO: 57222 - protein, 264 aa, Homo sapiens
MTSTFNPRECKLSKQEGQNYGFFLRIEKDTEGHLVRVVEKCSPAEKAGLQDGDRVLRINGVFVDKEEHMQVVDLVRKSGNSVTLLVLDGDSYEKAVKTRVDLKELGQSQKEQGLSDNILSPVMNGGVQTWTQPRLCYLVKEGGSYGFSLKTVQGKKGVYMTDITPQGVAMRAGVLADDHLIEVNGENVEDASHEEVVEKVKKSGSRVMFLLVDKETDKRHVEQKIQFKRETASLKLLPHQPRIVEMKKGSNGYGFYLRAGSEQK

SEQ ID NO: 57223 - protein, 408 aa, Homo sapiens
MTSTFNPRECKLSKQEGQNYGFFLRIEKDTEGHLVRVVEKCSPAEKAGLQDGDRVLRINGVFVDKEEHMQVVDLVRKSGNSVTLLVLDGDSYEKAVKTRVDLKELGQSQKEQGLSDNILSPVMNGGVQTWTQPRLCYLVKEGGSYGFSLKTVQGQIIKDIDSGSPAEEAGLKNNDLVVAVNGESVETLDHDSVVEMIRKGGDQTSLLVVDKETDNMYRLAHFSPFLYYQSQELPNGSVKEAPAPTPTSLEVSSPPDTTEEVDHKPKLCRLAKGENGYGFHLNAIRGLPGSFIKEVQKGGPADLAGLEDEDVIIEVNGVNVLDEPYEKVVDRIQSSGKNVTLLVCGKKAYDYFQAKKIPIVSSLADPLDTPPDSKEGIVVESNHDSHMAKERAHSTASHSSSNSEDTEM

SEQ ID NO: 57224 - protein, 140 aa, Homo sapiens
MDSRIPYDDYPVVFLPAYENPPAWIPPHERVHHPDYNNELTQFLPRTITLKKPPGAQLGFNIRGGKASQLGIFISKVIPDSDAHRAGLQEGDQVLAVNDVDFQDIEHSKAVEILKTAREISMRVRFFPYNYHRQKERTVH

SEQ ID NO: 57225 - protein, 140 aa, Homo sapiens; identical to SEQ ID NO: 57224

SEQ ID NO: 57226 - protein, 2839 aa, Homo sapiens
MPITQDNAVLHLPLLYQWLQNSLQEGGDGPEQRLCQAAIQKLQEYIQLNFAVDESTVPPDHSPPEMEICTVYLTKELGDTETVGLSFGNIPVFGDYGEKRRGGKKRKTHQGPVLDVGCIWVTELRKNSPAGKSGKVRLRDEILSLNGQLMVGVDVSGASYLAEQCWNGGFIYLIMLRRFKHKAHSTYNGNSSNSSEPGETPTLELGDRTAKKGKRTRKFGVISRPPANKAPEESKGSAGCEVSSDPSTELENGPDPELGNGHVFQLENGPDSLKEVAGPHLERSEVDRGTEHRIPKTDAPLTTSNDKRRFSKGGKTDFQSSDCLAREEVGRIWKMELLKESDGLGIQVSGGRGSKRSPHAIVVTQVKEGGAAHRDGRLSLGDELLVINGHLLVGLSHEEAVAILRSATGMVQLVVASKENSAEDLLRLTSKSLPDLTSSVEDVSSWTDNEDQEADGEEDEGTSSSVQRAMPGTDEPQDVCGAEESKGNLESPKQGSNKIKLKSRLSGGVHRLESVEEYNELMVRNGDPRIRMLEVSRDGRKHSLPQLLDSSSASQEYHIVKKSTRSLSTTQVESPWRLIRPSVISIIGLYKEKGKGLGFSIAGGRDCIRGQMGIFVKTIFPNGSAAEDGRLKEGDEILDVNGIPIKGLTFQEAIHTFKQIRSGLFVLTVRTKLVSPSLTPCSTPTHMSRSASPNFNTSGGASAGGSDEGSSSSLGRKTPGPKDRIVMEVTLNKEPRVGLGIGACCLALENSPPGIYIHSLAPGSVAKMESNLSRGDQILEVNSVNVRHAALSKVHAILSKCPPGPVRLVIGRHPNPKVSEQEMDEVIARSTYQESKEANSSPGLGTPLKSPSLAKKDSLISESELSQYFAHDVPGPLSDFMVAGSEDEDHPGSGCSTSEEGSLPPSTSTHKEPGKPRANSLVTLGSHRASGLFHKQVTVARQASLPGSPQALRNPLLRQRKVGCYDANDASDEEEFDREGDCISLPGALPGPIRPLSEDDPRRVSISSSKGMDVHNQEERPRKTLVSKAISAPLLGSSVDLEESIPEGMVDAASYAANLTDSAEAPKGSPGSWWKKELSGSSSAPKLEYTVRTDTQSPTNTGSPSSPQQKSEGLGSRHRPVARVSPHCKRSEAEAKPSGSQTVNLTGRANDPCDLDSRVQATSVKVTVAGFQPGGAVEKESLGKLTTGDACVSTSCELASALSHLDASHLTENLPKAASELGQQPMTELDSSSDLISSPGKKGAAHPDPSKTSVDTGQVSRPENPSQPASPRVTKCKARSPVRLPHEGSPSPGEKAAAPPDYSKTRSASETSTPHNTRRVAALRGAGPGAEGMTPAGAVLPGDPLTSQEQRQGAPGNHSKALEMTGIHAPESSQEPSLLEGADSVSSRAPQASLSMLPSTDNTKEACGHVSGHCCPGGSRESPVTDIDSFIKELDASAARSPSSQTGDSGSQEGSAQGHPPAGAGGGSSCRAEPVPGGQTSSPRRAWAAGAPAYPQWASQPSVLDSINPDKHFTVNKNFLSNYSRNFSSFHEDSTSLSGLGDSTEPSLSSMYGDAEDSSSDPESLTEAPRASARDGWSPPRSRVSLHKEDPSESEEEQIEICSTRGCPNPPSSPAHLPTQAAICPASAKVLSLKYSTPRESVASPREKAACLPGSYTSGPDSSQPSSLLEMSSQEHETHADISTSQNHRPSCAEETTEVTSASSAMENSPLSKVARHFHSPPIILSSPNMVNGLEHDLLDDETLNQYETSINAAASLSSFSVDVPKNGESVLENLHISESQDLDDLLQKPKMIARRPIMAWFKEINKHNQGTHLRSKTEKEQPLMPARSPDSKIQMVSSSQKKGVTVPHSPPQPKTNLENKDLSKKSPAEMLLTNGQKAKCGPKLKRLSLKGKAKVNSEAPAANAVKAGGTDHRKPLISPQTSHKTLSKAVSQRLHVADHEDPDRNTTAAPRSPQCVLESKPPLATSGPLKPSVSDTSIRTFVSPLTSPKPVPEQGMWSRFHMAVLSEPDRGCPTTPKSPKCRAEGRAPRADSGPVSPAASRNGMSVAGNRQSEPRLASHVAADTAQPRPTGEKGGNIMASDRLERTNQLKIVEISAEAVSETVCGNKPAESDRRGGCLAQGNCQEKSEIRLYRQVAESSTSHPSSLPSHASQAEQEMSRSFSMAKLASSSSSLQTAIRKAEYSQGKSSLMSDSRGVPRNSIPGGPSGEDHLYFTPRPATRTYSMPAQFSSHFGREGHPPHSLGRSRDSQVPVTSSVVPEAKASRGGLPSLANGQGIYSVKPLLDTSRNLPATDEGDIISVQETSCLVTDKIKVTRRHYCYEQNWPHESTSFFSVKQRIKSFENLANADRPVAKSGASPFLSVSSKPPIGRRSSGSIVSGSLGHPGDAAARLLRRSLSSCSENQSEAGTLLPQMAKSPSIMTLTISRQNPPETSSKGSDSELKKSLGPLGIPTPTMTLASPVKRNKSSVRHTQPSPVSRSKLQELRALSMPDLDKLCSEDYSAGPSAVLFKTELEITPRRSPGPPAGGVSCPEKGGNRACPGGSGPKTSAAETPSSASDTGEAAQDLPFRRSWSVNLDQLLVSAGDQQRLQSVLSSVGSKSTILTLIQEAKAQSENEEDVCFIVLNRKEGSGLGFSVAGGTDVEPKSITVHRVFSQGAASQEGTMNRGDFLLSVNGASLAGLAHGNVLKVLHQAQLHKDALVVIKKGMDQPRPSARQEPPTANGKGLLSRKTIPLEPGIGRSVAVHDALCVEVLKTSAGLGLSLDGGKSSVTGDGPLVIKRVYKGGAAEQAGIIEAGDEILAINGKPLVGLMHFDAWNIMKSVPEGPVQLLIRKHRNSS

SEQ ID NO: 57227 - protein, 2640 aa, Homo sapiens
MPITQDNAVLHLPLLYQWLQNSLQEGGDGPEQRLCQAAIQKLQEYIQLNFAVDESTVPPDHSPPEMEICTVYLTKELGDTETVGLSFGNIPVFGDYGEKRRGGKKRKTHQGPVLDVGCIWVTELRKNSPAGKSGKVRLRDEILSLNGQLMVGVDVSGASYLAEQCWNGGFIYLIMLRRFKHKAHSTYNGNSSNSSEPGETPTLELGDRTAKKGKRTRKFGVISRPPANKAPEESKGSAGCEVSSDPSTELENGPDPELGNGHVFQLENGPDSLKEVAGPHLERSEVDRGTEHRIPKTDAPLTTSNDKRRFSKGGKTDFQSSDCLAREEVGRIWKMELLKESDGLGIQVSGGRGSKRSPHAIVVTQVKEGGAAHREYHIVKKSTRSLSTTQVESPWRLIRPSVISIIGLYKEKGKGLGFSIAGGRDCIRGQMGIFVKTIFPNGSAAEDGRLKEGDEILDVNGIPIKGLTFQEAIHTFKQIRSGLFVLTVRTKLVSPSLTPCSTPTHMSRSASPNFNTSGGASAGGSDEGSSSSLGRKTPGPKDRIVMEVTLNKEPRVGLGIGACCLALENSPPGIYIHSLAPGSVAKMESNLSRGDQILEVNSVNVRHAALSKVHAILSKCPVSEQEMDEVIARSTYQESKEANSSPGLGTPLKSPSLAKKDSLISESELSQYFAHDVPGPLSDFMVAGSEDEDHPGSGCSTSEEGSLPPSTSKEPGKPRANSLVTLGSHRASGLFHKQVTVARQASLPGSPQALRNPLLRQRKVGCYDANDASDEEEFDREGDCISLPGALPGPIRPLSEDDPRRVSISSSKGMDVHNQEERPRKTLVSKAISAPLLGSSVDLEESIPEGMVDAASYAANLTDSAEAPKGSPGSWWKKELSGSSSAPKLEYTVRTDTQSPTNTGSPSSPQQKSEGLGSRHRPVARVSPHCKRSEAEAKPSGSQTVNLTGRANDPCDLDSRVQATSVKVTVAGFQPGGAVEKLCQESLGKLTTGDACVSTSCELASALSHLDASHLTENLPKAASELGQQPMTASDLISSPGKKGAAHPDPSKTSVDTGQVSRPENPSQPASPRVTKCKARSPVRLPHEGSPSPGEKAAAPPDYSKTRSASETSTPHNTRRVAALRGAGPGAEGMTPAGAVLPGDPLTSQEQRQGAPGNHSKALEMTGIHAPESSQEPSLLEGADSVSSRAPQASLSMLPSTDNTKEACGHVSGHCCPGGSRESPVTDIDSFIKELDASAARSPSSQTGDSGSQEGSAQGHPPAGAGGGSSCRAEPVPGGQTSSPRRAWAAGAPAYPQWASQPSVLDSINPDKHFTVNKNFLSNYSRNFSSFHEDSTSLSGLGDSTEPSLSSMYGDAEDSSSDPESLTEAPRASARDGWSPPRSRVSLHKEDPSESEEEQIEICSTRGCPNPPSSPAHLPTQAAICPASAKVLSLKYSTPRESVASPREKAACLPGSYTSGPDSSQPSSLLEMSSQEHETHADISTSQNHRPSCAEETTEVTSASSAMENSPLSKVARHFHSPPIILSSPNMVNGLEHDLLDDETLNQYETSINAAASLSSFSVDVPKNGESVLENLHISESQDLDDLLQKPKMIARRPIMAWFKEINKHNQGTHLRSKTEKEQPLMPARSPDSKIQMVSSSQKKGVTVPHSPPQPKTNLENKDLSKKSPAEMLLTNGQKAKCGPKLKRLSLKGKAKVNSEAPAANAVKAGGTDHRKPLISPQTSHKTLSKAVSQRLHVADHEDPDRNTTAAPRSPQCVLESKPPLATSGPLKPSVSDTSIRTFVSPLTSPKPVPEQGMWSRFHMAVLSEPDRGCPTTPKSPKCRAEGRAPRADSGPVSPAASRNGMSVAGNRQSEPRLASHVAADTAQPRPTGEKGGNIMASDRLERTNQLKIVEISAEAVSETVCGNKPAESDRRGGCLAQGNCQEKSEIRLYRQVAESSTSHPSSLPSHASQAEQEMSRSFSMAKLASSSSSLQTAIRKAEYSQGKSSLMSDSRGVPRNSIPGGPSGEDHLYFTPRPATRTYSMPAQFSSHFGREGHPPHSLGRSRDSQVPVTSSVVPEAKASRGGLPSLANGQGIYSVKPLLDTSRNLPATDEGDIISVQETSCLVTDKIKVTRRHYCYEQNWPHESTSFFSVKQRIKSFENLANADRPVAKSGASPFLSVSSKPPIGRRSSGSIVSGSLGHPGDAAARLLRRSLSSCSENQSEAGTLLPQMAKSPSIMTLTISRQNPPETSSKGSDSELKKSLGPLGIPTPTMTLASPVKRNKSSVRHTQPSPVSRSKLQELRALSMPDLDKLCSEDYSAGPSAVLFKTELEITPRRSPGPPAGGVSCPEKGGNRACPGGSGPKTSAAETPSSASDTGEAAQDLPFRRSWSVNLDQLLVSAGDQQRLQSVLSSVGSKSTILTLIQEAKAQSENEEDVCFIVLNRKEGSGLGFSVAGGTDVEPKSITVHRVFSQGAASQEGTMNRGDFLLSVNGASLAGLAHGNVLKVLHQAQLHKDALVVIKKGMDQPRPSARQEPPTANGKGLLSRKTIPLEPGIGRSVAVHDALCVEVLKTSAGLGLSLDGGKSSVTGDGPLVIKRVYKGGAAEQAGIIEAGDEILAINGKPLVGLMHFDAWNIMKSVPEGPVQLLIRKHRNSS

SEQ ID NO: 57228 - protein, 2839 aa, Homo sapiens; identical to SEQ ID NO: 57226

SEQ ID NO: 57229 - protein, 14 aa, Homo sapiens
MPITQDNAVLHLPL

SEQ ID NO: 57230 - protein, 491 aa, Homo sapiens
MEKAADLQDTASLTLKFKFNPKLGIDNPVLSLAEDHDPYDPWSLERPRFCLLSKEEGKSFGFHLQQELGRAGHVVCRVDPGTSAQRQGLQEGDRILAVNNDVVEHEDYAVVVRRIRASSPRVLLTVLARHAHDVARAQLGEDAHLCPTLGPGVRPRLCHIVKDEGGFGFSVTHGNQGPFWLVLSTGGAAERAGVPPGARLLEVNGLWQSGQQVTLLVAGPEVEEQCRQLGLPLAAPLAEGWALPTKPRCLHLEKGPQGFGFLLREEKGLDGRPGQFLWEVDPGLPAKKAGMQAGDRLVAVAGESVEGLGHEETVSRIQGQGSCVSLTVVDPEADRFFSMVRLSPLLFLENTEAPASPRGSSSASLVETEDPSLEDTSVPSVPLGSRQCFLYPGPGGSYGFRLSCVASGPRLFISQVTPGGSAARAGLQVGDVILEVNGYPVGGQNDLERLQQLPEAEPPLCLKLAARSLRGLEAWIPPGAAEDWALASDLL

SEQ ID NO: 57231 - protein, 505 aa, Homo sapiens
MEKAADLQDTASLTLKFKFNPKLGIDNPVLSLAEDHDPYDPWSLERPRFCLLSKEEGKSFGFHLQQELGRAGHVVCRVDPGTSAQRQGLQEGDRILAVNNDVVEHEDYAVVVRRIRASSPRVLLTVLARHAHDVARAQLGEDAHLCPTLGPGVRPRLCHIVKDEGGFGFSVTHGNQGPFWLVLSTGGAAERAGVPPGARLLEVNGVSVEKFTHNQLTRKLWQSGQQVTLLVAGPEVEEQCRQLGLPLAAPLAEGWALPTKPRCLHLEKGPQGFGFLLREEKGLDGRPGQFLWEVDPGLPAKKAGMQAGDRLVAVAGESVEGLGHEETVSRIQGQGSCVSLTVVDPEADRFFSMVRLSPLLFLENTEAPASPRGSSSASLVETEDPSLEDTSVPSVPLGSRQCFLYPGPGGSYGFRLSCVASGPRLFISQVTPGGSAARAGLQVGDVILEVNGYPVGGQNDLERLQQLPEAEPPLCLKLAARSLRGLEAWIPPGAAEDWALASDLL

SEQ ID NO: 57232 - protein, 571 aa, Homo sapiens
MVTPSPPGNHSLSLEAPRLHTASDLLGNHSLGLPLITALVGSRDRRGRVFSPVPVPLPTNPTTQHPTRQKLPSTLSGHRVCQAHGEPVLGLCPLLPLFCCPPHPPDPWSLERPRFCLLSKEEGKSFGFHLQQELGRAGHVVCRVDPGTSAQRQGLQEGDRILAVNNDVVEHEDYAVVVRRIRASSPRVLLTVLARHAHDVARAQLGEDAHLCPTLGPGVRPRLCHIVKDEGGFGFSVTHGNQGPFWLVLSTGGAAERAGVPPGARLLEVNGVSVEKFTHNQLTRKLWQSGQQVTLLVAGPEVEEQCRQLGLPLAAPLAEGWALPTKPRCLHLEKGPQGFGFLLREEKGLDGRPGQFLWEVDPGLPAKKAGMQAGDRLVAVAGESVEGLGHEETVSRIQGQGSCVSLTVVDPEADRFFSMVRLSPLLFLENTEAPASPRGSSSASLVETEDPSLEDTSVPSVPLGSRQCFLYPGPGGSYGFRLSCVASGPRLFISQVTPGGSAARAGLQVGDVILEVNGYPVGGQNDLERLQQLPEAEPPLCLKLAARSLRGLEAWIPPGAAEDWALASDLL

SEQ ID NO: 57233 - protein, 505 aa, Homo sapiens
MEEALDLQDTASLTLKFKFNPKLGIDNPVLSLAEDHDPYDPWSLERPRFCLLSKEEGKSFGFHLQQELGRAGHVVCRVDPGTSAQRQGLQEGDRILAVNNDVVEHEDYAVVVRRIRASSPRVLLTVLARHAHDVARAQLGEDAHLCPTLGPGVRPRLCHIVKDEGGFGFSVTHGNQGPFWLVLSTGGAAERAGVPPGARLLEVNGVSVEKFTHNQLTRKLWQSGQQVTLLVAGPEVEEQCRQLGLPLAAPLAEGWALPTKPRCLHLEKGPQGFGFLLREEKGLDGRPGQFLWEVDPGLPAKKAGMQAGDRLVAVAGESVEGLGHEETVSRIQGQGSCVSLTVVDPEADRFFSMVRLSPLLFLENTEAPASPRGSSSASLVETEDPSLEDTSVPSVPLGSRQCFLYPGPGGSYGFRLSCVASGPRLFISQVTPGGSAARAGLQVGDVILEVNGYPVGGQNDLERLQQLPEAEPPLCLKLAARSLRGLEAWIPPGAAEDWALASDLL

SEQ ID NO: 57234 - protein, 571 aa, Homo sapiens; identical to SEQ ID NO: 57232

SEQ ID NO: 57235 - protein, 769 aa, Homo sapiens
MGCNMCVVQKPEEQYKVMLQVNGKELSKLSQEQTLQALRSSKEPLVIQVLRRSPRLRGDSSCHDLQLVDSGTQTDITFEHIMALGKLRPPTPPMVILEPPPISHEYYDPAEFMEGGPQEADRLDELEYEEVELYKSSHRDKLGLMVCYRTDDEEDLGIYVGEVNPNSIAAKDGRIREGDRIIQINGVDVQNREEAVAILSQEENTNISLLVARPESQLAKRWKDSDRDDFLDDFGSENEGELRARKLKSPPAQQPGNEEEKGAPDAGPGLSNSQELDSGVGRTDESTRNEESSEHDLLGDEPPSSTNTPGSLRKFGLQGDALQSRDFHFSMDSLLAEGAGLGGGDVPGLTDEEYERYRELLEIKCHLENGNQLGLLFPRASGGNSALDVNRNESLGHEMAMLEEELRHLEFKCRNILRAQKMQQLRERCMKAWLLEEESLYDLAASEPKKHELSDISELPEKSDKDSTSAYNTGESCRSTPLLVEPLPESPLRRAMAGNSNLNRTPPGPAVATPAKAAPPPGSPAKFRSLSRDPEAGRRQHAEERGRRNPKTGLTLERVGPESSPYLSRRHRGQGQEGEHYHSCVQLAPTRGLEELGHGPLSLAGGPRVGGVAAAATEAPRMEWKVKVRSDGTRYVAKRPVRDRLLKARALKIREERSGMTTDDDAVSEMKMGRYWSKEERKQHLIRAREQRKRREFMMQSRLECLREQQNGDSKPELNIIALSHRKTMKKRNKKILDNWITIQEMLAHGARSADGKRVYNPLLSVTTV

SEQ ID NO: 57236 - protein, 694 aa, Homo sapiens
MALGKLRPPTPPMVILEPYVLSELPPISHEYYDPAEFMEGGPQEADRLDELEYEEVELYKSSHRDKLGLMVCYRTDDEEDLGIYVGEVNPNSIAAKDGRIREGDRIIQINGVDVQNREEAVAILSQEENTNISLLVARPESQLAKRWKDSDRDDFLDDFGSENEGELRARKLKSPPAQQPGNEEEKGAPDAGPGLSNSQELDSGVGRTDESTRNEESSEHDLLGDEPPSSTNTPGSLRKFGLQGDALQSRDFHFSMDSLLAEGAGLGGGDVPGLTDEEYERYRELLEIKCHLENGNQLGLLFPRASGGNSALDVNRNESLGHEMAMLEEELRHLEFKCRNILRAQKMQQLRERCMKAWLLEEESLYDLAASEPKKHELSDISELPEKSDKDSTSAYNTGESCRSTPLLVEPLPESPLRRAMAGNSNLNRTPPGPAVATPAKAAPPPGSPAKFRSLSRDPEAGRRQHAEERGRRNPKTGLTLERVGPESSPYLSRRHRGQGQEGEHYHSCVQLAPTRGLEELGHGPLSLAGGPRVGGVAAAATEAPRMEWKVKVRSDGTRYVAKRPVRDRLLKARALKIREERSGMTTDDDAVSEMKMGRYWSKEERKQHLIRAREQRKRREFMMQSRLECLREQQNGDSKPELNIIALSHRKTMKKRNKKILDNWITIQEMLAHGARSADGKRVYNPLLSVTTV

SEQ ID NO: 57237 - protein, 673 aa, Homo sapiens
MTAPPISHEYYDPAEFMEGGPQEADRLDELEYEEVELYKSSHRDKLGLMVCYRTDDEEDLGIYVGEVNPNSIAAKDGRIREGDRIIQINGVDVQNREEAVAILSQEENTNISLLVARPESQLAKRWKDSDRDDFLDDFGSENEGELRARKLKSPPAQQPGNEEEKGAPDAGPGLSNSQELDSGVGRTDESTRNEESSEHDLLGDEPPSSTNTPGSLRKFGLQGDALQSRDFHFSMDSLLAEGAGLGGGDVPGLTDEEYERYRELLEIKCHLENGNQLGLLFPRASGGNSALDVNRNESLGHEMAMLEEELRHLEFKCRNILRAQKMQQLRERCMKAWLLEEESLYDLAASEPKKHELSDISELPEKSDKDSTSAYNTGESCRSTPLLVEPLPESPLRRAMAGNSNLNRTPPGPAVATPAKAAPPPGSPAKFRSLSRDPEAGRRQHAEERGRRNPKTGLTLERVGPESSPYLSRRHRGQGQEGEHYHSCVQLAPTRGLEELGHGPLSLAGGPRVGGVAAAATEAPRMEWKVKVRSDGTRYVAKRPVRDRLLKARALKIREERSGMTTDDDAVSEMKMGRYWSKEERKQHLIRAREQRKRREFMMQSRLECLREQQNGDSKPELNIIALSHRKTMKKRNKKILDNWITIQEMLAHGARSADGKRVYNPLLSVTTV

SEQ ID NO: 57238 - protein, 660 aa, Homo sapiens
MGCNMCVVQKPEEQYKVMLQEVELYKSSHRDKLGLMVCYRTDDEEDLGIYVGEVNPNSIAAKDGRIREGDRIIQINGVDVQNREEAVAILSQEENTNISLLVARPESQLAKRWKDSDRDDFLDDFGSENEGELRARKLKSPPAQQPGNEEEKGAPDAGPGLSNSQELDSGVGRTDESTRNEESSEHDLLGDEPPSSTNTPGSLRKFGLQGDALQSRDFHFSMDSLLAEGAGLGGGDVPGLTDEEYERYRELLEIKCHLENGNQLGLLFPRASGGNSALDVNRNESLGHEMAMLEEELRHLEFKCRNILRAQKMQQLRERCMKAWLLEEESLYDLAASEPKKHELSDISELPEKSDKDSTSAYNTGESCRSTPLLVEPLPESPLRRAMAGNSNLNRTPPGPAVATPAKAAPPPGSPAKFRSLSRDPEAGRRQHAEERGRRNPKTGLTLERVGPESSPYLSRRHRGQGQEGEHYHSCVQLAPTRGLEELGHGPLSLAGGPRVGGVAAAATEAPRMEWKVKVRSDGTRYVAKRPVRDRLLKARALKIREERSGMTTDDDAVSEMKMGRYWSKEERKQHLIRAREQRKRREFMMQSRLECLREQQNGDSKPELNIIALSHRKTMKKRNKKILDNWITIQEMLAHGARSADGKRVYNPLLSVTTV

SEQ ID NO: 57239 - protein, 517 aa, Homo sapiens
MAQGFAVGFDPLGLGDLSSGSLSSLSSRGHLGSDSGSTATRYLLRKQQRLLNGPPRGIRASSPMGRVILINSPIEANSDESDIIHSVRVEKSPAGRLGFSVRGGSEHGLGIFVSKVEEGSSAERAGLCVGDKITEVNGLSLESTTMGSAVKVLTSSSRLHMMVRRMGRVPGIKFSKEKTTWVDVVNRRLVVEKCGSTPSDTSSEDGVRRIVHLYTTSDDFCLGFNIRGGKEFGLGIYVSKVDHGGLAEENGIKVGDQVLAANGVRFDDISHSQAVEVLKGQTHIMLTIKETGRYPAYKEMVSEYCWLDRLSNGVLQQLSPASESSSSVSSCASSAPYSSGSLPSDRMDICLGQEEPGSRGPGWGRADTAMQTEPDAGGRVETWCSVRPTVILRDTAIRSDGPHPGRRLDSALSESPKTALLLALSRPRPPITRSQSYLTLWEEKQQRKKEKSGSPGEKGALQRSKTLMNLFFKGGRQGRLARDGRREAWTLDSGSLAKTYPRLDIEKEMGVSPCCPG

SEQ ID NO: 57240 - protein, 1033 aa, Homo sapiens
MAQGFAVGFDPLGLGDLSSGSLSSLSSRGHLGSDSGSTATRYLLRKQQRLLNGPPRGIRASSPMGRVILINSPIEANSDESDIIHSVRVEKSPAGRLGFSVRGGSEHGLGIFVSKVEEGSSAERAGLCVGDKITEVNGLSLESTTMGSAVKVLTSSSRLHMMVRRMGRVPGIKFSKEKTTWVDVVNRRLVVEKCGSTPSDTSSEDGVRRIVHLYTTSDDFCLGFNIRGGKEFGLGIYVSKVDHGGLAEENGIKVGDQVLAANGVRFDDISHSQAVEVLKGQTHIMLTIKETGRYPAYKEMVSEYCWLDRLSNGVLQQLSPASESSSSVSSCASSAPYSSGSLPSDRMDICLGQEEPGSRGPGWGRADTAMQTEPDAGGRVETWCSVRPTVILRDTAIRSDGPHPGRRLDSALSESPKTALLLALSRPRPPITRSQSYLTLWEEKQQRKKEKSGSPGEKGALQRSKTLMNLFFKGGRQGRLARDGRREAWTLDSGSLAKTYPRLDIEKAGGVGPVQKFVTWRLRRDQERGRALLSARSGSPSSQLPNVDEQVQAWESRRPLIQDLAQRLLTDDEVLAVTRHCSRYVHEGGIEDLVRPLLAILDRPEKLLLLQDIRSVVAPTDLGRFDSMVMLVELEAFEALKSRAVRPPALRPARQDTPPKRHLITPVPDSRGGFYLLPVNGFPEEEDNGELRERLGALKVSPSASAPRHPHKGIPPLQDVPVDAFTPLRIACTPPPQLPPVAPRPLRPNWLLTEPLSREHPPQSQIRGRAQSRSRSRSRSRSRSSRGQGKSPGRRSPSPVPTPAPSMTNGRYHKPRKARPPLPRPLDGEAAKVGAKQGPSESGTEGTAKEAAMKNPSGELKTVTLSKMKQSLGISISGGIESKVQPMVKIEKIFPGGAAFLSGALQAGFELVAVDGENLEQVTHQRAVDTIRRAYRNKAREPMELVVRVPGPSPRPSPSDSSALTDGGLPADHLPAHQPLDAAPVPAHWLPEPPTNPQTPPTDARLLQPTPSPAPSPALQTPDSKPAPSPRIP

SEQ ID NO: 57241 - protein, 208 aa, Homo sapiens
  VARIANT 1: note = MOD_RES - Any amino acid
XPRPPITRSQSYLTLWEEKQQRKKEKSGSPGEKGALQRSKTLMNLFFKGGRQGRLARDGRREAWTLDSGSLAKTYPRLDIEKAGGVGPVQKFVTWRLRRDQERGRALLSARSGSPSSQLPNVDEQVQAWESRRPLIQDLAQRLLTDDEVLAVTRHCSRYVHEGGIEDLVRPLLAILDRPEKLLLLQDIRSVVAPTDLGRFDSMVMLVE

SEQ ID NO: 57242 - protein, 1154 aa, Homo sapiens
MGLLLMILASAVLGSFLTLLAQFFLLYRRQPEPPADEAARAGEGFRYIKPVPGLLLREYLYGGGRDEEPSGAAPEGGATPTAAPETPAPPTRETCYFLNATILFLFRELRDTALTRRWVTKKIKVEFEELLQTKTAGRLLEGLSLRDVFLGETVPFIKTIRLVRPVVPSATGEPDGPEGEALPAACPEELAFEAEVEYNGGFHLAIDVDLVFGKSAYLFVKLSRVVGRLRLVFTRVPFTHWFFSFVEDPLIDFEVRSQFEGRPMPQLTSIIVNQLKKIIKRKHTLPNYKIRFKPFFPYQTLQGFEEDEEHIHIQQWALTEGRLKVTLLECSRLLIFGSYDREANVHCTLELSSSVWEEKQRSSIKTVELIKGNLQSVGLTLRLVQSTDGYAGHVIIETVAPNSPAAIADLQRGDRLIAIGGVKITSTLQVLKLIKQAGDRVLVYYERPVGQSNQGAVLQDNFGQLEENFLSSSCQSGYEEEAAGLTVDTESRELDSEFEDLASDVRAQNEFKDEAQSLSHSPKRVPTTLSIKPLGAISPVLNRKLAVGSHPLPPKIQSKDGNKPPPLKTSEITDPAQVSKPTQGSAFKPPVPPRPQAKVPLPSADAPNQAEPDVLVEKPEKVVPPPLVDKSAEKQAKNVDAIDDAAAPKQFLAKQEVAKDVTSETSCPTKDSSDDRQTWESSEILYRNKLGKWTRTRASCLFDIEACHRYLNIALWCRDPFKLGGLICLGHVSLKLEDVALGCLATSNTEYLSKLRLEAPSPKAIVTRTALRNLSMQKGFNDKFCYGDITIHFKYLKEGESDHHVVTNVEKEKEPHLVEEVSVLPKEEQFVGQMGLTENKHSFQDTQFQNPTWCDYCKKKVWTKAASQCMFCAYVCHKKCQEKCLAETSVCGATDRRIDRTLKNLRLEGQETLLGLPPRVDAEASKSVNKTTGLTRHIINTSSRLLNLRQVSKTRLSEPGTDLVEPSPKHTPNTSDNEGSDTEVCGPNSPSKRGNSTGIKLVRKEGGLDDSVFIAVKEIGRDLYRGLPTEERIQKLEFMLDKLQNEIDQELEHNNSLVREEKETTDTRKKSLLSAALAKSGERLQALTLLMIHYRAGIEDIETLESLSLDQHSKKISKYTDDTEEDLDNEISQLIDSQPFSSISDDLFGPSESV

SEQ ID NO: 57243 - protein, 1066 aa, Homo sapiens
MGFELDRFDGDVDPDLKCALCHKVLEDPLTTPCGHVFCAGCVLPWVVQEGSCPARCRGRLSAKELNHVLPLKRLILKLDIKCAYATRGCGRVVKLQQLPEHLERCDFAPARCRHAGCGQVLLRRDVEAHMRDACDARPVGRCQEGCGLPLTHGEQRAGGHCCARALRAHNGALQARLGALHKALKKEALRAGKREKSLVAQLAAAQLELQMTALRYQKKFTEYSARLDSLSRCVAAPPGGKGEETKSLTLVLHRDSGSLGFNIIGGRPSVDNHDGSSSEGIFVSKIVDSGPAAKEGGLQIHDRIIEVNGRDLSRATHDQAVEAFKTAKEPIVVQVLRRTPRTKMFTPPSESQLVDTGTQTDITFEHIMALTKMSSPSPPVLDPYLLPEEHPSAHEYYDPNDYIGDIHQEMDREELELEEVDLYRMNSQDKLGLTVCYRTDDEDDIGIYISEIDPNSIAAKDGRIREGDRIIQINGIEVQNREEAVALLTSEENKNFSLLIARPELQLDEGWMDDDRNDFLDDLHMDMLEEQHHQAMQFTASVLQQKKHDEDGGTTDTATILSNQHEKDSGVGRTDESTRNDESSEQENNGDDATASSNPLAGQRKLTCSQDTLGSGDLPFSNESFISADCTDADYLGIPVDECERFRELLELKCQVKSATPYGLYYPSGPLDAGKSDPESVDKELELLNEELRSIELECLSIVRAHKMQQLKEQYRESWMLHNSGFRNYNTSIDVRRHELSDITELPEKSDKDSSSAYNTGESCRSTPLTLEISPDNSLRRAAEGISCPSSEGAVGTTEAYGPASKNLLSITEDPEVGTPTYSPSLKELDPNQPLESKERRASDGSRSPTPSQKLGSAYLPSYHHSPYKHAHIPAHAQHYQSYMQLIQQKSAVEYAQSQMSLVSMCKDLSSPTPSEPRMEWKVKIRSDGTRYITKRPVRDRLLRERALKIREERSGMTTDDDAVSEMKMGRYWSKEERKQHLVKAKEQRRRREFMMQSRLDCLKEQQAADDRKEMNILELSHKKMMKKRNKKIFDNWMTIQELLTHGTKSPDGTRVYNSFLSVTTV

SEQ ID NO: 57244 - protein, 729 aa, Homo sapiens
MGFELDRFDGDVDPDLKCALCHKVLEDPLTTPCGHVFCAGCVLPWVVQEGSCPARCRGRLSAKELNHVLPLKRLILKLDIKCAYATRGCGRVVKLQQLPEHLERCDFAPARCRHAGCGQVLLRRDVEAHMRDACDARPVGRCQEGCGLPLTHGEQRAGGHCCARALRAHNGALQARLGALHKALKKEALRAGKREKSLVAQLAAAQLELQMTALRYQKKFTEYSARLDSLSRCVAAPPGGKGEETKSLTLVLHRDSGSLGFNIIGGRPSVDNHDGSSSEGIFVSKIVDSGPAAKEGGLQIHDRIIEVNGRDLSRATHDQAVEAFKTAKEPIVVQVLRRTPRTKMFTPPSESQLVDTGTQTDITFEHIMALTKMSSPSPPVLDPYLLPEEHPSAHEYYDPNDYIGDIHQEMDREELELEEVDLYRMNSQDKLGLTVCYRTDDEDDIGIYISEIDPNSIAAKDGRIREGDRIIQINGIEVQNREEAVALLTSEENKNFSLLIARPELQLDEGWMDDDRNDFLDDLHMDMLEEQHHQAMQFTASVLQQKKHDEDGGTTDTATILSNQHEKDSGVGRTDESTRNDESSEQENNGDDATASSNPLAGQRKLTCSQDTLGSGDLPFSNESFISADCTDADYLGIPVEGEDPQRRDALHHQEARAGPPAAGARPEDPGRAQRHDHRRRRGERDEDGALLEQGGEEAAPGEGQGAAAAARVHDAEQVGLSQGAASSR

SEQ ID NO: 57245 - protein, 783 aa, Homo sapiens
MGCSLCSLQKQEEQYKLLYEVCQVNGRDLSRATHDQAVEAFKTAKEPIVVQVLRRTPRTKMFTPPSESQLVDTGTQTDITFEHIMALTKMSSPSPPVLDPYLLPEEHPSAHEYYDPNDYIGDIHQEMDREELELEEVDLYRMNSQDKLGLTVCYRTDDEDDIGIYISEIDPNSIAAKDGRIREGDRIIQINGIEVQNREEAVALLTSEENKNFSLLIARPELQLDEGWMDDDRNDFLDDLHMDMLEEQHHQAMQFTASVLQQKKHDEDGGTTDTATILSNQHEKDSGVGRTDESTRNDESSEQENNGDDATASSNPLAGQRKLTCSQDTLGSGDLPFSNESFISADCTDADYLGIPVDECERFRELLELKCQVKSATPYGLYYPSGPLDAGKSDPESVDKELELLNEELRSIELECLSIVRAHKMQQLKEQYRESWMLHNSGFRNYNTSIDVRRHELSDITELPEKSDKDSSSAYNTGESCRSTPLTLEISPDNSLRRAAEGISCPSSEGAVGTTEAYGPASKNLLSITEDPEVGTPTYSPSLKELDPNQPLESKERRASDGSRSPTPSQKLGSAYLPSYHHSPYKHAHIPAHAQHYQSYMQLIQQKSAVEYAQSQMSLVSMCKDLSSPTPSEPRMEWKVKIRSDGTRYITKRPVRDRLLRERALKIREERSGMTTDDDAVSEMKMGRYWSKEERKQHLVKAKEQRRRREFMMQSRLDCLKEQQAADDRKEMNILELSHKKMMKKRNKKIFDNWMTIQELLTHGTKSPDGTRVYNSFLSVTTV

SEQ ID NO: 57246 - protein, 788 aa, Homo sapiens
MKMEHKRMILLFSKFTLIHKPHGGRWYLVNGRDLSRATHDQAVEAFKTAKEPIVVQVLRRTPRTKMFTPPSESQLVDTGTQTDITFEHIMALTKMSSPSPPVLDPYLLPEEHPSAHEYYDPNDYIGDIHQEMDREELELEEVDLYRMNSQDKLGLTVCYRTDDEDDIGIYISEIDPNSIAAKDGRIREGDRIIQINGIEVQNREEAVALLTSEENKNFSLLIARPELQLDEGWMDDDRNDFLDDLHMDMLEEQHHQAMQFTASVLQQKKHDEDGGTTDTATILSNQHEKDSGVGRTDESTRNDESSEQENNGDDATASSNPLAGQRKLTCSQDTLGSGDLPFSNESFISADCTDADYLGIPVDECERFRELLELKCQVKSATPYGLYYPSGPLDAGKSDPESVDKELELLNEELRSIELECLSIVRAHKMQQLKEQYRESWMLHNSGFRNYNTSIDVRRHELSDITELPEKSDKDSSSAYNTGESCRSTPLTLEISPDNSLRRAAEGISCPSSEGAVGTTEAYGPASKNLLSITEDPEVGTPTYSPSLKELDPNQPLESKERRASDGSRSPTPSQKLGSAYLPSYHHSPYKHAHIPAHAQHYQSYMQLIQQKSAVEYAQSQMSLVSMCKDLSSPTPSEPRMEWKVKIRSDGTRYITKRPVRDRLLRERALKIREERSGMTTDDDAVSEMKMGRYWSKEERKQHLVKAKEQRRRREFMMQSRLDCLKEQQAADDRKEMNILELSHKKMMKKRNKKIFDNWMTIQELLTHGTKSPDGTRVYNSFLSVTTV

SEQ ID NO: 57247 - protein, 776 aa, Homo sapiens
MSGKRQFFLKPLALLTCWPSTVNGKDLSKATHEEAVEAFRNAKEPIVVQVLRRTPLSRPAYGMASEVQLMNASTQTDITFEHIMALAKLRPPTPPVPDICPFLLSDSCHSLHPMEHEFYEDNEYISSLPADADRTEDFEYEEVELCRVSSQEKLGLTVCYRTDDEEDTGIYVSEVDPNSIAAKDGRIREGDRILQINGEDVQNREEAVALLSNDECKRIVLLVARPEIQLDEGWLEDERNEFLEELNLEMLEEEHNEAMQPTANEVEQPKKQEEEEGTTDTATSSSNNHEKDSGVGRTDESLRNDESSEQENAAEDPNSTSLKSKRDLGQSQDTLGSVELQYNESLVSGEYIDSDCIGNPDEDCERFRQLLELKCKIRNHGEYDLYYSSSTIECNQGEQEGVEHELQLLNEELRNIELECQNIMQAHRLQKVTDQYGDIWTLHDGGFRNYNTSIDMQRGKLDDIMEHPEKSDKDSSSAYNTAESCRSTPLTVDRSPDSSLPRVINLTNKKNLRSTMAATQSSSGQSSKESTSTKAKTTEQGCSAESKEKVLEGSKLPDQEKAVSEHIPYLSPYHSSSYRYANIPAHARHYQSYMQLIQQKSAVEYAQSQLSLVSMCKESQKCSEPKMEWKVKIRSDGTRYITKRPVRDRILKERALKIKEERSGMTTDDDTMSEMKMGRYWSKEERKQHLVRAKEQRRRREFMMRSRLECLKESPQSGSEGKKEINIIELSHKKMMKKRNKKILDNWMTIQELMTHGAKSPDGTRVHNAFLSVTTV

SEQ ID NO: 57248 - protein, 1036 aa, Homo sapiens
MGFALERFAEAVDPALECKLCGQVLEEPLCTPCGHVFCASCLLPWAVRRRRCPLQCQPLAPGELYRVLPLRSLIQKLRVQCDYRARGCGHSVRLHELEAHVEHCDFGPARRLRSRGGCASGLGGGEVPARGGCGPTPRAGRGGGARGGPPGGRWGRGRGPGPRVLAWRRREKALLAQLWALQGEVQLTARRYQEKFTQYMAHVRNFVGDLGGGHRRDGEHKPFTIVLERENDTLGFNIIGGRPNQNNQEGTSTEGIYVSKILENGPADRADGLEIHDKIMEVNGKDLSKATHEEAVEAFRNAKEPIVVQVLRRTPLSRPAYGMASEVQLMNASTQTDITFEHIMALAKLRPPTPPVPDICPFLLSDSCHSLHPMEHEFYEDNEYISSLPADADRTEDFEYEEVELCRVSSQEKLGLTVCYRTDDEEDTGIYVSEVDPNSIAAKDGRIREGDRILQINGEDVQNREEAVALLSNDECKRIVLLVARPEIQLDEGWLEDERNEFLEELNLEMLEEEHNEAMQPTANEVEQPKKQEEEEGTTDTATSSSNNHEKDSGVGRTDESLRNDESSEQENAAEDPNSTSLKSKRDLGQSQDTLGSVELQYNESLVSGEYIDSDCIGNPDEDCERFRQLLELKCKIRNHGEYDLYYSSSTIECNQGEQEGVEHELQLLNEELRNIELECQNIMQAHRLQKVTDQYGDIWTLHDGGFRNYNTSIDMQRGKLDDIMEHPEKSDKDSSSAYNTAESCRSTPLTVDRSPDSSLPRVINLTNKKNLRSTMAATQSSSGQSSKESTSTKAKTTEQGCSAESKEKVLEGSKLPDQEKAVSEHIPYLSPYHSSSYRYANIPAHARHYQSYMQLIQQKSAVEYAQSQLSLVSMCKESQKCSEPKMEWKVKIRSDGTRYITKRPVRDRILKERALKIKEERSGMTTDDDTMSEMKMGRYWSKEERKQHLVRAKEQRRRREFMMRSRLECLKESPQSGSEGKKEINIIELSHKKMMKKRNKKILDNWMTIQELMTHGAKSPDGTRVHNAFLSVTTV

SEQ ID NO: 57249 - protein, 778 aa, Homo sapiens
MGCNLCTFQKREEHYKLLYEVSQVNGKDLSKATHEEAVEAFRNAKEPIVVQVLRRTPLSRPAYGMASEVQLMNASTQTDITFEHIMALAKLRPPTPPVPDICPFLLSDSCHSLHPMEHEFYEDNEYISSLPADADRTEDFEYEEVELCRVSSQEKLGLTVCYRTDDEEDTGIYVSEVDPNSIAAKDGRIREGDRILQINGEDVQNREEAVALLSNDECKRIVLLVARPEIQLDEGWLEDERNEFLEELNLEMLEEEHNEAMQPTANEVEQPKKQEEEEGTTDTATSSSNNHEKDSGVGRTDESLRNDESSEQENAAEDPNSTSLKSKRDLGQSQDTLGSVELQYNESLVSGEYIDSDCIGNPDEDCERFRQLLELKCKIRNHGEYDLYYSSSTIECNQGEQEGVEHELQLLNEELRNIELECQNIMQAHRLQKVTDQYGDIWTLHDGGFRNYNTSIDMQRGKLDDIMEHPEKSDKDSSSAYNTAESCRSTPLTVDRSPDSSLPRVINLTNKKNLRSTMAATQSSSGQSSKESTSTKAKTTEQGCSAESKEKVLEGSKLPDQEKAVSEHIPYLSPYHSSSYRYANIPAHARHYQSYMQLIQQKSAVEYAQSQLSLVSMCKESQKCSEPKMEWKVKIRSDGTRYITKRPVRDRILKERALKIKEERSGMTTDDDTMSEMKMGRYWSKEERKQHLVRAKEQRRRREFMMRSRLECLKESPQSGSEGKKEINIIELSHKKMMKKRNKKILDNWMTIQELMTHGAKSPDGTRVHNAFLSVTTV

SEQ ID NO: 57250 - protein, 385 aa, Homo sapiens
MKLVRKNIEKDNAGQVTLVPEEPEDMWHTYNLVQVGDSLRASTIRKVQTESSTGSVGSNRVRTTLTLCVEAIDFDSQACQLRVKGTNIQENEYVKMGAYHTIELEPNRQFTLAKKQWDSVVLERIEQACDPAWSADVAAVVMQEGLAHICLVTPSMTLTRAKVEVNIPRKRKGNCSQHDRALERFYEQVVQAIQRHIHFDVVKCILVASPGFVREQFCDYLFQQAVKTDNKLLLENRSKFLQVHASSGHKYSLKEALCDPTVASRLSDTKAAGEVKALDDFYKMLQHEPDRAFYGLKQVEKANEAMAIDTLLISDELFRHQDVATRSRYVRLVDSVKENAGTVRIFSSLHVSGEQLSQLTGVAAILRFPVPELSDQEGDSSSEED

SEQ ID NO: 57251 - protein, 284 aa, Homo sapiens
MASYPYRQGCPGAAGQAPGAPPGSYYPGPPNSGGQYGSGLPPGGGYGGPAPGGPYGPPAGGGPYGHPNPGMFPSGTPGGPYGGAAPGGPYGQPPPSSYGAQQPGLYGQGGAPPNVDPEAYSWFQSVDSDHSGYISMKELKQALVNCNWSSFNDETCLMMINMFDKTKSGRIDVYGFSALWKFIQQWKNLFQQYDRDRSGSISYTELQQALSQMGYNLSPQFTQLLVSRYCPRSANPAMQLDRFIQVCTQLQVLTEAFREKDTAVQGNIRLSFEDFVTMTASRML

SEQ ID NO: 57252 - protein, 140 aa, Homo sapiens
MASYPYRQGCPGAAGQAPGAPPGSYYPGPPNSGGQYGSGLPPGGGYGGPAPGGPYGPPAGGGPYGHPNPGMFPSGTPGGPYGGAAPGGPYGQPPPSSYGAQQPGLYGQGIHAEGAAPVWDMLSLWQREGAGELARMHNAS

SEQ ID NO: 57253 - protein, 381 aa, Homo sapiens
MHLLAILFCALWSAVLAENSDDYDLMYVNLDNEIDNGLHPTEDPTPCACGQEHSEWDKLFIMLENSQMRERMLLQATDDVLRGELQRLREELGRLAESLARPCAPGAPAEARLTSALDELLQATRDAGRRLARMEGAEAQRPEEAGRALAAVLEELRQTRADLHAVQGWAARSWLPAGCETAILFPMRSKKIFGSVHPVRPMRLESFSACIWVKATDVLNKTILFSYGTKRNPYEIQLYLSYQSIVFVVGGEENKLVAEAMVSLGRWTHLCGTWNSEEGLTSLWVNGELAATTVEMATGHIVPEGGILQIGQEKNGCCVGGGFDETLAFSGRLTGFNIWDSVLSNEEIRETGGAESCHIRGNIVGWGVTEIQPHGGAQYVS

SEQ ID NO: 57254 - protein, 473 aa, Homo sapiens
MGSGNWEVTGPPCGSRCERPPGLPRGVHGQFRSAVGLSGLRWFRRFQEVTWTHLQNIASNYNVSYNVDVRFRSLAEESQAVAQAVNRSQASVQGELAQLKAWVRKLQRRGRKVDTRLRALDLTLGERSQQRARERKAHKAQRDALQDSLARLEGLVHSQGARLAALEGRLPVAHPGTAALGPALVPTPTQPEELGPTSLKLQRDRQELRAASEHRGPPQDSSAPLQGRREPPASGSHRVLSGTAPKDPRQQAWSPQVPGEICGVGPTLVFPNASTRNVVFLSPGFVTALRALSFCSWVRTASGRLGTLLSYATEDNDNKLVLHGRDSLLPGSIHFVIGDPAFRELPLQLLLDGQWHHICVIWTSTQGRYWLHVDRRLVATGSRFREGYEIPPGGSLVLGQEQDSVGGGFDSSEAFVGSMSGLAIWDRALVPGEVANLAIGKEFPTGAILTLANAALAGGFVQGANCTCLERCP

SEQ ID NO: 57255 - protein, 478 aa, Homo sapiens
MGCSWRKTLSFFLVFVPIYLHGASSQEAAPVGPRKPFFERLRRLEEQFRRFQEVTWTHLQNIASNYNVSYNVDVRFRSLAEESQAVAQAVNRSQASVQGELAQLKAWVRKLQRRGRKVDTRLRALDLTLGERSQQRARERKAHKAQRDALQDSLARLEGLVHSQGARLAALEGRLPVAHPGTAALGPALVPTPTQPEELGPTSLKLQRDRQELRAASEHRGPPQDSSAPLQGRREPPASGSHRVLSGTAPKDPRQQAWSPQVPGEICGVGPTLVFPNASTRNVVFLSPGFVTALRALSFCSWVRTASGRLGTLLSYATEDNDNKLVLHGRDSLLPGSIHFVIGDPAFRELPLQLLLDGQWHHICVIWTSTQGRYWLHVDRRLVATGSRFREGYEIPPGGSLVLGQEQDSVGGGFDSSEAFVGSMSGLAIWDRALVPGEVANLAIGKEFPTGAILTLANAALAGGFVQGANCTCLERCP

SEQ ID NO: 57256 - protein, 388 aa, Homo sapiens
MKWLLLLGLVALSECIMYKVPLIRKKSLRRTLSERGLLKDFLKKHNLNPARKYFPQWKAPTLVDEQPLENYLDMEYFGTIGIGTPAQDFTVVFDTGSSNLWVPSVYCSSLACTNHNRFNPEDSSTYQSTSETVSITYGTGSMTGILGYDTVQVGGISDTNQIFGLSETEPGSFLYYAPFDGILGLAYPSISSSGATPVFDNIWNQGLVSQDLFSVYLSADDQSGSVVIFGGIDSSYYTGSLNWVPVTVEGYWQITVDSITMNGEAIACAEGCQAIVDTGTSLLTGPTSPIANIQSDIGASENSDGDMVVSCSAISSLPDIVFTINGVQYPVPPSAYILQSEGSCISGFQGMNLPTESGELWILGDVFIRQYFTVFDRANNQVGLAPVA

SEQ ID NO: 57257 - protein, 282 aa, Homo sapiens
MKWLLLLGLVALSECIMYKVPLIRKKSLRRTLSERGLLKDFLKKHNLNPARKYFPQWKAPTLVDEQPLENYLDMEYFGTIGIGTPAQDFTVVFDTGSSNLWVPSVYCSSLACTNHNRFNPEDSSTYQSTSETVSITYGTGSMTGILGYDTVQTVAIWRSAAMGLVSQDLFSVYLSADDQSGSVVIFGGIDSSYYTGSLNWVPVTVEGYWQITVDSITMNGEAIACAEGCQAIVDTGTSLLTGPTSPIANIQSDIGASENSDGDMVVSCSAISSLPDIVFTIN

SEQ ID NO: 57258 - protein, 249 aa, Homo sapiens
MTGILGYDTVQVGGISDTNQIFGLSETEPGSFLYYAPFDGILGLAYPSISSSGATPVFDNIWNQGLVSQDLFSVYLSADDQSGSVVIFGGIDSSYYTGSLNWVPVTVEGYWQITVDSITMNGEAIACAEGCQAIVDTGTSLLTGPTSPIANIQSDIGASENSDGDMVVSCSAISSLPDIVFTINGVQYPVPPSAYILQLPSEGSCISGFQGMNLPTESGELWILGDVFIRQYFTVFDRANNQVGLAPVA

SEQ ID NO: 57259 - protein, 388 aa, Homo sapiens
MKWLLLLGLVALSECIMYKVPLIRKKSLRRTLSERGLLKDFLKKHNLNPARKYFPQWEAPTLVDEQPLENYLDMEYFGTIGIGTPAQDFTVVFDTGSSNLWVPSVYCSSLACTNHNRFNPEDSSTYQSTSETVSITYGTGSMTGILGYDTVQVGGISDTNQIFGLSETEPGSFLYYAPFDGILGLAYPSISSSGATPVFDNIWNQGLVSQDLFSVYLSADDQSGSVVIFGGIDSSYYTGSLNWVPVTVEGYWQITVDSITMNGEAIACAEGCQAIVDTGTSLLTGPTSPIANIQSDIGASENSDGDMVVSCSAISSLPDIVFTINGVQYPVPPSAYILQSEGSCISGFQGMNLPTESGELWILGDVFIRQYFTVFDRANNQVGLAPVA

SEQ ID NO: 57260 - protein, 388 aa, Homo sapiens
MKWLLLLGLVALSECIMYKVPLIRKKSLRRTLSERGLLKDFLKKHNLNPARKYFPQWEAPTLVDEQPLENYLDMEYFGTIGIGTPAQDFTVVFDTGSSNLWVPSVYCSSLACTNHNRFNPEDSSTYQSTSETVSITYGTGSMTGILGYDTVQVGGISDTNQIFGLSETEPGSFLYYAPFDGILGLAYPSISSSGATPVFDNIWNQGLVSQDLFSVYLSADDKSGSVVIFGGIDSSYYTGSLNWVPVTVEGYWQITVDSITMNGETIACAEGCQAIVDTGTSLLTGPTSPIANIQSDIGASENSDGDMVVSCSAISSLPDIVFTINGVQYPVPPSAYILQSEGSCISGFQGMNVPTESGELWILGDVFIRQYFTVFDRANNQVGLAPVA

SEQ ID NO: 57261 - protein, 282 aa, Homo sapiens
MKWLLLLGLVALSECIMYKVPLIRKKSLRRTLSERGLLKDFLKKHNLNPARKYFPQWEAPTLVDEQPLENYLDMEYFGTIGIGTPAQDFTVVFDTGSSNLWVPSVYCSSLACTNHNRFNPEDSSTYQSTSETVSITYGTGSMTGILGYDTVQTVAIWRSAAMGLVSQDLFSVYLSADDQSGSVVIFGGIDSSYYTGSLNWVPVTVEGYWQITVDSITMNGEAIACAEGCQAIVDTGTSLLTGPTSPIANIQSDIGASENSDGDMVVSCSAISSLPDIVFTIN

SEQ ID NO: 57262 - protein, 249 aa, Homo sapiens; identical to SEQ ID NO: 57258

SEQ ID NO: 57263 - protein, 388 aa, Homo sapiens; identical to SEQ ID NO: 57260

SEQ ID NO: 57264 - protein, 282 aa, Homo sapiens
MKWLLLLGLVALSECIMYKVPLIRKKSLRRTLSERGLLKDFLKKHNLNPARKYFPQWEAPTLVDEQPLENYLDMEYFGTIGIGTPAQDFTVVFDTGSSNLWVPSVYCSSLACTNHNRFNPEDSSTYQSTSETVSITYGTGSMTGILGYDTVQTVAIWRSAAMGLVSQDLFSVYLSADDKSGSVVIFGGIDSSYYTGSLNWVPVTVEGYWQITVDSITMNGETIACAEGCQAIVDTGTSLLTGPTSPIANIQSDIGASENSDGDMVVSCSAISSLPDIVFTIN

SEQ ID NO: 57265 - protein, 249 aa, Homo sapiens
MTGILGYDTVQVGGISDTNQIFGLSETEPGSFLYYAPFDGILGLAYPSISSSGATPVFDNIWNQGLVSQDLFSVYLSADDKSGSVVIFGGIDSSYYTGSLNWVPVTVEGYWQITVDSITMNGETIACAEGCQAIVDTGTSLLTGPTSPIANIQSDIGASENSDGDMVVSCSAISSLPDIVFTINGVQYPVPPSAYILQLPSEGSCISGFQGMNVPTESGELWILGDVFIRQYFTVFDRANNQVGLAPVA

SEQ ID NO: 57266 - protein, 525 aa, Homo sapiens
MAAVVLAATRLLRGSGSWGCSRLRFGPPAYRRFSSGGAYPNIPLSSPLPGVPKPVFATVDGQEKFETKVTTLDNGLRVASQNKFGQFCTVGILINSGSRYEAKYLSGIAHFLEKLAFSSTARFDSKDEILLTLEKHGGICDCQTSRDTTMYAVSADSKGLDTVVALLADVVLQPRLTDEEVEMTRMAVQFELEDLNLRPDPEPLLTEMIHEAAYRENTVGLHRFCPTENVAKINREVLHSYLRNYYTPDRMVLAGVGVEHEHLVDCARKYLLGVQPAWGSAEAVDIDRSVAQYTGGIAKLERDMSNVSLGPTPIPELTHIMVGLESCSFLEEDFIPFAVLNMMMGGGGSFSAGGPGKGMFSRLYLNVLNRHHWMYNATSYHHSYEDTGLLCIHASADPRQVREMVEIITKEFILMGGTVDTVELERAKTQLTSMLMMNLESRPVIFEDVGRQVLATRSRKLPHELCTLIRNVKPEDVKRVASKMLRGKPAVAALGDLTDLPTYEHIQTALSSKDGRLPRTYRLFR

SEQ ID NO: 57267 - protein, 146 aa, Homo sapiens
MAAVVLAATRLLRGSGSWGCSRLRFGPPAYRRFSSGGAYPNIPLSSPLPGVPKPVFATVDGQEKFETKVTTLDNGLRVASQNKFGQFCTVGILINSGSRYEAKYLSGIAHFLEKLAFSSTARFDSKDEILLTLEKHGGICDCQTSR

SEQ ID NO: 57268 - protein, 394 aa, Homo sapiens
MKRNTLVELLTFWKNWHFRLLLDLTAKMKFCLRWKSMGVSVTARHQDEEVEMTRMAVQFELEDLNLRPDPEPLLTEMIHEAAYRENTVGLHRFCPTENVAKINREVLHSYLRNYYTPDRMVLAGVGVEHEHLVDCARKYLLGVQPAWGSAEAVDIDRSVAQYTGGIAKLERDMSNVSLGPTPIPELTHIMVGLESCSFLEEDFIPFAVLNMMMGGGGSFSAGGPGKGMFSRLYLNVLNRHHWMYNATSYHHSYEDTGLLCIHASADPRQVREMVEIITKEFILMGGTVDTVELERAKTQLTSMLMMNLESRPVIFEDVGRQVLATRSRKLPHELCTLIRNVKPEDVKRVASKMLRGKPAVAALGDLTDLPTYEHIQTALSSKDGRLPRTYRLFR

SEQ ID NO: 57269 - protein, 271 aa, Homo sapiens
YTGGIAKLERDMSNVSLGPTPIPELTHIMVGLESCSFLEEDFIPFAVLNMMMGGGGSFSAGGPGKGMFSRLYLNVLNRHHWMYNATSYHHSYEDTGLLCIHASADPRQVREMVEIITKEFILMGGTVDTVELERAKTQLTSMLMMNLESRPVIFEDVGRQVLATRSRKLPHELCTLIREYRRGSEGLPQASARLRGGRLALPQAVVGLWYVHHTQNLGPSPVVLSRGGQGQGRGVADLVSLPGPTMHLLPPWQVTPPSAPLGGAVTTAQSC

SEQ ID NO: 57270 - protein, 493 aa, Homo sapiens
MAAATGPSFWLGNETLKVPLALFALNRQRLCERLRKNPAVQAGSIVVLQGGEETQRYCTDTGVLFRQESFFHWAFGVTEPGCYGVIDVDTGKSTLFVPRLPASHATWMGKIHSKEHFKEKYAVDDVQYVDEIASVLTSQKPSVLLTLRGVNTDSGSVCREASFDGISKFEVNNTILHPEIVECRVFKTDMELEVLRYTNKISSEAHREVMKAVKVGMKEYELESLFEHYCYSRGGMRHSSYTCICGSGENSAVLHYGHAGAPNDRTIQNGDMCLFDMGGEYYCFASDITCSFPANGKFTADQKAVYEAVLRSSRAVMGAMKPGVWWPDMHRLADRIHLEELAHMGILSGSVDAMVQAHLGAVFMPHGLGHFLGIDVHDVGGYPEGVERIDEPGLRSLRTARHLQPGMVLTVEPGIYFIDHLLDEALADPARASFLNREVLQRFRGFGGVRIEEDVVVTDSGIELLTCVPRTVEEIEACMAGCDKAFTPFSGPK

SEQ ID NO: 57271 - protein, 452 aa, Homo sapiens
MAAATGPSFWLGNETLKVPLALFALNRQRLCERLRKNPAVQAGSIVVLQGGEETQRYCTDTGVLFRQESFFHWAFGVTEPGCYGVIDVDTGKSTLFVPRLPASHATWMGKIHSKEHFKEKYAVDDVQYVDEIASVLTSQKPSVLLTLRGVNTDSGSVCREASFDGISKFEVNNTILHPEIVECLFEHYCYSRGGMRHSSYTCICGSGENSAVLHYGHAGAPNDRTIQNGDMCLFDMGGEYYCFASDITCSFPANGKFTADQKAVYEAVLRSSRAVMGAMKPGVWWPDMHRLADRIHLEELAHMGILSGSVDAMVQAHLGAVFMPHGLGHFLGIDVHDVGGYPEGVERIDEPGLRSLRTARHLQPGMVLTVEPGIYFIDHLLDEALADPARASFLNREVLQRFRGFGGVRIEEDVVVTDSGIELLTCVPRTVEEIEACMAGCDKAFTPFSGPK

SEQ ID NO: 57272 - protein, 429 aa, Homo sapiens
MAAATGPSFWLGNETLKVPLALFALNRQRLCERLRKNPAVQAGSIVVLQGGEETQRYCTDTGVLFRQIASVLTSQKPSVLLTLRGVNTDSGSVCREASFDGISKFEVNNTILHPEIVECRVFKTDMELEVLRYTNKISSEAHREVMKAVKVGMKEYELESLFEHYCYSRGGMRHSSYTCICGSGENSAVLHYGHAGAPNDRTIQNGDMCLFDMGGEYYCFASDITCSFPANGKFTADQKAVYEAVLRSSRAVMGAMKPGVWWPDMHRLADRIHLEELAHMGILSGSVDAMVQAHLGAVFMPHGLGHFLGIDVHDVGGYPEGVERIDEPGLRSLRTARHLQPGMVLTVEPGIYFIDHLLDEALADPARASFLNREVLQRFRGFGGVRIEEDVVVTDSGIELLTCVPRTVEEIEACMAGCDKAFTPFSGPK

SEQ ID NO: 57273 - protein, 117 aa, Homo sapiens
MRASSFLIVVVFLIAGTLVLEAAVTGVPVKGQDTVKGRVPFNGQDPVKGQVSVKGQDKVKAQEPVKGPVSTKPGSCPIILIRCAMLNPPNRCLKDTDCPGIKKCCEGSCGMACFVPQ

SEQ ID NO: 57274 - protein, 243 aa, Homo sapiens
MARLWGALSLWPLWAAVPWGGAAAVGVRACSSTAAPDGVEGPALRRSYWRHLRRLVLGPPEPPFSHVCQVGDPVLRGVAAPVERAQLGGPELQRLTQRLVQVMRRRRCVGLSAPQLGVPRQVLALELPEALCRECPPRQRALRQMEPFPLRVFVNPSLRVLDSRLVTFPEGCESVAGFLACVPRFQAVQISGLDPNGEQVVWQASGWAARIIQHEMDHLQGCLFIDKMDSRTFTNVYWMKVND

SEQ ID NO: 57275 - protein, 97 aa, Homo sapiens
MVFVRRPWPALTTVLLALLVCLGALVDAYPIKPEAPREDASPEELNRYYASLRHYLNLVTRQRYGKRDGPDTLLSKTFFPDGEDRPVRSRSEGPDLW

SEQ ID NO: 57276 - protein, 663 aa, Homo sapiens
MAPKRVVQLSLKMPTHAVCVVGVEAHVDIHSDVPKGANSFRVSGSSGVEVFMVYNRTRVKEPIGKARWPLDTDADMVVSVGTASKELKDFKVRVSYFGEQEDQALGRSVLYLTGVDISLEVDTGRTGKVKRSQGDKKTWRWGPEGYGAILLVNCDRDNHRSAEPDLTHSWLMSLADLQDMSPMLLSCNGPDKLFDSHKLVLNVPFSDSKRVRVFCARGGNSLSDYKQVLGPQCLSYEVERQPGEQEIKFYVEGLTFPDADFLGLVSLSVSLVDPGTLPEVTLFTDTVGFRMAPWIMTPNTQPPEELYVCRVMDTHGSNEKFLEDMSYLTLKANCKLTICPQVENRNDRWIQDEMEFGYIEAPHKSFPVVFDSPRNRGLKDFPYKRILGPDFGYVTREIPLPGPSSLDSFGNLDVSPPVTVGGTEYPLGRILIGSSFPKSGGRQMARAVRNFLKAQQVQAPVELYSDWLSVGHVDEFLTFVPTSDQKGFRLLLASPSACLKLFQEKKEEGYGEAAQFDGLKHQAKRSINEMLADRHLQRDNLHAQKCIDWNRNVLKRELGLAESDIVDIPQLFFLKNFYAEAFFPDMVNMVVLGKYLGIPKPYGPIINGRCCLEEKVQSLLEPLGLHCIFIDDYLSYHELQGEIHCGTNVRRKPFPFKWWNMVP

SEQ ID NO: 57277 - protein, 178 aa, Homo sapiens
MARAVRNFLKAQQVQAPVELYSDWLSVGHVDEFLTFVPTSDQKGFRLLLASPSACLKLFQEKKEEGYGEAAQFDGLKHQAKRSINEMLADRHLQRDNLHAQVNMVVLGKYLGIPKPYGPIINGRCCLEEKVQSLLEPLGLHCIFIDDYLSYHELQGEIHCGTNVRRKPFPFKWWNMVP

SEQ ID NO: 57278 - protein, 134 aa, Homo sapiens
MLADRHLQRDNLHAQKCIDWNRNVLKRELGLAESDIVDIPQLFFLKNFYAEAFFPDMVNMVVLGKYLGIPKPYGPIINGRCCLEEKVQSLLEPLGLHCIFIDDYLSYHELQGEIHCGTNVRRKPFPFKWWNMVP

SEQ ID NO: 57279 - protein, 220 aa, Homo sapiens
MARAVRNFLKAQQVQAPVELYSDWLSVGHVDEFLTFVPTSDQKGFRLLLASPSACLKLFQEKKEEGYGEAAQFDGLKHQAKRSINEMLADRHLQRDNLHAQKCIDWNRNVLKRELGLAESDIVDIPQLFFLKNFYAEAFFPDMVNMVVLGKYLGIPKPYGPIINGRCCLEEKVQSLLEPLGLHCIFIDDYLSYHELQGEIHCGTNVRRKPFPFKWWNMVP

SEQ ID NO: 57280 - protein, 437 aa, Homo sapiens
MLRERTVRLQYGSRVEAVYVLGTYLWTDVYSAAPAGAQTFSLKHSEHVWVEVVRDGEAEEVATNGKQRWLLSPSTTLRVTMSQASTEASSDKVTVNYYDEEGSIPIDQAGLFLTAIEISLDVDADRDGVVEKNNPKKASWTWGPEGQGAILLVNCDRETPWLPKEDCRDEKVYSKEDLKDMSQMILRTKGPDRLPAGYEIVLYISMSDSDKVGVFYVENPFFGQRYIHILGRRKLYHVVKYTGGSAELLFFVEGLCFPDEGFSGLVSIHVSLLEYMAQDIPLTPIFTDTVIFRIAPWIMTPNILPPVSVFVCCMKDNYLFLKEVKNLVEKTNCELKVCFQYLNRGDRWIQDEIEFGYIEAPHKGFPVVLDSPRDGNLKDFPVKELLGPDFGYVTREPLFESVTSLDSFGNLEVSPPVTVNGKTYPLGRILIGSSFPL

SEQ ID NO: 57281 - protein, 665 aa, Homo sapiens
MLRERTVRLQYGSRVEAVYVLGTYLWTDVYSAAPAGAQTFSLKHSEHVWVEVVRDGEAEEVATNGKQRWLLSPSTTLRVTMSQASTEASSDKVTVNYYDEEGSIPIDQAGLFLTAIEISLDVDADRDGVVEKNNPKKASWTWGPEGQGAILLVNCDRETPWLPKEDCRDEKVYSKEDLKDMSQMILRTKGPDRLPAGYEIVLYISMSDSDKVGVFYVENPFFGQRYIHILGRRKLYHVVKYTGGSAELLFFVEGLCFPDEGFSGLVSIHVSLLEYMAQDIPLTPIFTDTVIFRIAPWIMTPNILPPVSVFVCCMKDNYLFLKEVKNLVEKTNCELKVCFQYLNRGDRWIQDEIEFGYIEAPHKGFPVVLDSPRDGNLKDFPVKELLGPDFGYVTREPLFESVTSLDSFGNLEVSPPVTVNGKTYPLGRILIGSSFPLSGGRRMTKVVRDFLKAQQVQAPVELYSDWLTVGHVDEFMSFVPIPGTKKFLLLMASTSACYKLFREKQKDGHGEAIMFKGLGGMSSKRITINKILSNESLVQENLYFQRCLDWNRDILKKELGLTEQDIIDLPALFKMDEDHRARAFFPNMVNMIVLDKDLGIPKPFGPQVEEECCLEMHVRGLLEPLGLECTFIDDISAYHKFLGEVHCGTNVRRKPFTFKWWHMVP

SEQ ID NO: 57282 - protein, 549 aa, Homo sapiens
MLRERTVRLQYGSRVEAVYVLGTYLWTDVYSAAPAGAQTFSLKHSEHVWVEVVRDGEAEEVATNGKQRWLLSPSTTLRVTMSQASTEASSDKVTVNYYDEEGSIPIDQAGLFLTAIEISLDVDADRDGVVEKNNPKKTRSSANAISTSWAGGSSTMWSSTRVAPRSCCSSWKASVSPTRASQAWSPSMSACWSTWPSMKDNYLFLKEVKNLVEKTNCELKVCFQYLNRGDRWIQDEIEFGYIEAPHKGFPVVLDSPRDGNLKDFPVKELLGPDFGYVTREPLFESVTSLDSFGNLEVSPPVTVNGKTYPLGRILIGSSFPLSGGRRMTKVVRDFLKAQQVQAPVELYSDWLTVGHVDEFMSFVPIPGTKKFLLLMASTSACYKLFREKQKDGHGEAIMFKGLGGMSSKRITINKILSNESLVQENLYFQRCLDWNRDILKKELGLTEQDIIDLPALFKMDEDHRARAFFPNMVNMIVLDKDLGIPKPFGPQVEEECCLEMHVRGLLEPLGLECTFIDDISAYHKFLGEVHCGTNVRRKPFTFKWWHMVP

SEQ ID NO: 57283 - protein, 664 aa, Homo sapiens
MSLQRIVRVSLEHPTSAVCVAGVETLVDIYGSVPEGTEMFEVYGTPGVDIYISPNMERGRERADTRRWRFDATLEIIVVMNSPSNDLNDSHVQISYHSSHEPLPLAYAVLYLTCVDISLDCDLNCEGRQDRNFVDKRQWVWGPSGYGGILLVNCDRDDPSCDVQDNCDQHVHCLQDLEDMSVMVLRTQGPAALFDDHKLVLHTSSYDAKRAQVFHICGPEDVCEAYRHVLGQDKVSYEVPRLHGDEERFFVEGLSFPDAGFTGLISFHVTLLDDSNEDFSASPIFTDTVVFRVAPWIMTPSTLPPLEVYVCRVRNNTCFVDAVAELARKAGCKLTICPQAENRNDRWIQDEMELGYVQAPHKTLPVVFDSPRNGELQDFPYKRILGPDFGYVTREPRDRSVSGLDSFGNLEVSPPVVANGKEYPLGRILIGGNLPGSSGRRVTQVVRDFLHAQKVQPPVELFVDWLAVGHVDEFLSFVPAPDGKGFRMLLASPGACFKLFQEKQKCGHGRALLFQGVVDDEQVKTISINQVLSNKDLINYNKFVQSCIDWNREVLKRELGLAECDIIDIPQLFKTERKKATAFFPDLVNMLVLGKHLGIPKPFGPIINGCCCLEEKVRSLLEPLGLHCTFIDDFTPYHMLHGEVHCGTNVCRKPFSFKWWNMVP

SEQ ID NO: 57284 - protein, 214 aa, Homo sapiens
MAQGTLIRVTPEQPTHAVCVLGTLTQLDICSSAPEDCTSFSINASPGVVVDIAHGPPAKKKSTGSSTWPLDPGVEVTLTMKVASGSTGDQKVQISYYGPKTPPVKALLYLTGVDGVSPCHPGWSAMHDLAHCNLRLQVQAILCFSVPSSWTTGACHHAWLIFVFLVEMEFHHVGQAGLELLTSGDLPASGSQSARITGMNHCARPSIFLILKYL

SEQ ID NO: 57285 - protein, 663 aa, Homo sapiens
MAQGTLIRVTPEQPTHAVCVLGTLTQLDICSSAPEDCTSFSINASPGVVVDIAHGPPAKKKSTGSSTWPLDPGVEVTLTMKVASGSTGDQKVQISYYGPKTPPVKALLYLTGVEISLCADITRTGKVKPTRAVKDQRTWTWGPCGQGAILLVNCDRDNLESSAMDCEDDEVLDSEDLQDMSLMTLSTKTPKDFFTNHTLVLHVARSEMDKVRVFQATRGKLSSKCSVVLGPKWPSHYLMVPGGKHNMDFYVEALAFPDTDFPGLITLTISLLDTSNLELPEAVVFQDSVVFRVAPWIMTPNTQPPQEVYACSIFENEDFLKSVTTLAMKAKCKLTICPEEENMDDQWMQDEMEIGYIQAPHKTLPVVFDSPRNRGLKEFPIKRVMGPDFGYVTRGPQTGGISGLDSFGNLEVSPPVTVRGKEYPLGRILFGDSCYPSNDSRQMHQALQDFLSAQQVQAPVKLYSDWLSVGHVDEFLSFVPAPDRKGFRLLLASPRSCYKLFQEQQNEGHGEALLFEGIKKKKQQKIKNILSNKTLREHNSFVERCIDWNRELLKRELGLAESDIIDIPQLFKLKEFSKAEAFFPNMVNMLVLGKHLGIPKPFGPVINGRCCLEEKVCSLLEPLGLQCTFINDFFTYHIRHGEVHCGTNVRRKPFSFKWWNMVP

SEQ ID NO: 57286 - protein, 127 aa, Homo sapiens
MAQGTLIRVTPEQPTHAVCVLGTLTQLDICSSAPEDCTSFSINASPGVVVDIAHGPPAKKKSTGSSTWPLDPGVEVTLTMKVASGSTGDQKVQISYYGPKTPPVKALLYLTGVDGVSPCHPGWSAMA

SEQ ID NO: 57287 - protein, 875 aa, Homo sapiens
MDTVHHMLLFGCNMPSSTGSYWFCDEGTCTDKANILYAWARNAPPTRLPKGVGFRVGGETGSKYFVLQVHYGDISAFRDNNKDCSGVSLHLTRLPQPLIAGMYLMMSVDTVIPAGEKVVNSDISCHYKNYPMHVFAYRVHTHHLGKVVSGYRVRNGQWTLIGRQSPQLPQAFYPVGHPVDVSFGDLLAARCVFTGEGRTEATHIGGTSSDEMCNLYIMYYMEAKHAVSFMTCTQNVAPDMFRTIPPEANIPIPVKSDMVMMHEHHKETEYKDKIPLLQQPKREEEEVLDQGDFYSLLSKLLGEREDVVHVHKYNPTEKAESESDLVAEIANVVQKKDLGRSDAREGAEHERGNAILVRDRIHKFHRLVSTLRPPESRVFSLQQPPPGEGTWEPEHTGDFHMEEALDWPGVYLLPGQVSGVALDPKNNLVIFHRGDHVWDGNSFDSKFVYQQIGLGPIEEDTILVIDPNNAAVLQSSGKNLFYLPHGLSIDKDGNYWVTDVALHQVFKLDPNNKEGPVLILGRSMQPGSDQNHFCQPTDVAVDPGTGAIYVSDGYCNSRIVQFSPSGKFITQWGEESSGSSPLPGQFTVPHSLALVPLLGQLCVADRENGRIQCFKTDTKEFVREIKHSSFGRNVFAISYIPGLLFAVNGKPHFGDQEPVQGFVMNFSNGEIIDIFKPVRKHFDMPHDIVASEDGTVYIGDAHTNTVWKFTLTEKLEHRSVKKAGIEVQEIKAEAVVETKMENKPTSSELQKMQEKQKLIKEPGSGVPVVLITTLLVIPVVVLLAIAIFIRWKKSRAFGDSEHKLETSSGRVLGRFRGKGSGGLNLGNFFASRKGYSRKGFDRLSTEGSDQEKEDDGSESEEEYSAPLPALAPSSS

SEQ ID NO: 57288 - protein, 974 aa, Homo sapiens
MAGRVPSLLVLLVFPSSCLAFRSPLSVFKRFKETTRPFSNECLGTTRPVVPIDSSDFALDIRMPGVTPKQSDTYFCMSMRIPVDEEAFVIDFKPRASMDTVHHMLLFGCNMPSSTGSYWFCDEGTCTDKANILYAWARNAPPTRLPKGVGFRVGGETGSKYFVLQVHYGDISAFRDNNKDCSGVSLHLTRLPQPLIAGMYLMMSVDTVIPAGEKVVNSDISCHYKNYPMHVFAYRVHTHHLGKVVSGYRVRNGQWTLIGRQSPQLPQAFYPVGHPVDVSFGDLLAARCVFTGEGRTEATHIGGTSSDEMCNLYIMYYMEAKHAVSFMTCTQNVAPDMFRTIPPEANIPIPVKSDMVMMHEHHKETEYKDKIPLLQQPKREEEEVLDQGDFYSLLSKLLGEREDVVHVHKYNPTEKAESESDLVAEIANVVQKKDLGRSDAREGAEHERGNAILVRDRIHKFHRLVSTLRPPESRVFSLQQPPPGEGTWEPEHTGDFHMEEALDWPGVYLLPGQVSGVALDPKNNLVIFHRGDHVWDGNSFDSKFVYQQIGLGPIEEDTILVIDPNNAAVLQSSGKNLFYLPHGLSIDKDGNYWVTDVALHQVFKLDPNNKEGPVLILGRSMQPGSDQNHFCQPTDVAVDPGTGAIYVSDGYCNSRIVQFSPSGKFITQWGEESSGSSPLPGQFTVPHSLALVPLLGQLCVADRENGRIQCFKTDTKEFVREIKHSSFGRNVFAISYIPGLLFAVNGKPHFGDQEPVQGFVMNFSNGEIIDIFKPVRKHFDMPHDIVASEDGTVYIGDAHTNTVWKFTLTEKLEHRSVKKAGIEVQEIKEAEAVVETKMENKPTSSELQKMQEKQKLIKEPGSGVPVVLITTLLVIPVVVLLAIAIFIRWKKSRAFGADSEHKLETSSGRVLGRFRGKGSGGLNLGNFFASRKGYSRKGFDRLSTEGSDQEKEDDGSESEEEYSAPLPALAPSSS

SEQ ID NO: 57289 - protein, 887 aa, Homo sapiens
MAGRVPSLLVLLVFPSSCLAFRSPLSVFKRFKETTRPFSNECLGTTRPVVPIDSSDFALDIRMPGVTPKQSDTYFCMSMRIPVDEEAFVIDFKPRASMDTVHHMLLFGCNMPSSTGSYWFCDEGTCTDKANILYAWARNAPPTRLPKGVGFRVGGETGSKYFVLQVHYGDISAFRDNNKDCSGVSLHLTRLPQPLIAGMYLMMSVDTVIPAGEKVVNSDISCHYKNYPMHVFAYRVHTHHLGKVVSGYRVRNGQWTLIGRQSPQLPQAFYPVGHPVDVSFGDLLAARCVFTGEGRTEATHIGGTSSDEMCNLYIMYYMEAKHAVSFMTCTQNVAPDMFRTIPPEANIPIPVKSDMVMMHEHHKETEYKDKIPLLQQPKREEEEVLDQGDFYSLLSKLLGEREDVVHVHKYNPTEKAESESDLVAEIANVVQKKDLGRSDAREGAEHERGNAILVRDRIHKFHRLVSTLRPPESRVFSLQQPPPGEGTWEPEHTGDFHMEEALDWPGVYLLPGQVSGVALDPKNNLVIFHRGDHVWDGNSFDSKFVYQQIGLGPIEEDTILVIDPNNAAVLQSSGKNLFYLPHGLSIDKDGNYWVTDVALHQVFKLDPNNKEGPVLILGRSMQPGSDQNHFCQPTDVAVDPGTGAIYVSDGYCNSRIVQFSPSGKFITQWGEESSGSSPLPGQFTVPHSLALVPLLGQLCVADRENGRIQCFKTDTKEFVREIKHSSFGRNVFAISYIPGLLFAVNGKPHFGDQEPVQGFVMNFSNGEIIDIFKPVRKHFDMPHDIVASEDGTVYIGDAHTNTVWKFTLTEKLEHRSVKKAGIEVQEIKGKGSGGLNLGNFFASRKGYSRKGFDRLSTEGSDQEKEDDGSESEEEYSAPLPALAPSSS

SEQ ID NO: 57290 - protein, 866 aa, Homo sapiens
MAGRVPSLLVLLVFPSSCLAFRSPLSVFKRFKETTRPFSNECLGTTRPVVPIDSSDFALDIRMPGVTPKQSDTYFCMSMRIPVDEEAFVIDFKPRASMDTVHHMLLFGCNMPSSTGSYWFCDEGTCTDKANILYAWARNAPPTRLPKGVGFRVGGETGSKYFVLQVHYGDISAFRDNNKDCSGVSLHLTRLPQPLIAGMYLMMSVDTVIPAGEKVVNSDISCHYKNYPMHVFAYRVHTHHLGKVVSGYRVRNGQWTLIGRQSPQLPQAFYPVGHPVDVSFGDLLAARCVFTGEGRTEATHIGGTSSDEMCNLYIMYYMEAKHAVSFMTCTQNVAPDMFRTIPPEANIPIPVKSDMVMMHEHHKETEYKDKIPLLQQPKREEEEVLDQDFHMEEALDWPGVYLLPGQVSGVALDPKNNLVIFHRGDHVWDGNSFDSKFVYQQIGLGPIEEDTILVIDPNNAAVLQSSGKNLFYLPHGLSIDKDGNYWVTDVALHQVFKLDPNNKEGPVLILGRSMQPGSDQNHFCQPTDVAVDPGTGAIYVSDGYCNSRIVQFSPSGKFITQWGEESSGSSPLPGQFTVPHSLALVPLLGQLCVADRENGRIQCFKTDTKEFVREIKHSSFGRNVFAISYIPGLLFAVNGKPHFGDQEPVQGFVMNFSNGEIIDIFKPVRKHFDMPHDIVASEDGTVYIGDAHTNTVWKFTLTEKLEHRSVKKAGIEVQEIKEAEAVVETKMENKPTSSELQKMQEKQKLIKEPGSGVPVVLITTLLVIPVVVLLAIAIFIRWKKSRAFGDSEHKLETSSGRVLGRFRGKGSGGLNLGNFFASRKGYSRKGFDRLSTEGSDQEKEDDGSESEEEYSAPLPALAPSSS

SEQ ID NO: 57291 - protein, 335 aa, Homo sapiens
MQPGSDQNHFCQPTDVAVDPGTGAIYVSDGYCNSRIVQFSPSGKFITQWGEESSGSSPLPGQFTVPHSLALVPLLGQLCVADRENGRIQCFKTDTKEFVREIKHSSFGRNVFAISYIPGLLFAVNGKPHFGDQEPVQGFVMNFSNGEIIDIFKPVRKHFDMPHDIVASEDGTVYIGDAHTNTVWKFTLTEKLEHRSVKKAGIEVQEIKEAEAVVETKMENKPTSSELQKMQEKQKLIKEPGSGVPVVLITTLLVIPVVVLLAIAIFIRWKKSRAFGGKGSGGLNLGNFFASRKGYSRKGFDRLSTEGSDQEKEDDGSESEEEYSAPLPALAPSSS

SEQ ID NO: 57292 - protein, 155 aa, Homo sapiens
MHEHHKETEYKDKIPLLQQPKREEEEVLDQGDFYSLLSKLLGEREDVVHVHKYNPTEKAESESDLVAEIANVVQKKDLGRSDAREGAEHERGNAILVRDRIHKFHRLVSTLRPPESRVFSLQQPPPGEGTWEPEHTGARREDMKCFQCKEMISVQ

SEQ ID NO: 57293 - protein, 973 aa, Homo sapiens [sequence omitted]

SEQ ID NO: 57294 - protein, 905 aa, Homo sapiens
MAGRVPSLLVLLVFPSSCLAFRSPLSVFKRFKETTRPFSNECLGTTRPVVPIDSSDFALDIRMPGVTPKQSDTYFCMSMRIPVDEEAFVIDFKPRASMDTVHHMLLFGCNMPSSTGSYWFCDEGTCTDKANILYAWARNAPPTRLPKGVGFRVGGETGSKYFVLQVHYGDISAFRDNNKDCSGVSLHLTRLPQPLIAGMYLMMSVDTVIPAGEKVVNSDISCHYKNYPMHVFAYRVHTHHLGKVVSGYRVRNGQWTLIGRQSPQLPQAFYPVGHPVDVSFGDLLAARCVFTGEGRTEATHIGGTSSDEMCNLYIMYYMEAKHAVSFMTCTQNVAPDMFRTIPPEANIPIPVKSDMVMMHEHHKETEYKDKIPLLQQPKREEEEVLDQGDFYSLLSKLLGEREDVVHVHKYNPTEKAESESDLVAEIANVVQKKDLGRSDAREGAEHERGNAILVRDRIHKFHRLVSTLRPPESRVFSLQQPPPGEGTWEPEHTGDFHMEEALDWPGVYLLPGQVSGVALDPKNNLVIFHRGDHVWDGNSFDSKFVYQQIGLGPIEEDTILVIDPNNAAVLQSSGKNLFYLPHGLSIDKDGNYWVTDVALHQVFKLDPNNKEGPVLILGRSMQPGSDQNHFCQPTDVAVDPGTGAIYVSDGYCNSRIVQFSPSGKFITQWGEESSGSSPLPGQFTVPHSLALVPLLGQLCVADRENGRIQCFKTDTKEFVREIKHSSFGRNVFAISYIPGLLFAVNGKPHFGDQEPVQGFVMNFSNGEIIDIFKPVRKHFDMPHDIVASEDGTVYIGDAHTNTVWKFTLTEKLEHRSVKKAGIEVQEIKDSEHKLETSSGRVLGRFRGKGSGGLNLGNFFASRKGYSRKGFDRLSTEGSDQEKEDDGSESEEEYSAPLPALAPSSS

SEQ ID NO: 57295 - protein, 29 aa, Homo sapiens
MAGRVPSLLVLLVFPSSCLAFRSPLSVFK

SEQ ID NO: 57296 - protein, 28 aa, Homo sapiens
MAGRVPSLLVLLVFPSSCLAFRSPLSVF

SEQ ID NO: 57297 - protein, 53 aa, Homo sapiens
MAGRVPSLLVLLVFPSSCLAFRSPLSVFKRFKETTRPFSNECLGTTRPVVPID

SEQ ID NO: 57298 - protein, 42 aa, Homo sapiens
MAGRVPSLLVLLVFPSSCLAFRSPLSVFKRFKETTRPFSNEC

SEQ ID NO: 57299 - protein, 68 aa, Homo sapiens
MAGRVPSLLVLLVFPSSCLAFRSPLSVFKRFKETTRPFSNECLGTTRPVVPIDSSDFALDIRMPGVTP

SEQ ID NO: 57300 - protein, 25 aa, Homo sapiens
MAGRVPSLLVLLVFPSSCLAFRSPL

SEQ ID NO: 57301 - protein, 166 aa, Homo sapiens
MAAIPPDSWQPPNVYLETSMGIIVLELYWKHAPKTCKNFAELARRGYYNGTKFHRIIKDFMIQGGDPTGTGRGGASIYGKQFEDELHPDLKFTGAGILAMANAGPDTNGSQFFVTLAPTQWLDGKHTIFGRVCQGIGMVNRVGMVETNSQDRPVDDVKIIKAYPSG

SEQ ID NO: 57302 - protein, 520 aa, Homo sapiens
MGKRQHQKDKMYITCAEYTHFYGGKKPDLPQTNFRRLPFDHCSLSLQPFVYPVCTPDGIVFDLLNIVPWLKKYGTNPSNGEKLDGRSLIKLNFSKNSEGKYHCPVLFTVFTNNTHIVAVRTTGNVYAYEAVEQLNIKAKNFRDLLTDEPFSRQDIITLQDPTNLDKFNVSNFYHVKNNMKIIDPDEEKAKQDPSYYLKNTNAETRETLQELYKEFKGDEILAATMKAPEKKKVDKLNAAHYSTGKVSASFTSTAMVPETTHEAAAIDEDVLRYQFVKKKGYVRLHTNKGDLNLELHCDLTPKTCENFIRLCKKHYYDGTIFHRSIRNFVIQGGDPTGTGTGGESYWGKPFKDEFRPNLSHTGRGILSMANSGPNSNRSQFFITFRSCAYLDKKHTIFGRVVGGFDVLTAMENVESDPKTDRPKEEIRIDATTVFVDPYEEADAQIAQERKTQLKVAPETKVKSSQPQAGSQGPQTFRQGVGKYINPAATKRAAEEEPSTSATVPMSKKKPSRGFGDFSSW

SEQ ID NO: 57303 - protein, 520 aa, Homo sapiens; identical to SEQ ID NO: 57302

SEQ ID NO: 57304 - protein, 520 aa, Homo sapiens; identical to SEQ ID NO: 57302

SEQ ID NO: 57305 - protein, 527 aa, Homo sapiens
MGKRQHQKDKMYITCAEYTHFYGGKKPDLPQTNFRRLPFDHCSLSLQPFVYPVCTPDGIVFDLLNIVPWLKKYGTNPSNGEKLDGRSLIKLNFSKNSEGKYHCPVLFTVFTNNTHIVAVRTTGNVYAYEAVEQLNIKAKNFRDLLTDEPFSRQDIITLQDPTNLDKFNVSNFYHVKNNMKIIDPDEEKAKQDPSYYLKNTNAETRETLQELYKEFKGDEILAATMKAPEKKKVDKLNAAHYSTGKVSASFTSTAMVPETTHEAAAIDEDVLRYQFVKKKGYVRLHTNKGDLNLELHCDLTPKTCENFIRLCKKHYYDGTIFHRSIRNFVIQGGDPTGTGTGGESYWGKPFKDEFRPNLSHTGRGILSMANSGPNSNRSQFFITFRSCAYLDKKHTIFGRVVGGFDVLTAMENVESDPKTDRPKEEIRIDATTVFVDPYEEADAQIAQERKTQLKVAPETKVKSSQPQAGSQGPQTFRQGVGKYINPAATEQQRKSPQPVPLSPCPRRSPVGVLGTSAPGSSRLPDDH

SEQ ID NO: 57306 - protein, 489 aa, Homo sapiens
MGKRQHQKDKMYITCAEYTHFYGGKKPDLPQTNFRRLPFDHCRNIVPWLKKYGTNPSNGEKLDGRSLIKLNFSKNSEGKYHCPVLFTVFTNNTHIVAVRTTGNVYAYEAVEQLNIKAKNFRDLLTDEPFSRQDIITLQDPTNLDKFNVSNFYHVKNNMKIIDPDEEKAKQDPSYYLKNTNAETRETLQELYKEFKGDEILAATMKAPEKKKVDKLNAAHYSTGKVSASFTSTAMVPETTHEAAAIDEDVLRYQFVKKKGYVRLHTNKGDLNLELHCDLTPKTCENFIRLCKKHYYDGTIFHRSIRNFVIQGGDPTGTGTGGESYWGKPFKDEFRPNLSHTGRGILSMANSGPNSNRSQFFITFRSCAYLDKKHTIFGRVVGGFDVLTAMENVESDPKTDRPKEEIRIDATTVFVDPYEEADAQIAQERKTQLKEASSRGRALNQCHCPHVQEEAQSGFWGLQLLVAAATCRLYLCPSFSHQSLMLKLQA

SEQ ID NO: 57307 - protein, 520 aa, Homo sapiens; identical to SEQ ID NO: 57302

SEQ ID NO: 57308 - protein, 492 aa, Homo sapiens
MAVLLETTLGDVVIDLYTEERPRACLNFLKLCKIKYYNYCLIHNVQRDFIIQTGDPTGTGRGGESIFGQLYGDQASFFEAEKVPRIKHKKKGTVSMVNNGSDQHGSQFLITTGENLDYLDGVHTVFGEVTEGMDIIKKINETFVDKDFVPYQDIRINHTVILDDPFDDPPDLLIPDRSPEPTREQLDSGRIGADEEIDDFKGRSAEEVEEIKAEKEAKTQAILLEMVGDLPDADIKPPENVLFVCKLNPVTTDEDLEIIFSRFGPIRSCEVIRDWKTGESLCYAFIEFEKEEDCEKAFFKMDNVLIDDRRIHVDFSQSVAKVKWKGKGGKYTKSDFKEYEKEQDKPPNLVLKDKVKPKQDTKYDLILDEQAEDSKSSHSHTSKKHKKKTHHCSEEKEDEDYMPIKNTNQDIYREMGFGHYEEEESCWEKQKSEKRDRTQNRSRSRSRERDGHYSNSHKSKYQTDLYERERSKKRDRSRSPKKSKDKEKSKYR

SEQ ID NO: 57309 - protein, 127 aa, Homo sapiens
MSRPKTQNQVTHTQVKNTRRKPITVLKRKKMRTTCQSKILIRISIEKWGLVTMKKKKAVGRNKRVKRETELRTEVVADLERGMAIIVIVINQNTKQIFMKEKGVKRETEAEVQRSPKIKKNLSIDER

SEQ ID NO: 57310 - protein, 105 aa, Homo sapiens
MCQGGDFTRHNGTGGKSIYGEKFEDENFILKHTGPGILSMANAGPNTNGSQFFICTAKTEWLDGKHVVFGKVKEGMNIVEAMERFGSRNGKTSKKITIADCGQLE

SEQ ID NO: 57311 - protein, 129 aa, Homo sapiens
MVNPTVFFDIAVDGEPLGRVSFELFADKVPKTAENFRALSTGEKGFGYKGSCFHRIIPGFMCQGGDFTRHNGTGGKSICTAKTEWLDGKHVVFGKVKEGMNIVEAMERFGSRNGKTSKKITIADCGQLE

SEQ ID NO: 57312 - protein, 165 aa, Homo sapiens
MVNPTVFFDIAVDGEPLGRVSFELFADKVPKTAENFRALSTGEKGFGYKGSCFHRIIPGFMCQGGDFTRHNGTGGKSIYGEKFEDENFILKHTGPGILSMANAGPNTNGSQFFICTAKTEWLDGKHVVFGKVKEGMNIVEAMERFGSRNGKTSKKITIADCGQLE

SEQ ID NO: 57313 - protein, 164 aa, Homo sapiens
MVNSVVFFDITVDGKPLGRISIKLFADKILKTAENFRALSTGEKGFRYKGSCFHRIIPGFMCQGGDFTRHNGTGDKSIYGEKFDDENLIRKHTGSGILSMANAGPNTNGSQFFICAAKTEWLDGKHVAFGKVKERVNIVEAMEHFGYRNSKTSKKITIADCGQF

SEQ ID NO: 57314 - protein, 216 aa, Homo sapiens
MLRLSERNMKVLLAAALIAGSVFFLLLPGPSAADEKKKGPKVTVKVYFDLRIGDEDVGRVIFGLFGKTVPKTVDNFVALATGEKGFGYKNSKFHRVIKDFMIQGGDFTRGDGTGGKSIYGERFPDENFKLKHYGPGWVSMANAGKDTNGSQFFITTVKTAWLDGKHVVFGKVLEGMEVVRKVESTKTDSRDKPLKDVIIADCGKIEVEKPFAIAKE

SEQ ID NO: 57315 - protein, 212 aa, Homo sapiens
MGPGPRLLLPLVLCVGLGALVFSSGAEGFRKRGPSVTAKVFFDVRIGDKDVGRIVIGLFGKVVPKTVENFVALATGEKGYGYKGSKFHRVIKDFMIQGGDITTGDGTGGVSIYGETFPDENFKLKHYGIGWVSMANAGPDTNGSQFFITLTKPTWLDGKHVVFGKVIDGMTVVHSIELQATDGHDRPLTNCSIINSGKIDVKTPFVVEIADW

SEQ ID NO: 57316 - protein, 370 aa, Homo sapiens
MSHPSPQAKPSNPSNPRVFFDVDIGGERVGRIVLELFADIVPKTAENFRALCTGEKGIGHTTGKPLHFKGCPFHRIIKKFMIQGGDFSNQNGTGGESIYGEKFEDENFHYKHDREGLLSMANAGRNTNGSQFFITTVPTPHLDGKHVVFGQVIKGIGVARILENVEVKGEKPAKLCVIAECGELKEGDDGGIFPKDGSGDSHPDFPEDADIDLKDVDKILLITEDLKNIGNTFFKSQNWEMAIKKYAEVLRYVDSSKAVIETADRAKLQPIALSCVLNIGACKLKMSNWQGAIDSCLEALELDPSNTKALYRRAQGWQGLKEYDQALADLKKAQGIAPEDKAIQAELLKVKQKIKAQKDKEKAVYAKMFA

SEQ ID NO: 57317 - protein, 207 aa, Homo sapiens
MLALRCGSRWLGLLSVPRSVPLRLPAARACSKGSGDPSSSSSSGNPLVYLDVDANGKPLGRVVLELKADVVPKTAENFRALCTGEKGFGYKGSTFHRVIPSFMCQAGDFTNHNGTGGKSIYGSRFPDENFTLKHVGPGVLSMANAGPNTNGSQFFICTIKTDWLDGKHVVFGHVKEGMDVVKKIESFGSKSGRTSKKIVITDCGQLS

SEQ ID NO: 57318 - protein, 155 aa, Homo sapiens
MLALRCGSRWLGLLSVPRSVPLRLPAARACSKGSGDPSSSSSSGNPLVYLDVDANGKPLGRVVLELKADVVPKTAENFRALCTGEKGFGYKGSTFHRVIPSFMCQAGDFTNHNGTGGKSIYGSRFPDENFTLKHVGPGWMASMLCSVTSKRAWTS

SEQ ID NO: 57319 - protein, 165 aa, Homo sapiens
  VARIANT 1: note = MOD_RES - Any amino acid
XSSSSSSGNPLVYLDVDANGKPLGRVVLELKADVVPKTAENFRALCTGEKGFGYKGSTFHRVIPSFMCQAGDFTNHNGTGGKSIYGSRFPDENFTLKHVGPGVLSMANAGPNTNGSQFFICTIKTDWSMALDDIALHCCSPGSPVLTGWMASMLCSVTSKRAWTS

SEQ ID NO: 57320 - protein, 754 aa, Homo sapiens
MGIKVQRPRCFFDIAINNQPAGRVVFELFSDVCPKTCENFRCLCTGEKGTGKSTQKPLHYKSCLFHRVVKDFMVQGGDFSEGNGRGGESIYGGFFEDESFAVKHNKEFLLSMANRGKDTNGSQFFITTKPTPHLDGHHVVFGQVISGQEVVREIENQKTDAASKPFAEVRILSCGELIPKSKVKKEEKKRHKSSSSSSSSSSDSDSSSDSQSSSDSSDSESATEEKSKKRKKKHRKNSRKHKKEKKKRKKSKKSASSESEAENLEAQPQSTVRPEEIPPIPENRFLMRKSPPKADEKERKNRERERERECNPPNSQPASYQRRLLVTRSGRKIKGRGPRRYRTPSRSRSRDRFRRSETPPHWRQEMQRAQRMRVSSGERWIKGDKSELNEIKENQRSPVRVKERKITDHRNVSESPNRKNEKEKKVKDHKSNSKERDIRRNSEKDDKYKNKVKKRAKSKSRSKSKEKSKSKERDSKHNRNEEKRMRSRSKGRDHENVKEKEKQSDSKGKDQERSRSKEKSKQLESKSNEHDHSKSKEKDRRAQSRSRECDITKGKHSYNSRTRERSRSRDRSRRVRSRTHDRDRSRSKEYHRYREQEYRRRGRSRSRERRTPPGRSRSKDRRRRRRDSRSSEREESQSRNKDKYRNQESKSSHRKENSESEKRMYSKSRDHNSSNNSREKKADRDQSPFSKIKQSSQDNELKSSMLKNKEDEKIRSSVEKENQKSKGQENDHVHEKNKKFDHESSPGTDEDKSG

SEQ ID NO: 57321 - protein, 246 aa, Homo sapiens
MGIKVQRPRCFFDIAINNQPAGRVVFELFSDVCPKTCENFRCLCTGEKGTGKSTQKPLHYKSCLFHRVVKDFMVQGGDFSEGNGRGGESIYGGFFEDESFAVKHNKEFLLSMANRGKDTNGSQFFITTKPTPHLDGHHVVFGQVISGQEVVREIENQKTDAASKPFAEVRILSCGELIPKSKVKKEEKKRHKSSSSSSSSSSDSDSSSDSQSSSDSSDSESATEEKSKKRKKKHRKNSRKHKKEKK

SEQ ID NO: 57322 - protein, 59 aa, Homo sapiens
MGIKVQRPRCFFDIAINNQPAGRVVFELFSDVCPKTCENFRCLCTGEKGTGKSTQKPLH

SEQ ID NO: 57323 - protein, 754 aa, Homo sapiens; identical to SEQ ID NO: 57320

SEQ ID NO: 57324 - protein, 448 aa, Homo sapiens
MGIKVQRPRCFFDIAINNQPAGRVVFELFSDVCPKTCENFRCLCTGEKGTGKSTQKPLHYKSCLFHRVVKDFMVQGGDFSEGNGRGGESIYGGFFEDESFAVKHNKEFLLSMANRGKDTNGSQFFITTKPTPHLDGHHVVFGQVISGQEVVREIENQKTDAASKPFAEVRILSCGELIPKSKVKKEEKKRHKSSSSSSSSSSDSDSSSDSQSSSDSSDSESATEEKSKKRKKKHRKNSRKHKKEKKKRKKSKKSASSESEAENLEAQPQSTVRPEEIPPIPENRFLMRKSPPKADEKERKNRERERERECNPPNSQPASYQRRLLVTRSGRKIKGRGPRRYRTPSRSRSRDRFRRSETPPHWRQEMQRAQRMRVSSGERWIKGDKSELNEIKENQRSPVRVKERKITDHRNVSESPNRKNEKEKKVKDHKSNSKERDIRRKKKKKKKK

SEQ ID NO: 57325 - protein, 177 aa, Homo sapiens
MAVANSSPVNPVVFFDVSIGGQEVGRMKIELFADVVPKTAENFRQFCTGEFRKDGVPIGYKGSTFHRVIKDFMIQGGDFVNGDGTGVASIYRGPFADENFKLRHSAPGLLSMANSGPSTNGCQFFITCSKCDWLDGKHVVFGKIIDGLLVMRKIENVPTGPNNKPKLPVVISQCGEM

SEQ ID NO: 57326 - protein, 57 aa, Homo sapiens
MKIELFADVVPKTAENFRQFCTGEFRSVSDVFDFFACSRGVFWGCSEGIGEPPAGLE

SEQ ID NO: 57327 - protein, 134 aa, Homo sapiens
MIAGDSDRRKDGVPIGYKGSTFHRVIKDFMIQGGDFVNGDGTGVASIYRGPFADENFKLRHSAPGLLSMANSGPSTNGCQFFITCSKCDWLDGKHVVFGKIIDGLLVMRKIENVPTGPNNKPKLPVVISQCGEM

SEQ ID NO: 57328 - protein, 68 aa, Homo sapiens
MVNWKGLVLPAVTPSLFLFGYRKDGVPIGYKGSTFHRVIKDFMIQGGDFVNVSTIPFLSKTRSFSFCC

SEQ ID NO: 57329 - protein, 144 aa, Homo sapiens
MKIELFADVVPKTAENFRQFCTGEFRKDGVPIGYKGSTFHRVIKDFMIQGGDFVNGDGTGVASIYRGPFADENFKLRHSAPGLLSMANSGPSTNGCQFFITCSKCDWLDGKHVVFGKIIDGLLVMRKIENVPTGPNNKPKLPVV

SEQ ID NO: 57330 - protein, 134 aa, Homo sapiens; identical to SEQ ID NO: 57327

SEQ ID NO: 57331 - protein, 179 aa, Homo sapiens
MPSKSLVMEYLAHPSTLGLAVGVACGMCLGWSLRVCFGMLPKSKTSKTHTDTESEASILGDSGEYKMILVVRNDLKMGKGKVAAQCSHAAVSAYKQIQRRNPEMLKQWEYCGQPKVVVKAPDEETLIALLAHAKMLGLTVSLIQDAGRTQIAPGSQTVLGIGPGPADLIDKVTGHLKLY

SEQ ID NO: 57332 - protein, 180 aa, Homo sapiens
MMPSKSLVMEYLAHPSTLGLAVGVACGMCLGWSLRVCFGMLPKSKTSKTHTDTESEASILGDSGEYKMILVVRNDLKMGKGKVAAQCSHAAVSAYKQIQRRNPEMLKQWEYCGQPKVVVKAPDEETLIALLAHAKMLGLTVSLIQDAGRTQIAPGSQTVLGIGPGPADLIDKVTGHLKLY

SEQ ID NO: 57333 - protein, 179 aa, Homo sapiens; identical to SEQ ID NO: 57331

SEQ ID NO: 57334 - protein, 555 aa, Homo sapiens
MAARLLLLGILLLLLPLPVPAPCHTAARSECKRSHKFVPGAWLAGEGVDVTSLRRSGSFPVDTQRFLRPDGTCTLCENALQEGTLQRLPLALTNWRAQGSGCQRHVTRAKVSSTEAVARDAARSIRNDWKVGLDVTPKPTSNVHVSVAGSHSQAANFAAQKTHQDQYSFSTDTVECRFYSFHVVHTPPLHPDFKRALGDLPHHFNASTQPAYLRLISNYGTHFIRAVELGGRISALTALRTCELALEGLTDNEVEDCLTVEAQVNIGIHGSISAEAKACEEKKKKHKMTASFHQTYRERHSEVVGGHHTSINDLLFGIQAGPEQYSAWVNSLPGSPGLVDYTLEPLHVLLDSQDPRREALRRALSQYLTDRARWRDCSRPCPPGRQKSPRDPCQCVCHGSAVTTQDCCPRQRGLAQLEVTFIQAWGLWGDWFTATDAYVKLFFGGQELRTSTVWDNNNPIWSVRLDFGDVLLATGGPLRLQVWDQDSGRDDDLLGTCDQAPKSGSHEVRCNLNHGHLKFRYHARCLPHLGGGTCLDYVPQMLLGEPPGNRSGAVW

SEQ ID NO: 57335 - protein, 555 aa, Homo sapiens; identical to SEQ ID NO: 57334

SEQ ID NO: 57336 - protein, 555 aa, Homo sapiens; identical to SEQ ID NO: 57334

SEQ ID NO: 57337 - protein, 147 aa, Homo sapiens
MEARSRSAEELRRAELVEIIVETEAQTGVSGINVAGGGKEGIFVRELREDSPAARSLSLQEGDQLLSARVFFENFKYEDALRLLQCAEPYKVSFCLKRTVPTGDLALRPGTVSGYEIKGPRAKVAKLVRVLSPAPALDCPSDPVSAP

SEQ ID NO: 57338 - protein, 1461 aa, Homo sapiens
MEARSRSAEELRRAELVEIIVETEAQTGVSGINVAGGGKEGIFVRELREDSPAARSLSLQEGDQLLSARVFFENFKYEDALRLLQCAEPYKVSFCLKRTVPTGDLALRPGTVSGYEIKGPRAKVAKLNIQSLSPVKKKKMVPGALGVPADLAPVDVEFSFPKFSRLRRGLKAEAVKGPVPAAPARRRLQLPRLRVREVAEEAQAARLAAAAPPPRKAKVEAEVAAGARFTAPQVELVGPRLPGAEVGVPQVSAPKAAPSAEAAGGFALHLPTLGLGAPAPPAVEAPAVGIQVPQVELPALPSLPTLPTLPCLETREGAVSVVVPTLDVAAPTVGVDLALPGAEVEARGEAPEVALKMPRLSFPRFGARAKEVAEAKVAKVSPEARVKGPRLRMPTFGLSLLEPRPAAPEVVESKLKLPTIKMPSLGIGVSGPEVKVPKGPEVKLPKAPEVKLPKVPEAALPEVRLPEVELPKVSEMKLPKVPEMAVPEVRLPEVELPKVSEMKLPKVPEMAVPEVRLPEVQLLKVSEMKLPKVPEMAVPEVRLPEVQLPKVSEMKLPEVSEVAVPEVRLPEVQLPKVPEMKVPEMKLPKVPEMKLPEMKLPEVQLPKVPEMAVPDVHLPEVQLPKVPEMKLPEMKLPEVKLPKVPEMAVPDVHLPEVQLPKVPEMKLPKMPEMAVPEVRLPEVQLPKVSEMKLPKVPEMAVPDVHLPEVQLPKVCEMKVPDMKLPEIKLPKVPEMAVPDVHLPEVQLPKVSEIRLPEMQVPKVPDVHLPKAPEVKLPRAPEVQLKATKAEQAEGMEFGFKMPKMTMPKLGRAESPSRGKPGEAGAEVSGKLVTLPCLQPEVDGEAHVGVPSLTLPSVELDLPGALGLQGQVPAAKMGKGERVEGPEVAAGVREVGFRVPSVEIVTPQLPAVEIEEGRLEMIETKVKPSSKFSLPKFGLSGPKVAKAEAEGAGRATKLKVSKFAISLPKARVGAEAEAKGAGEAGLLPALDLSIPQLSLDAHLPSGKVEVAGADLKFKGPRFALPKFGVRGRDTEAAELVPGVAELEGKGWGWDGRVKMPKLKMPSFGLARGKEAEVQGDRASPGEKAESTAVQLKIPEVELVTLGAQEEGRAEGAVAVSGMQLSGLKVSTAGQVVTEGHDAGLRMPPLGISLPQVELTGFGEAGTPGQQAQSTVPSAEGTAGYRVQVPQVTLSLPGAQVAGGELLVGEGVFKMPTVTVPQLELDVGLSREAQAGEAATGEGGLRLKLPTLGARARVGGEGAEEQPPGAERTFCLSLPDVELSPSGGNHAEYQVAEGEGEAGHKLKVRLPRFGLVRAKEGAEEGEKAKSPKLRLPRVGFSQSEMVTGEGSPSPEEEEEEEEEGSGEGASGRRGRVRVRLPRVGLAAPSKASRGQEGDAAPKSPVREKSPKFRFPRVSLSPKARSGSGDQEEGGLRVRLPSVGFSETGAPGPARMEGAQAAAV

SEQ ID NO: 57339 - protein, 1396 aa, Homo sapiens
MEARSRSAEELRRAELVEIIVETEAQTGVSGINVAGGGKEGIFVRELREDSPAARSLSLQEGDQLLSARVFFENFKYEDALRLLQCAEPYKVSFCLKRTVPTGDLALRPGTVSGYEIKGPRAKVAKLNIQSLSPVKKKKMVPGALGVPADLAPVDVEFSFPKFSRLRRGLKAEAVKGPVPAAPARRRLQLPRLRVREVAEEAQAARLAAAAPPPRKAKVEAEVAAGARFTAPQVELVGPRLPGAEVGVPQVSAPKAAPSAEAAGGFALHLPTLGLGAPAPPAVEAPAVGIQVPQVELPALPSLPTLPTLPCLETREGAVSVVVPTLDVAAPTVGVDLALPGAEVEARGEAPEVALKMPRLSFPRFGARAKEVAEAKVAKVSPEARVKGPRLRMPTFGLSLLEPRPAAPEVVESKLKLPTIKMPSLGIGVSGPEVKVPKGPEVKLPKAPEVKLPKVPEAALPEVRLPEVELPKVSEMKLPKVPEMAVPEVRLPEVELPKVSEMKLPKVPEMAVPEVRLPEVQLLKVSEMKLPKVPEMAVPEVRLPEVQLPKVSEMKLPEVSEVAVPEVRLPEVQLPKVPEMKVPEMKLPKVPEMKLPEMKLPEVQLPKVPEMAVPDVHLPEVQLPKVPEMKLPEMKLPEVKLPKVPEMAVPDVHLPEVQLPKVPEMKLPKMPEMAVPEVRLPEVQLPKVSEMKLPKVPEMAVPDVHLPEVQLPKVCEMKVPDMKLPEIKLPKVPEMAVPDVHLPEVQLPKVSEIRLPEMQVPKVPDVHLPKAPEVKLPRAPEVQLKATKAEQAEGMEFGFKMPKMTMPKLGRAESPSRGKPGEAGAEVSGKLVTLPCLQPEVDGEAHVGVPSLTLPSVELDLPGALGLQGQVPAAKMGKGERVEGPEVAAGVREVGFRVPSVEIVTPQLPAVEIEEGRLEMIETKVKPSSKFSLPKFGLSGPKVAKAEAEGAGRATKLKVSKFAISLPKARVGAEAEAKGAGEAGLLPALDLSIPQLSLDAHLPSGKVEVAGADLKFKGPRFALPKFGVRGRDTEAAELVPGVAELEGKGWGWDGRVKMPKLKVSTAGQVVTEGHDAGLRMPPLGISLPQVELTGFGEAGTPGQQAQSTVPSAEGTAGYRVQVPQVTLSLPGAQVAGGELLVGEGVFKMPTVTVPQLELDVGLSREAQAGEAATGEGGLRLKLPTLGARARVGGEGAEEQPPGAERTFCLSLPDVELSPSGGNHAEYQVAEGEGEAGHKLKVRLPRFGLVRAKEGAEEGEKAKSPKLRLPRVGFSQSEMVTGEGSPSPEEEEEEEEEGSGEGASGRRGRVRVRLPRVGLAAPSKASRGQEGDAAPKSPVREKSPKFRFPRVSLSPKARSGSGDQEEGGLRVRLPSVGFSETGAPGPARMEGAQAAAV

SEQ ID NO: 57340 - protein, 737 aa, Homo sapiens
MEVEQEQRRRKVEAGRTKLAHFRQRKTKGDSSHSEKKTAKRKGSAVDASVQEESPVTKEDSALCGGGDICKSTSCDDTPDGAGGAFAAQPEDCDGEKREDLEQLQQKQVNDHPPEQCGMFTVSDHPPEQHGMFTVGDHPPEQRGMFTVSDHPPEQRGMFTISDHQPEQRGMFTVSDHTPEQRGIFTISDHPAEQRGMFTKECEQECELAITDLESGREDEAGLHQSQAVHGLELEALRLSLSNMHTAQLELTQANLQKEKETALTELREMLNSRRAQELALLQSRQQHELELLREQHAREKEEVVLRCGQEAAELKEKLQSEMEKNAQIVKTLKEDWESEKDLCLENLRKELSAKHQSEMEDLQNQFQKELAEQRAELEKIFQDKNQAERALRNLESHHQAAIEKLREDLQSEHGRCLEDLEFKFKESEKEKQLELENLQASYEDLKAQSQEEIRRLWSQLDSARTSRQELSELHEQLLARTSRVEDLEQLKQREKTQHESELEQLRIYFEKKLRDAEKTYQEDLTLLQQRLQGAREDALLDSVEVGLSCVGLEEKPEKGRKDHVDELEPERHKESLPRFQAELEESHRHQLEALESPLCIQHEGHVSDRCCVETSALGHEWRLEPSEGHSQELPWVHLQGVQDGDLEADTERAARVLGLETEHKVQLSLLQTELKEEIELLKIENRNLYGKLQHETRLKDDLEKVKHNLIEDHQKELNNAKQKTELMKQEFQRKET

SEQ ID NO: 57341 - protein, 3336 aa, Homo sapiens
MEVEQEQRRRKVEAGRTKLAHFRQRKTKGDSSHSEKKTAKRKGSAVDASVQEESPVTKEDSALCGGGDICKSTSCDDTPDGAGGAFAAQPEDCDGEKREDLEQLQQKQVNDHPPEQCGMFTVSDHPPEQHGMFTVGDHPPEQRGMFTVSDHPPEQHGMFTVSDHPPEQRGMFTISDHQPEQRGMFTVSDHTPEQRGIFTISDHPAEQRGMFTKECEQECELAITDLESGREDEAGLHQSQAVHGLELEALRLSLSNMHTAQLELTQANLQKEKETALTELREMLNSRRAQELALLQSRQQHELELLREQHAREKEEVVLRCGQEAAELKEKLQSEMEKNAQIVKTLKEDWESEKDLCLENLRKELSAKHQSEMEDLQNQFQKELAEQRAELEKIFQDKNQAERALRNLESHHQAAIEKLREDLQSEHGRCLEDLEFKFKESEKEKQLELENLQASYEDLKAQSQEEIRRLWSQLDSARTSRQELSELHEQLLARTSRVEDLEQLKQREKTQHESELEQLRIYFEKKLRDAEKTYQEDLTLLQQRLQGAREDALLDSVEVGLSCVGLEEKPEKGRKDHVDELEPERHKESLPRFQAELEESHRHQLEALESPLCIQHEGHVSDRCCVETSALGHEWRLEPSEGHSQELPWVHLQGVQDGDLEADTERAARVLGLETEHKVQLSLLQTELKEEIELLKIENRNLYGKLQHETRLKDDLEKVKHNLIEDHQKELNNAKQKTELMKQEFQRKETDWKVMKEELQREAEEKLTLMLLELREKAESEKQTIINKFELREAEMRQLQDQQAAQILDLERSLTEQQGRLQQLEQDLTSDDALHCSQCGREPPTAQDGELAALHVKEDCALQLMLARSRFLEERKEITEKFSAEQDAFLQEAQEQHARELQLLQERHQQQLLSVTAELEARHQAALGELTASLESKQGALLAARVAELQTKHAADLGALETRHLSSLDSLESCYLSEFQTIREEHRQALELLRADFEEQLWKKDSLHQTILTQELEKLKRKHEGELQSVRDHLRTEVSTELAGTVAHELQGVHQGEFGSEKKTALHEKEETLRLQSAQAQPFHQEEKESLSLQLQKKNHQVQQLKDQVLSLSHEIEECRSELEVLQQRRERENREGANLLSMLKADVNLSHSERGALQDALRRLLGLFGETLRAAVTLRSRIGERVGLCLDDAGAGLALSTAPALEETWSDVALPELDRTLSECAEMSSVAEISSHMRESFLMSPESVRECEQPIRRVFQSLSLAVDGLMEMALDSSRQLEEARQIHSRFEKEFSFKNEETAQVVRKHQELLECLKEESAAKAELALELHKTQGTLEGFKVETADLKEVLAGKEDSEHRLVLELESLRRQLQQAAQEQAALREECTRLWSRGEATATDAEAREAALRKEVEDLTKEQSETRKQAEKDRSALLSQMKILESELEEQLSQHRGCAKQAEAVTALEQQVASLDKHLRNQRQFMDEQAAEREHEREEFQQEIQRLEGQLRQAAKPQPWGPRDSQQAPLDGEVELLQQKLREKLDEFNELAIQKESADRQVLMQEEEIKRLEEMNINIRKKVAQLQEEVEKQKNIVKGLEQDKEVLKKQQMSSLLLASTLQSTLDAGRCPEPPSGSPPEGPEIQLEVTQRALLRRESEVLDLKEQLEKMKGDLESKNEEILHLNLKLDMQNSQTAVSLRELEEENTSLKVIYTRSSEIEELKATIENLQENQKRLQKEKAEEIEQLHEVIEKLQHELSLMGPVVHEVSDSQAGSLQSELLCSQAGGPRGQALQGELEAALEAKEALSRLLADQERRHSQALEALQQRLQGAEEAAELQLAELERNVALREAEVEDMASRIQEFEAALKAKEATIAERNLEIDALNQRKAAHSAELEAVLLALARIRRALEQQPLAAGAAPPELQWLRAQCARLSRQLQVLHQRFLRCQVELDRRQARRATAHTRVPGAHPQPRMDGGAKAQVTGDVEASHDAALEPVVPDPQGDLQPVLVTLKDAPLCKQEGVMSVLTVCQRQLQSELLLVKNEMRLSLEDGGKGKEKVLEDCQLPKVDLVAQVKQLQEKLNRLLYSMTFQNVDAADTKSLWPMASAHLLESSWSDDSCDGEEPDISPHIDTCDANTATGGVTDVIKNQAIDACDANTTPGGVTDVIKNWDSLIPDEMPDSPIQEKSECQDMSLSSPTSVLGGSRHQSHTAEAGPRKSPVGMLDLSSWSSPEVLRKDWTLEPWPSLPVTPHSGALSLCSADTSLGDRADTSLPQTQGPGLLCSPGVSAAALALQWAESPPADDHHVQRTAVEKDVEDFITTSFDSQETLSSPPPGLEGKADRSEKSDGSGFGARLSPGSGGPEAQTAGPVTPASISGRFQPLPEAMKEKEVRPKHVKALLQMVRDESHQILALSEGLAPPSGEPHPPRKEDEIQDISLHGGKTQEVPTACPDWRGDLLQVVQEAFEKEQEMQGVELQPRLSGSDLGGHSSLLERLEKIIREQGDLQEKSLEHLRLPDRSSLLSEIQALRAQLRMTHLQNQEKLQHLRTALTSAEARGSQQEHQLRRQVELLAYKVEQEKCIAGDLQKTLSEEQEKANSVQKLLAAEQTVVRDLKSDLCESRQKSEQLSRSLCEVQQEVLQLRSMLSSKENELKAALQELESEQGKGRALQSQLEEEQLRHLQRESQSAKALEELRASLETQRAQSSRLCVALKHEQTAKDNLQKELRIEHSRCEALLAQERSQLSELQKDLAAEKSRTLELSEALRHERLLTEQLSQRTQEACVHQDTQAHHALLQKLKEEKSRVVDLQAMLEKVQQQALHSQQQLEAEAQKHCEALRREKEVSATLKSTVEALHTQKRELRCSLEREREKPAWLQAELEQSHPRLKEQEGRKAARRSAEARQSPAAAEQWRKWQRDKEKLRELELQRQRDLHKIKQLQQTVRDLESKDEVPGSRLHLGSARRAAGSDADHLREQQRELEAMRQRLLSAARLLTSFTSQAVDRTVNDWTSSNEKAVMSLLHTLEELKSDLSRPTSSQKKMAAELQFQFVDVLLKDNVSLTKALSTVTQEKLELSRAVSKLEKLLKHHLQKGCSPSRSERSAWKPDETAPQSSLRRPDPGRLPPAASEEAHTSNVKMEKLYLHYLRAESFRKALIYQKKYLLLLIGGFQDSEQETLSMIAHLGVFPSKAERKITSRPFTRFRTAVRVVIAILRLRFLVKKWQEVDRKGALAQGKAPRPGPRARQPQSPPRTRESPPTRDVPSGHTRDPARGRRLAAAASPHSGGRATPSPNSRLERSLTASQDPEHSLTEYIHHLEVIQQRLGGVLPDSTSKKSCHPMIKQ

SEQ ID NO: 57342 - protein, 2024 aa, Homo sapiens
MATGGGPFEDGMNDQDLPNWSNENVDDRLNNMDWGAQQKKANRSSEKNKKKFGVESDKRVTNDISPESSPGVGRRRTKTPHTFPHSRYMSQMSVPEQAELEKLKQRINFSDLDQRSIGSDSQGRATAANNKRQLSENRKPFNFLPMQINTNKSKDASTNPPNRETIGSAQCKELFASALSNDLLQNCQVSEEDGRGEPAMESSQIVSRLVQIRDYITKASSMREDLVEKNERSANVERLTHLIDHLKEQEKSYMKFLKKILARDPQQEPMEEIENLKKQHDLLKRMLQQQEQLRALQGRQAALLALQHKAEQAIAVMDDSVVAETAGSLSGVSITSELNEELNDLIQRFHNQLRDSQPPAVPDNRRQAESLSLTREVSQSRKPSASERLPDEKVELFSKMRVLQEKKQKMDKLLGELHTLRDQHLNNSSSSPQRSVDQRSTSAPSASVGLAPVVNGESNSLTSSVPYPTASLVSQNESENEGHLNPSEKLQKLNEVRKRLNELRELVHYYEQTSDMMTDAVNENRKDEETEESEYDSEHENSEPVTNIRNPQVASTWNEVNSHSNAQCVSNNRDGRTVNSNCEINNRSAANIRALNMPPSLDCRYNREGEQEIHVAQGEDDEEEEEEAEEEGVSGASLSSHRSSLVDEHPEDAEFEQKINRLMAAKQKLRQLQDLVAMVQDDDAAQGVISASASNLDDFYPAEEDTKQNSNNTRGNANKTQKDTGVNEKAREKFYEAKLQQQQRELKQLQEERKKLIDIQEKIQALQTACPDLQLSAASVGNCPTKKYMPAVTSTPTVNQHETSTSKSVFEPEDSSIVDNELWSEMRRHEMLREELRQRRKQLEALMAEHQRRQGLAETASPVAVSLRSDGSENLCTPQQSRTEKTMATWGGSTQCALDEEGDEDGYLSEGIVRTDEEEEEEQDASSNDNFSVCPSNSVNHNSYNGKETKNRWKNNCPFSADENYRPLAKTRQQNISMQRQENLRWVSELSYVEEKEQWQEQINQLKKQLDFSVSICQTLMQDQQTLSCLLQTLLTGPYSVMPSNVASPQVHFIMHQLNQCYTQLTWQQNNVQRLKQMLNELMRQQNQHPEKPGGKERGSSASHPPSPSLFCPFSFPTQPVNLFNIPGFTNFSSFAPGMNFSPLFPSNFGDFSQNISTPSEQQQPLAQNSSGKTEYMAFPKPFESSSSIGAEKPRNKKLPEEEVESSRTPWLYEQEGEVEKPFIKTGFSVSVEKSTSSNRKNQLDTNGRRRQFDEESLESFSSMPDPVDPTTVTKTFKTRKASAQASLASKDKTPKSKSKKRNSTQLKSRVKNIRYESASMSSTCEPCKSRNRHSAQTEEPVQAKVFSRKNHEQLEKIIKCNRSTEISSETGSDFSMFEALRDTIYSEVATLISQNESRPHFLIELFHELQLLNTDYLRQRALYALQDIVSRHISESHEKGENVKSVNSGTWIASNSELTPSESLATTDDETFEKNFERETHKISEQNDADNASVLSVSSNFEPFATDDLGNTVIHLDQALARMREYERMKTEAESNSNMRCTCRIIEDGDGAGAGTTVNNLEETPVIENRSSQQPVSEVSTIPCPRIDTQQLDRQIKAIMKEVIPFLKEHMDEVCSSQLLTSVRRMVLTLTQQNDESKEFVKFFHKQLGSILQDSLAKFAGRKLKDCGEDLLVEISEVLFNELAFFKLMQDLDNNSITVKQRCKRKIEATGVIQSCAKEAKRILEDHGSPAGEIDDEDKDKDETETVKQTQTSEVYDGPKNVRSDISDQEEDEESEGCPVSINLSKAETQALTNYGSGEDENEDEEMEEFEEGPVDVQTSLQANTEATEENEHDEQVLQRDFKKTAESKNVPLEREATSKNDQNNCPVKPCYLNILEDEQPLNSAAHKESPPTVDSTQQPNPLPLRLPEMEPLVPRVKEVKSAQETPESSLAGSPDTESPVLVNDYEAESGNISQKSDEEDFVKVEDLPLKLTIYSEADLRKKMVEEEQKNHLSGEICEMQTEELAGNSETLKEPETVGAQSI

SEQ ID NO: 57343 - protein, 529 aa, Homo sapiens
MATGGGPFEDGMNDQDLPNWSNENVDDRLNNMDWGAQQKKANRSSEKNKKKFGVESDKRVTNDISPESSPGVGRRRTKTPHTFPHSRYMSQMSVPEQAELEKLKQRINFSDLDQRSIGSDSQGRATAANNKRQLSENRKPFNFLPMQINTNKSKDASTNPPNRETIGSAQCKELFASALSNDLLQNCQVSEEDGRGEPAMESSQIVSRLVQIRDYITKASSMREDLVEKNERSANVERLTHLIDHLKEQEKSYMKFLKKILARENEEEDVRTIDSAVGSGSVAESTSLNIDVQSEASDTTARDPQQEPMEEIENLKKQHDLLKRMLQQQEQLRALQGRQAALLALQHKAEQAIAVMDDSVVAETAGSLSGVSITSELNEELNDLIQRFHNQLRDSQPPAVPDNRRQAESLSLTREVSQSRKPSASERLPDEKVELFSKMRVLQEKKQKMDKLLGELHTLRDQHLNNSSSSPQRSVDQRSTSAPSASVGLAPVVNGESNSLTSSVPYPTASLVSQNESENEGHLNPSEKL

SEQ ID NO: 57344 - protein, 723 aa, Homo sapiens
MSSTCEPCKSRNRHSAQTEEPVQAKVFSRKNHEQLEKIIKCNRSTEISSAHARRILQQSNRNACNEAPETGSDFSMFEALRDTIYSEVATLISQNESRPHFLIELFHELQLLNTDYLRQRALYALQDIVSRHISESHEKGENVKSVNSGTWIASNSELTPSESLATTDDETFEKNFERETHKISEQNDADNASVLSVSSNFEPFATDDLGNTVIHLDQALARMREYERMKTEAESNSNMRCTCRIIEDGDGAGAGTTVNNLEETPVIENRSSQQPVSEVSTIPCPRIDTQQLDRQIKAIMKEVIPFLKEHMDEVCSSQLLTSVRRMVLTLTQQNDESKEFVKFFHKQLGSILQDSLAKFAGRKLKDCGEDLLVEISEVLFNELAFFKLMQDLDNNSITVKQRCKRKIEATGVIQSCAKEAKRILEDHGSPAGEIDDEDKDKDETETVKQTQTSEVYDGPKNVRSDISDQEEDEESEGCPVSINLSKAETQALTNYGSGEDENEDEEMEEFEEGPVDVQTSLQANTEATEENEHDEQVLQRDFKKTAESKNVPLEREATSKNDQNNCPVKPCYLNILEDEQPLNSAAHKESPPTVDSTQQPNPLPLRLPEMEPLVPRVKEVKSAQETPESSLAGSPDTESPVLVNDYEAESGNISQKSDEEDFVKVEDLPLKLTIYSEADLRKKMVEEEQKNHLSGEICEMQTEELAGNSETLKEPETVGAQSI

SEQ ID NO: 57345 - protein, 764 aa, Homo sapiens
  VARIANT 1: note = MOD_RES - Any amino acid
XKASAQASLASKDKTPKSKSKKRNSTQLKSRVKNIRYESASMSSTCEPCKSRNRHSAQTEEPVQAKVFSRKNHEQLEKIIKCNRSTEISSAHARRILQQSNRNACNEAPETGSDFSMFEALRDTIYSEVATLISQNESRPHFLIELFHELQLLNTDYLRQRALYALQDIVSRHISESHEKGENVKSVNSGTWIASNSELTPSESLATTDDETFEKNFERETHKISEQNDADNASVLSVSSNFEPFATDDLGNTVIHLDQALARMREYERMKTEAESNSNMRCTCRIIEDGDGAGAGTTVNNLEETPVIENRSSQQPVSEVSTIPCPRIDTQQLDRQIKAIMKEVIPFLKEHMDEVCSSQLLTSVRRMVLTLTQQNDESKEFVKFFHKQLGSILQDSLAKFAGRKLKDCGEDLLVEISEVLFNELAFFKLMQDLDNNSITVKQRCKRKIEATGVIQSCAKEAKRILEDHGSPAGEIDDEDKDKDETETVKQTQTSEVYDGPKNVRSDISDQEEDEESEGCPVSINLSKAETQALTNYGSGEDENEDEEMEEFEEGPVDVQTSLQANTEATEENEHDEQVLQRDFKKTAESKNVPLEREATSKNDQNNCPVKPCYLNILEDEQPLNSAAHKESPPTVDSTQQPNPLPLRLPEMEPLVPRVKEVKSAQETPESSLAGSPDTESPVLVNDYEAESGNISQKSDEEDFVKVEDLPLKLTIYSEADLRKKMVEEEQKNHLSGEICEMQTEELAGNSETLKEPETVGAQSI

SEQ ID NO: 57346 - protein, 408 aa, Homo sapiens
MATGGGPFEDGMNDQDLPNWSNENVDDRLNNMDWGAQQKKANRSSEKNKKKFGVESDKRVTNDISPESSPGVGRRRTKTPHTFPHSRYMSQMSVPEQAELEKLKQRINFSDLDQRSIGSDSQGRATAANNKRQLSENRKPFNFLPMQINTNKSKDASTNPPNRETIGSAQCKELFASALSNDLLQNCQVSEEDGRGEPAMESSQIVSRLVQIRDYITKASSMREDLVEKNERSANVERLTHLIDHLKEQEKSYMKFLKKILARDPQQEPMEEIENLKKQHDLLKRMLQQQEQLRALQGRQAALLALQHKAEQAIAVMDDSVVAETAGSLSGVSITSELNEELNDLIQRFHNQLRDSQPPAVPDNRRQAESLSLTREVSQSRKPSASERLPDEKVELFSKMRVLQEKKQ

SEQ ID NO: 57347 - protein, 522 aa, Homo sapiens
MAVNKGLTLLDGDLPEQENVLQRVLQLPVVSGTCECFQKTYTSTKEAHPLVASVCNAYEKGVQSASSLAAWSMEPVVRRLSTQFTAANELACRGLDHLEEKIPALQYPPEKIASELKDTISTRLRSARNSISVPIASTSDKVLGAALAGCELAWGVARDTAEFAANTRAGRLASGGADLALGSIEKVVEYLLPPDKEESAPAPGHQQAQKSPKAKPSLLSRVGALTNTLSRYTVQTMARALEQGHTVAMWIPGVVPLSSLAQWGASVAMQAVSRRRSEVRVPWLHSLAAAQEEDHEDQTDTEGEDTEEEEELETEENKFSEVAALPGPRGLLGGVAHTLQKTLQTTISAVTWAPAAVLGMAGRVLHLTPAPAVSSTKGRAMSLSDALKGVTDNVVDTVVHYVPLPRLSLMEPESEFRDIDNPPAEVERREAERRASGAPSAGPEPAPRLAQPRRSLRSAQSPGAPPGPGLEDEVATPAAPRPGFPAVPREKPKRRVSDSFFRPSVMEPILGRTHYSQLRKKS

SEQ ID NO: 57348 - protein, 522 aa, Homo sapiens; identical to SEQ ID NO: 57347

SEQ ID NO: 57349 - protein, 437 aa, Homo sapiens
MASVAVDPQPSVVTRVVNLPLVSSTYDLMSSAYLSTKDQYPYLKSVCEMAENGVKTITSVAMTSALPIIQKLEPQIAVANTYACKGLDRIEERLPILNQPSTQIVANAKGAVTGAKDAVTTTVTGAKDSVASTITGVMDKTKGAVTGSVEKTKSVVSGSINTVLGSRMMQLVSSGVENALTKSELLVEQYLPLTEEELEKEAKKVEGFDLVQKPSYYVRLGSLSTKLHSRAYQQALSRVKEAKQKSQQTISQLHSTVHLIEFARKNVYSANQKIQDAQDKLYLSWVEWKRSIGYDDTDESHCAEHIESRTLAIARNLTQQLQTTCHTLLSNIQGVPQNIQDQAKHMGVMAGDIYSVFRNAASFKEVSDSLLTSSKGQLQKMKESLDDVMDYLVNNTPLNWLVGPFYPQLTESQNAQDQGAEMDKSSQETQRSEHKTH

SEQ ID NO: 57350 - protein, 110 aa, Homo sapiens
MASVAVDPQPSVVTRVVNLPLVSSTYDLMSSAYLSTKDQYPYLKSVCEMAENGVKTITSVAMTSALPIIQKLEPQIAVANTYACKGLDRIEERLPILNQPSTQVSLGQKC

SEQ ID NO: 57351 - protein, 126 aa, Homo sapiens
MASVAVDPQPSVVTRVVNLPLVSSTYDLMSSAYLSTKDQYPYLKSVCEMAENGVKTITSVAMTSALPIIQKLEPQIAVANTYACKGLDRIEERLPILNQPSTQANTCFPNLDLDVCLKNNGHFLTS

SEQ ID NO: 57352 - protein, 356 aa, Homo sapiens
MASVAVDPQPSVVTRVVNLPLVSSTYDLMSSAYLSTKDQYPYLKSVCEMAENGVKTITSVAMTSALPIIQKLEPQIAVANTYACKGLDRIEERLPILNQPSTQIVANAKGAVTGAKDAVTTTVTGAKDSVASTITGVMDKTKGAVTGSVEKTKSVKKKQKKLKDLIWFRSQLHSTVHLIEFARKNVYSANQKIQDAQDKLYLSWVEWKRSIGYDDTDESHCAEHIESRTLAIARNLTQQLQTTCHTLLSNIQGVPQNIQDQAKHMGVMAGDIYSVFRNAASFKEVSDSLLTSSKGQLQKMKESLDDVMDYLVNNTPLNWLVGPFYPQLTESQNAQDQGAEMDKSSQETQRSEHKTH

SEQ ID NO: 57353 - protein, 125 aa, Homo sapiens
MASVAVDPQPSVVTRVVNLPLVSSTYDLMSSAYLSTKDQYPYLKSVCEMAENGVKTITSVAMTSALPIIQKLEPQIAVANTYACKGLDRIEERLPILNQPSTQIVANAKGAVTGAKDAVTTTVTG

SEQ ID NO: 57354 - protein, 434 aa, Homo sapiens
MSADGAEADGSTQVTVEEPVQQPSVVDRVASMPLISSTCDMVSAAYASTKESYPHIKTVCDAAEKGVRTLTAAAVSGAQPILSKLEPQIASASEYAHRGLDKLEENLPILQQPTEKVLADTKELVSSKVSGAQEMVSSAKDTVATQLSEAVDATRGAVQSGVDKTKSVVTGGVQSVMGSRLGQMVLSGVDTVLGKSEEWADNHLPLTDAELARIATSLDGFDVASVQQQRQEQSYFVRLGSLSERLRQHAYEHSLGKLRATKQRAQEALLQLSQVLSLMETVKQGVDQKLVEGQEKLHQMWLSWNQKQLQGPEKEPPKPEQVESRALTMFRDIAQQLQATCTSLGSSIQGLPTNVKDQVQQARRQVEDLQATFSSIHSFQDLSSSILAQSRERVASAREALDHMVEYVAQNTPVTWLVGPFAPGITEKAPEEKK

SEQ ID NO: 57355 - protein, 422 aa, Homo sapiens
MSADGAEADGSTQVTVEEPVQQPSVVDRVASMPLISSTCDMVSAAYASTKESYPHIKTVCDAAEKGVRTLTAAAVSGAQPILSKLEPQIASASEYAHRGLDKLEENLPILQQPTEKVSGAQEMVSSAKDTVATQLSEAVDATRGAVQSGVDKTKSVVTGGVQSVMGSRLGQMVLSGVDTVLGKSEEWADNHLPLTDAELARIATSLDGFDVASVQQQRQEQSYFVRLGSLSERLRQHAYEHSLGKLRATKQRAQEALLQLSQVLSLMETVKQGVDQKLVEGQEKLHQMWLSWNQKQLQGPEKEPPKPEQVESRALTMFRDIAQQLQATCTSLGSSIQGLPTNVKDQVQQARRQVEDLQATFSSIHSFQDLSSSILAQSRERVASAREALDHMVEYVAQNTPVTWLVGPFAPGITEKAPEEKK

SEQ ID NO: 57356 - protein, 463 aa, Homo sapiens
MSEEEAAQIPRSSVWEQDQQNVVQRVVALPLVRATCTAVCDVYSAAKDRHPLLGSACRLAENCVCGLTTRALDHAQPLLEHLQPQLATMNSLACRGLDKLEEKLPFLQQPSETVVTSAKDVVASSVTGVVDLARRGRRWSVELKRSVSHAVDVVLEKSEELVDHFLPMTEEELAALAAEAEGPEVGSVEDQRRQQGYFVRLGSLSARIRHLAYEHSVGKLRQSKHRAQDTLAQLQETLELIDHMQCGVTPTAPACPGKVHELWGEWGQRPPESRRRSQAELETLVLSRSLTQELQGTVEALESSVRGLPAGAQEKVAEVRRSVDALQTAFADARCFRDVPAAALAEGRGRVAHAHACVDELLELVVQAVPLPWLVGPFAPILVERPEPLPDLADLVDEVIGGPDPRWAHLDWPAQQRAWEAEHRDGSGNGDGDRMGVAGDICEQEPETPSCPVKHTLMPELDF

SEQ ID NO: 57357 - protein, 1255 aa, Homo sapiens
MNGYAEFPPSPSNPTKEPVEPQPSQVPLQEDVDMSSGSSGHETNENCSTGRDSQGSDCDDSGKELGMLVEPPDARQSPDTFSLMMAKSEHNPSTSGCSSDQSSKVDTHKELIKTLKELKVHLPADKKAKGKASTLATLKYALRSVKQVKANEEYYQLLMSSEGHPCGADVPSYTVEEMESVTSEHIVKNADMFAVAVSLVSGKILYISDQVASIFHCKRDAFSDAKFVEFLAPHDVGVFHSFTSPYKLPLWSMCSGADSFTQECMEEKSFFCRVSVRKSHENEIRYHPFRMTPYLVKVRDQQGAESQLCCLLLAERVHSGYEAPRIPPEKRIFTTTHTPNCLFQDVDERAVPLLGYLPQDLIETPVLVQLHPSDRPLMLAIHKKILQSGGQPFDYSPIRFRARNGEYITLDTSWSSFINPWSRKISFIIGRHKVRVGPLNEDVFAAHPCTEEKALHPSIQELTEQIHRLLLQPVPHSGSSGYGSLGSNGSHEHLMSQTSSSDSNGHEDSRRRRAEICKNGNKTKNRSHYSHESGEQKKKSVTEMQTNPPAEKKAVPAMEKDSLGVSFPEELACKNQPTCSYQQISCLDSVIRYLESCNEAATLKRKCEFPANVPALRSSDKRKATVSPGPHAGEAEPPSRVNSRTGVGTHLTSLALPGKAESVASLTSQCSYSSTIVHVGDKKPQPELEMVEDAASGPESLDCLAGPALACGLSQEKEPFKKLGLTKEVLAAHTQKEEQSFLQKFKEIRKLSIFQSHCHYYLQERSKGQPSERTAPGLRNTSGIDSPWKKTGKNRKLKSKRVKPRDSSESTGSGGPVSARPPLVGLNATAWSPSDTSQSSCPAVPFPAPVPAAYSLPVFPAPGTVAAPPAPPHASFTVPAVPVDLQHQFAVQPPPFPAPLAPVMAFMLPSYSFPSGTPNLPQAFFPSQPQFPSHPTLTSEMASASQPEFPSRTSIPRQPCACPATRATPPSAMGRASPPLFQSRSSSPLQLNLLQLEEAPEGGTGAMGTTGATETAAVGADCKPGTSRDQQPKAPLTRDEPSDTQNSDALSTSSGLLNLLLNEDLCSASGSAASESLGSGSLGCDASPSGAGSSDTSHTSKYFGSIDSSENNHKAKMNTGMEESEHFIKCVLQDPIWLLMADADSSVMMTYQLPSRNLEAVLKEDREKLKLLQKLQPRFTESQKQELREVHQWMQTGGLPAAIDVAECVYCENKEKGNICIPYEEDIPSLGLSEVSDTKEDENGSPLNHRIEEQT

SEQ ID NO: 57358 - protein, 404 aa, Homo sapiens
MNGYAEFPPSPSNPTKEPVEPQPSQVPLQEDVDMSSGSSGHETNENCSTGRDSQGSDCDDSGKELGMLVEPPDARQSPDTFSLMMAKSEHNPSTSGCSSDQSSKVDTHKELIKTLKELKVHLPADKKAKGKASTLATLKYALRSVKQVKANEEYYQLLMSSEGHPCGADVPSYTVEEMESVTSEHIVKNADMFAVAVSLVSGKILYISDQVASIFHCKRDAFSDAKFVEFLAPHDVGVFHSFTSPYKLPLWSMCSGADSFTQECMEEKSFFCRVSVRKSHENEIRYHPFRMTPYLVKVRDQQGAESQLCCLLLAERVHSGYEAPRIPPEKRIFTTTHTPNCLFQDVDESPAVRRAAFRLFSHSVSRPERRVHHVGHQLVQLHQPMEQENLLHHWEAQSQGGPFE

SEQ ID NO: 57359 - protein, 404 aa, Homo sapiens; identical to SEQ ID NO: 57358

SEQ ID NO: 57360 - protein, 109 aa, Homo sapiens
MNGYAEFPPSPSNPTKEPVEPQPSQVPLQEDVDMSSGSSGHETNENCSTGRDSQGSDCDDSGKELGMLVEPPDARQSPDTFSLMMAKSEHNPSTSGCSSDQSSKVDTHK

SEQ ID NO: 57361 - protein, 483 aa, Homo sapiens
MNGYAEFPPSPSNPTKEPVEPQPSQVPLQEDVDMSSGSSGHETNENCSTGRDSQGSDCDDSGKELGMLVEPPDARQSPDTFSLMMAKSEHNPSTSGCSSDQSSKVDTHKELIKTLKELKVHLPADKKAKGKASTLATLKYALRSVKQVKANEEYYQLLMSSEGHPCGADVPSYTVEEMESVTSEHIVKNADMFAVAVSLVSGKILYISDQVASIFHCKRDAFSDAKFVEFLAPHDVGVFHSFTSPYKLPLWSMCSGADSFTQECMEEKSFFCRVSVRKSHENEIRYHPFRMTPYLVKVRDQQGAESQLCCLLLAERVHSGYEAPRIPPEKRIFTTTHTPNCLFQDVDERAVPLLGYLPQDLIETPVLVQLHPSDRPLMLAIHKKILQSGGQPFDYSPIRFRARNGEYITLDTSWSSFINPWSRKISFIIGRHKVRVGPLNEDVFAAHPCTEEKALHPSIQELTEQIHRLLLQVGVVPACPPPR

SEQ ID NO: 57362 - protein, 779 aa, Homo sapiens
MIPFLPMFSLLLLLIVNPINANNHYDKILAHSRIRGRDQGPNVCALQQILGTKKKYFSTCKNWYKKSICGQKTTVLYECCPGYMRMEGMKGCPAVLPIDHVYGTLGIVGATTTQRYSDASKLREEIEGKGSFTYFAPSNEAWDNLDSDIRRGLESNVNVELLNALHSHMINKRMLTKDLKNGMIIPSMYNNLGLFINHYPNGVVTVNCARIIHGNQIATNGVVHVIDRVLTQIGTSIQDFIEAEDDLSSFRAAAITSDILEALGRDGHFTLFAPTNEAFEKLPRGVLERIMGDKVASEALMKYHILNTLQCSESIMGGAVFETLEGNTIEIGCDGDSITVNGIKMVNKKDIVTNNGVIHLIDQVLIPDSAKQVIELAGKQQTTFTDLVAQLGLASALRPDGEYTLLAPVNNAFSDDTLSMDQRLLKLILQNHILKVKVGLNELYNGQILETIGGKQLRVFVYRTAVCIENSCMEKGSKQGRNGAIHIFREIIKPAEKSLHEKLKQDKRFSTFLSLLEAADLKELLTQPGDWTLFVPTNDAFKGMTSEEKEILIRDKNALQNIILYHLTPGVFIGKGFEPGVTNILKTTQGSKIFLKEVNDTLLVNELKSKESDIMTTNGVIHVVDKLLYPADTPVGNDQLLEILNKLIKYIQIKFVRGSTFKEIPVTVYKPIIKKYTKIIDGVPVEITEKETREERIITGPEIKYTRISTGGGETEETLKKLLQEEVTKVTKFIEGGDGHLFEDEEIKRLLQGDTPVRKLQANKKVQGSRRRLREGRSQ

SEQ ID NO: 57363 - protein, 809 aa, Homo sapiens
MIPFLPMFSLLLLLIVNPINANNHYDKILAHSRIRGRDQGPNVCALQQILGTKKKYFSTCKNWYKKSICGQKTTVLYECCPGYMRMEGMKGCPAVLPIDHVYGTLGIVGATTTQRYSDASKLREEIEGKGSFTYFAPSNEAWDNLDSDIRRGLESNVNVELLNALHSHMINKRMLTKDLKNGMIIPSMYNNLGLFINHYPNGVVTVNCARIIHGNQIATNGVVHVIDRVLTQIGTSIQDFIEAEDDLSSFRAAAITSDILEALGRDGHFTLFAPTNEAFEKLPRGVLERIMGDKVASEALMKYHILNTLQCSESIMGGAVFETLEGNTIEIGCDGDSITVNGIKMVNKKDIVTNNGVIHLIDQVLIPDSAKQVIELAGKQQTTFTDLVAQLGLASALRPDGEYTLLAPVNNAFSDDTLSMDQRLLKLILQNHILKVKVGLNELYNGQILETIGGKQLRVFVYRTAVCIENSCMEKGSKQGRNGAIHIFREIIKPAEKSLHEKLKQDKRFSTFLSLLEAADLKELLTQPGDWTLFVPTNDAFKGMTSEEKEILIRDKNALQNIILYHLTPGVFIGKGFEPGVTNILKTTQGSKIFLKEVNDTLLVNELKSKESDIMTTNGVIHVVDKLLYPADTPVGNDQLLEILNKLIKYIQIKFVRGSTFKEIPVTVYRPTLTKVKIEGEPEFRLIKEGETITEVIHGEPIIKKYTKIIDGVPVEITEKETREERIITGPEIKYTRISTGGGETEETLKKLLQEEVTKVTKFIEGGDGHLFEDEEIKRLLQGDTPVRKLQANKKVQGSRRRLREGRSQ

SEQ ID NO: 57364 - protein, 836 aa, Homo sapiens
MIPFLPMFSLLLLLIVNPINANNHYDKILAHSRIRGRDQGPNVCALQQILGTKKKYFSTCKNWYKKSICGQKTTVLYECCPGYMRMEGMKGCPAVLPIDHVYGTLGIVGATTTQRYSDASKLREEIEGKGSFTYFAPSNEAWDNLDSDIRRGLESNVNVELLNALHSHMINKRMLTKDLKNGMIIPSMYNNLGLFINHYPNGVVTVNCARIIHGNQIATNGVVHVIDRVLTQIGTSIQDFIEAEDDLSSFRAAAITSDILEALGRDGHFTLFAPTNEAFEKLPRGVLERIMGDKVASEALMKYHILNTLQCSESIMGGAVFETLEGNTIEIGCDGDSITVNGIKMVNKKDIVTNNGVIHLIDQVLIPDSAKQVIELAGKQQTTFTDLVAQLGLASALRPDGEYTLLAPVNNAFSDDTLSMDQRLLKLILQNHILKVKVGLNELYNGQILETIGGKQLRVFVYRTAVCIENSCMEKGSKQGRNGAIHIFREIIKPAEKSLHEKLKQDKRFSTFLSLLEAADLKELLTQPGDWTLFVPTNDAFKGMTSEEKEILIRDKNALQNIILYHLTPGVFIGKGFEPGVTNILKTTQGSKIFLKEVNDTLLVNELKSKESDIMTTNGVIHVVDKLLYPADTPVGNDQLLEILNKLIKYIQIKFVRGSTFKEIPVTVYTTKIITKVVEPKIKVIEGSLQPIIKTEGPTLTKVKIEGEPEFRLIKEGETITEVIHGEPIIKKYTKIIDGVPVEITEKETREERIITGPEIKYTRISTGGGETEETLKKLLQEEVTKVTKFIEGGDGHLFEDEEIKRLLQGDTPVRKLQANKKVQGSRRRLREGRSQ

SEQ ID NO: 57365 - protein, 808 aa, Homo sapiens
MIPFLPMFSLLLLLIVNPINANNHYDKILAHSRIRGRDQGPNVCALQQILGTKKKYFSTCKNWYKKSICGQKTTVLYECCPGYMRMEGMKGCPAVLPIDHVYGTLGIVGATTTQRYSDASKLREEIEGKGSFTYFAPSNEAWDNLDSDIRRGLESNVNVELLNALHSHMINKRMLTKDLKNGMIIPSMYNNLGLFINHYPNGVVTVNCARIIHGNQIATNGVVHVIDRVLTQIGTSIQDFIEAEDDLSSFRAAAITSDILEALGRDGHFTLFAPTNEAFEKLPRGVLERIMGDKVASEALMKYHILNTLQCSESIMGGAVFETLEGNTIEIGCDGDSITVNGIKMVNKKDIVTNNGVIHLIDQVLIPDSAKQVIELAGKQQTTFTDLVAQLGLASALRPDGEYTLLAPVNNAFSDDTLSMDQRLLKLILQNHILKVKVGLNELYNGQILETIGGKQLRVFVYRTAVCIENSCMEKGSKQGRNGAIHIFREIIKPAEKSLHEKLKQDKRFSTFLSLLEAADLKELLTQPGDWTLFVPTNDAFKGMTSEEKEILIRDKNALQNIILYHLTPGVFIGKGFEPGVTNILKTTQGSKIFLKEVNDTLLVNELKSKESDIMTTNGVIHVVDKLLYPADTPVGNDQLLEILNKLIKYIQIKFVRGSTFKEIPVTVYTTKIITKVVEPKIKVIEGSLQPIIKTEGPTLTKVKIEGEPEFRLIKEGETITEVIHGEPIIKKYTKIIDGVPVEITEKETREERIITGPEIKYTRISTGGGETEETLKKLLQEDTPVRKLQANKKVQGSRRRLREGRSQ

SEQ ID NO: 57366 - protein, 277 aa, Homo sapiens
MRMEGMKGCPAVLPIDHVYGTLGIVGATTTQRYSDASKLREEIEGKGSFTYFAPSNEAWDNLDSDIRRGLESNVNVELLNALHSHMINKRMLTKDLKNGMIIPSMYNNLGLFINHYPNGVVTVNCARIIHGNQIATNGVVHVIDRVLTQIGTSIQDFIEAEDDLSSFRAAAITSDILEALGRDGHFTLFAPTNEAFEKLPRGVLERIMGDKVASEALMKYHILNTLQCSESIMGGAVFETLEGNTIEIGCDGDSITVNGIKMVNKKDIVTNWCDPFD

SEQ ID NO: 57367 - protein, 781 aa, Homo sapiens
MIPFLPMFSLLLLLIVNPINANNHYDKILAHSRIRGRDQGPNVCALQQILGTKKKYFSTCKNWYKKSICGQKTTVLYECCPGYMRMEGMKGCPAVLPIDHVYGTLGIVGATTTQRYSDASKLREEIEGKGSFTYFAPSNEAWDNLDSDIRRGLESNVNVELLNALHSHMINKRMLTKDLKNGMIIPSMYNNLGLFINHYPNGVVTVNCARIIHGNQIATNGVVHVIDRVLTQIGTSIQDFIEAEDDLSSFRAAAITSDILEALGRDGHFTLFAPTNEAFEKLPRGVLERIMGDKVASEALMKYHILNTLQCSESIMGGAVFETLEGNTIEIGCDGDSITVNGIKMVNKKDIVTNNGVIHLIDQVLIPDSAKQVIELAGKQQTTFTDLVAQLGLASALRPDGEYTLLAPVNNAFSDDTLSMDQRLLKLILQNHILKVKVGLNELYNGQILETIGGKQLRVFVYRTAVCIENSCMEKGSKQGRNGAIHIFREIIKPAEKSLHEKLKQDKRFSTFLSLLEAADLKELLTQPGDWTLFVPTNDAFKGMTSEEKEILIRDKNALQNIILYHLTPGVFIGKGFEPGVTNILKTTQGSKIFLKEVNDTLLVNELKSKESDIMTTNGVIHVVDKLLYPADTPVGNDQLLEILNKLIKYIQIKFVRGSTFKEIPVTVYRPTLTKVKIEGEPEFRLIKEGETITEVIHGEPIIKKYTKIIDGVPVEITEKETREERIITGPEIKYTRISTGGGETEETLKKLLQEDTPVRKLQANKKVQGSRRRLREGRSQ

SEQ ID NO: 57368 - protein, 749 aa, Homo sapiens
MIPFLPMFSLLLLLIVNPINANNHYDKILAHSRIRGRDQGPNVCALQQILGTKKKYFSTCKNWYKKSICGQKTTVLYECCPGYMRMEGMKGCPAVLPIDHVYGTLGIVGATTTQRYSDASKLREEIEGKGSFTYFAPSNEAWDNLDSDIRRGLESNVNVELLNALHSHMINKRMLTKDLKNGMIIPSMYNNLGLFINHYPNGVVTVNCARIIHGNQIATNGVVHVIDRVLTQIGTSIQDFIEAEDDLSSFRAAAITSDILEALGRDGHFTLFAPTNEAFEKLPRGVLERIMGDKVASEALMKYHILNTLQCSESIMGGAVFETLEGNTIEIGCDGDSITVNGIKMVNKKDIVTNNGVIHLIDQVLIPDSAKQVIELAGKQQTTFTDLVAQLGLASALRPDGEYTLLAPVNNAFSDDTLSMDQRLLKLILQNHILKVKVGLNELYNGQILETIGGKQLRVFVYRTAVCIENSCMEKGSKQGRNGAIHIFREIIKPAEKSLHEKLKQDKRFSTFLSLLEAADLKELLTQPGDWTLFVPTNDAFKGMTSEEKEILIRDKNALQNIILYHLTPGVFIGKGFEPGVTNILKTTQGSKIFLKEVNDTLLVNELKSKESDIMTTNGVIHVVDKLLYPADTPVGNDQLLEILNKLIKYIQIKFVRGSTFKEIPVTVYSPEIKYTRISTGGGETEETLKKLLQEEVTKVTKFIEGGDGHLFEDEEIKRLLQGDTPVRKLQANKKVQGSRRRLREGRSQ

SEQ ID NO: 57369 - protein, 132 aa, Homo sapiens
MSNKFLGTWKLVSSENFDDYMKALGVGLATRKLGNLAKPTVIISKKGDIITIRTESTFKNTEISFKLGQEFEETTADNRKTKSIVTLQRGSLNQVQRWDGKETTIKRKLVNGKMVAECKMKGVVCTRIYEKV

SEQ ID NO: 57370 - protein, 160 aa, Homo sapiens
MLLLLLSIIVLHVAVLVLLFVSTIVSQWIVGNGHATDLWQNCSTSSSGNVHHCFSSSPNEWLQSVQATMILSIIFSILSLFLFFCQLFTLTKGGRFYITGIFQILAGLCVMSAAAIYTVRHPEWHLNSDYSYGFAYILAWVAFPLALLSGVIYVILRKRE

SEQ ID NO: 57371 - protein, 118 aa, Homo sapiens
MLLLLLSIIVLHVAVLVLLFVSTIVSQWIVGNGHATDLWQNCSTSSSGNVHHCFSSSPNEWLQSVQATMILSIIFSILSLFLFFCQLFTLTKGGRFYITGIFQILAESNSSQMCGYRD

SEQ ID NO: 57372 - protein, 160 aa, Homo sapiens; identical to SEQ ID NO: 57370

SEQ ID NO: 57373 - protein, 149 aa, Homo sapiens
MLLLLLSIIVLHVAVLVLLFVSTIVSQWIVGNGHATDLWQNCSTSSSGNVHHCFSSSPNEWLQSVQATMILSIIFSILSLFLFFCQLFTLTKGGRFYITGIFQILAGLCVMSAAAIYTVRHPEWHLNSDYSFPLALLSGVIYVILRKRE

SEQ ID NO: 57374 - protein, 470 aa, Homo sapiens
MSHHPSGLRAGFSSTSYRRTFGPPPSLSPGAFSYSSSSRFSSSRLLGSASPSSSVRLGSFRSPRAGAGALLRLPSERLDFSMAEALNQEFLATRSNEKQELQELNDRFANFIEKVRFLEQQNAALRGELSQARGQEPARADQLCQQELRELRRELELLGRERDRVQVERDGLAEDLAALKQRLEEETRKREDAEHNLVLFRKDVDDATLSRLELERKIESLMDEIEFLKKLHEEELRDLQVSVESQQVQQVEVEATVKPELTAALRDIRAQYESIAAKNLQEAEEWYKSKYADLSDAANRNHEALRQAKQEMNESRRQIQSLTCEVDGLRGTNEALLRQLRELEEQFALEAGGYQAGAARLEEELRQLKEEMARHLREYQELLNVKMALDIEIATYRKLLEGEESRISVPVHSFASLNIKTTVPEVEPPQDSHSRKTVLIKTIETRNGEVVTESQKEQRSELDKSSAHSY

SEQ ID NO: 57375 - protein, 346 aa, Homo sapiens
MALLKVKFDQKKRVKLAQGLWLMNWFSVLAGIIIFSLGLFLKIELRKRSDVMNNSESHFVPNSLIGMGVLSCVFNSLAGKICYDALDPAKYARWKPWLKPYLAICVLFNIILFLVALCCFLLRGSLENTLGQGLKNGMKYYRDTDTPGRCFMKKTIDMLQIEFKCCGNNGFRDWFEIQWISNRYLDFSSKEVKDRIKSNVDGRYLVDGVPFSCCNPSSPRPCIQYQITNNSAHYSYDHQTEELNLWVRGCRAALLSYYSSLMNSMGVVTLLIWLFEVTITIGLRYLQTSLDGVSNPEESESESQGWLLERSVPETWKAFLESVKKLGKGNQVEAEGADAGQAPEAG

SEQ ID NO: 57376 - protein, 367 aa, Homo sapiens
MWSEGRYEYERIPRERAPPRSHPSDGYNRLVNIVPKKPPLLDRPGEGSYNRYYSHVDYRDYDEGRSFSHDRRSGPPHRGDESGYRWTRDDHSASRQPEYRDMRDGFRRKSFYSSHYARERSPYKRDNTFFRESPVGRKDSPHSRSGSSVSSRSYSPERSKSYSFHQSQHRKSVRPGASYKRQNEGNPERDKERPVQSLKTSRDTSPSSGSAVSSSKVLDKPSRLTEKELAEAASKWAAEKLEKSDESNLPEISEYEAGSTAPLFTDQPEEPESNTTHGIELFEDSQLTTRSKAIASKTKEIEQVYRQDCETFGMVVKMLIEKDPSLEKSIQFALRQNLHEIGERCVEELKHFIAEYDTSTQDFGEPF

SEQ ID NO: 57377 - protein, 458 aa, Homo sapiens
MWSEGRYEYERIPRERAPPRSHPSDGYNRLVNIVPKKPPLLDRPGEGSYNRYYSHVDYRDYDEGRSFSHDRRSGPPHRGDESGYRWTRDDHSASRQPEYRDMRDGFRRKSFYSSHYARERSPYKRDNTFFRESPVGRKDSPHSRSGSSVSSRSYSPERSKSYSFHQSQHRKSVRPGASYKRQNEGNPERDKERPVQSLKTSRDTSPSSGSAVSSSKVLDKPSRLTEKELAEAASKWAAEKLEKSDESNLPEISEYEAGSTAPLFTDQPEEPESNTTHGIELFEDSQLTTRSKAIASKTKEIEQVYRQDCETFGMVVKMLIEKDPSLEKSIQFALRQNLHEIESAGQTWQQVPPVRNTEMDHDGTPENEGEETAQSAPQPPQAPQPLQPRKKRVRRTTQLRRTTGAPDITWGMLKKTTQEAERILLRTQTPFTPENLFLAMLSVVHCNSRKDVKPENKQ

SEQ ID NO: 57378 - protein, 374 aa, Homo sapiens
MAYRRDEMWSEGRYEYERIPRERAPPRSHPSDGYNRLVNIVPKKPPLLDRPGEGSYNRYYSHVDYRDYDEGRSFSHDRRSGPPHRGDESGYRWTRDDHSASRQPEYRDMRDGFRRKSFYSSHYARERSPYKRDNTFFRESPVGRKDSPHSRSGSSVSSRSYSPERSKSYSFHQSQHRKSVRPGASYKRQNEGNPERDKERPVQSLKTSRDTSPSSGSAVSSSKVLDKPSRLTEKELAEAASKWAAEKLEKSDESNLPEISEYEAGSTAPLFTDQPEEPESNTTHGIELFEDSQLTTRSKAIASKTKEIEQVYRQDCETFGMVVKMLIEKDPSLEKSIQFALRQNLHEIGERCVEELKHFIAEYDTSTQDFGEPF

SEQ ID NO: 57379 - protein, 434 aa, Homo sapiens
MWSEGRYEYERIPRERAPPRSHPSDESGYRWTRDDHSASRQPEYRDMRDGFRRKSFYSSHYARERSPYKRDNTFFRESPVGRKDSPHSRSGSSVSSRSYSPERSKSYSFHQSQHRKSVRPGASYKRQNEGNPERDKERPVQSLKTSRDTSPSSGSAVSSSKVLDKPSRLTEKELAEAASKWAAEKLEKSDESNLPEISEYEAGSTAPLFTDQPEEPESNTTHGIELFEDSQLTTRSKAIASKTKEIEQVYRQDCETFGMVVKMLIEKDPSLEKSIQFALRQNLHEIESAGQTWQQVPPVRNTEMDHDGTPENEGEETAQSALFGFQHDASNHTIVGLGPNQVPEMKETTLQAPQPPQAPQPLQPRKKRVRRTTQLRRTTGAPDITWGMLKKTTQEAERILLRTQTPFTPENLFLAMLSVVHCNSRKDVKPENKQ

SEQ ID NO: 57380 - protein, 348 aa, Homo sapiens
MWSEGRYEYERIPRERAPPRSHPSDGYNRLVNIVPKKPPLLDRPGEGSYNRYYSHVDYRDYDEGRSFSHDRRSGPPHRGDESGYRWTRDDHSASRQPEYRDMRDGFRRKSFYSSHYARERSPYKRDNTFFRESPVGRKDSPHSRSGSSVSSRSYSPERSKSYSFHQSQHRNKERPVQSLKTSRDTSPSSGSAVSSSKVLDKPSRLTEKELAEAASKWAAEKLEKSDESNLPEISEYEAGSTAPLFTDQPEEPESNTTHGIELFEDSQLTTRSKAIASKTKEIEQVYRQDCETFGMVVKMLIEKDPSLEKSIQFALRQNLHEIGERCVEELKHFIAEYDTSTQDFGEPF

SEQ ID NO: 57381 - protein, 161 aa, Homo sapiens
MAYRRDEMWSEGRYEYERIPRERAPPRSHPSDGYNRLVNIVPKKPPLLDRPGEGSYNRYYSHVDYRDYDEGRSFSHDRRSGPPHRGDESGYRWTRDDHSASRQPEYRDMRDGFRRKSFYSSHYARERSPYKRDNTFFRESPVGRKDSPHSRSGSSVSSRSY

SEQ ID NO: 57382 - protein, 168 aa, Homo sapiens
MWSEGRYEYERIPRERAPPRSHPSDGYNRLVNIVPKKPPLLDRPGEGSYNRYYSHVDYRDYDEGRSFSHDRRSGPPHRGDESGYRWTRDDHSASRQPEYRDMRDGFRRKSFYSSHYARERSPYKRDNTFFRESPVGRKDSPHSRSGSSVSSRSYSPERSKSYSFHQSQ

SEQ ID NO: 57383 - protein, 319 aa, Homo sapiens
MAYRRDEMWSEGRYEYERIPRERAPPRSHPSDESGYRWTRDDHSASRQPEYRDMRDGFRRKSFYSSHYARERSPYKRDNTFFRESPVGRKDSPHSRSGSSVSSRSYSPERSKSYSFHQSQHRKSVRPGASYKRQNEGNPERDKERPVQSLKTSRDTSPSSGSAVSSSKVLDKPSRLTEKELAEAASKWAAEKLEKSDESNLPEISEYEAGSTAPLFTDQPEEPESNTTHGIELFEDSQLTTRSKAIASKTKEIEQVYRQDCETFGMVVKMLIEKDPSLEKSIQFALRQNLHEIGERCVEELKHFIAEYDTSTQDFGEPF

SEQ ID NO: 57384 - protein, 1756 aa, Homo sapiens
MNSLFRKRNKGKYSPTVQTRSISNKELSELIEQLQKNADQVEKNIVDTEAKMQSDLARLQEGRQPEHRDVTLQKVLDSEKLLYVLEADAAIAKHMKHPQGDMIAEDIRQLKERVTNLRGKHKQIYRLAVKEVDPQVNWAALVEEKLDKLNNQSFGTDLPLVDHQVEEHNIFHNEVKAIGPHLAKDGDKEQNSELRAKYQKLLAASQARQQHLSSLQDYMQRCTNELYWLDQQAKGRMQYDWSDRNLDYPSRRRQYENFINRNLEAKEERINKLHSEGDQLLAAEHPGRNSIEAHMEAVHADWKEYLNLLICEESHLKYMEDYHQFHEDVKDAQELLRKVDSDLNQKYGPDFKDRYQIELLLRELDDQEKVLDKYEDVVQGLQKRGQQVVPLKYRRETPLKPIPVEALCDFEGEQGLISRGYSYTLQKNNGESWELMDSAGNKLIAPAVCFVIPPTDPEALALADSLGSQYRSVRQKAAGSKRTLQQRYEVLKTENPGDASDLQGRQLLAGLDKVASDLDRQEKAITGILRPPLEQGRAVQDSAERAKDLKNITNELLRIEPEKTRSTAEGEAFIQALPGSGTTPLLRTRVEDTNRKYEHLLQLLDLAQEKVDVANRLEKSLQQSWELLATHENHLNQDDTVPESSRVLDSKGQELAAMACELQAQKSLLGEVEQNLQAAKQCSSTLASRFQEHCPDLERQEAEVHKLGQRFNNLRQQVERRAQSLQSAKAAYEHFHRGHDHVLQFLVSIPSYEPQETDSLSQMETKLKNQKNLLDEIASREQEVQKICANSQQYQQAVKDYELEAEKLRSLLDLENGRRSHVSKRARLQSPATKVKEEEAALAAKFTEVYAINRQRLQNLEFALNLLRQQPEVEVTHETLQRNRPDSGVEEAWKIRKELDEETERRRQLENEVKSTQEEIWTLRNQGPQESVVRKEVLKKVPDPVLEESFQQLQRTLAEEQHKNQLLQEELEALQLQLRALEQETRDGGQEYVVKEVLRIEPDRAQADEVLQLREELEALRRQKGAREAEVLLLQQRVAALAEEKSRAQEKVTEKEVVKLQNDPQLEAEYQQLQEDHQRQDQLREKQEEELSFLQDKLKRLEKERAMAEGKITVKEVLKVEKDAATEREVSDLTRQYEDEAAKARASQREKTELLRKIWALEEENAKVVVQEKVREIVRPDPKAESEVANLRLELVEQERKYRGAEEQLRSYQSELEALRRRGPQVEVKEVTKEVIKYKTDPEMEKELQRLREEIVDKTRLIERCDLEIYQLKKEIQALKDTKPQVQTKEVVQEILQFQEDPQTKEEVASLRAKLSEEQKKQVDLERERASQEEQIARKEEELSRVKERVVQQEVVRYEEEPGLRAEASAFAESIDVELRQIDKLRAELRRLQRRRTELERQLEELERERQARREAEREVQRLQQRLAALEQEEAEAREKVTHTQKVVLQQDPQQAREHALLRLQLEEEQHRRQLLEGELETLRRKLAALEKAEVKEKVVLSESVQVEKGDTEQEIQRLKSSLEEESRSKRELDVEVSRLEARLSELEFHNSKSSKELDFLREENHKLQLERQNLQLETRRLQSEINMAATETRDLRNMTVADSGTNHDSRLWSLERELDDLKRLSKDKDLEIDELQKRLGSVAVKREQRENHLRRSIVVIHPDTGRELSPEEAHRAGLIDWNMFVKLRSQECDWEEISVKGPNGESSVIHDRKSGKKFSIEEALQSGRLTPAQYDRYVNKDMSIQELAVLVSGQK

SEQ ID NO: 57385 - protein, 1479 aa, Homo sapiens
MAKRSRGPGRRCLLALVLFCAWGTLAVVAQKPGAGCPSRCLCFRTTVRCMHLLLEAVPAVAPQTSILDLRFNRIREIQPGAFRRLRNLNTLLLNNNQIKRIPSGAFEDLENLKYLYLYKNEIQSIDRQAFKGLASLEQLYLHFNQIETLDPDSFQHLPKLERLFLHNNRITHLVPGTFNHLESMKRLRLDSNTLHCDCEILWLADLLKTYAESGNAQAAAICEYPRRIQGRSVATITPEELNCERPRITSEPQDADVTSGNTVYFTCRAEGNPKPEIIWLRNNNELSMKTDSRLNLLDDGTLMIQNTQETDQGIYQCMAKNVAGEVKTQEVTLRYFGSPARPTFVIQPQNTEVLVGESVTLECSATGHPPPRISWTRGDRTPLPVDPRVNITPSGGLYIQNVVQGDSGEYACSATNNIDSVHATAFIIVQALPQFTVTPQDRVVIEGQTVDFQCEAKGNPPPVIAWTKGGSQLSVDRRHLVLSSGTLRISGVALHDQGQYECQAVNIIGSQKVVAHLTVQPRVTPVFASIPSDTTVEVGANVQLPCSSQGEPEPAITWNKDGVQVTESGKFHISPEGFLTINDVGPADAGRYECVARNTIGSASVSMVLSVNVPDVSRNGDPFVATSIVEAIATVDRAINSTRTHLFDSRPRSPNDLLALFRYPRDPYTVEQARAGEIFERTLQLIQEHVQHGLMVDLNGTSYHYNDLVSPQYLNLIANLSGCTAHRRVNNCSDMCFHQKYRTHDGTCNNLQHPMWGASLTAFERLLKSVYENGFNTPRGINPHRLYNGHALPMPRLVSTTLIGTETVTPDEQFTHMLMQWGQFLDHDLDSTVVALSQARFSDGQHCSNVCSNDPPCFSVMIPPNDSRARSGARCMFFVRSSPVCGSGMTSLLMNSVYPREQINQLTSYIDASNVYGSTEHEARSIRDLASHRGLLRQGIVQRSGKPLLPFATGPPTECMRDENESPIPCFLAGDHRANEQLGLTSMHTLWFREHNRIATELLKLNPHWDGDTIYYETRKIVGAEIQHITYQHWLPKILGEVGMRTLGEYHGYDPGINAGIFNAFATAAFRFGHTLVNPLLYRLDENFQPIAQDHLPLHKAFFSPFRIVNEGGIDPLLRGLFGVAGKMRVPSQLLNTELTERLFSMAHTVALDLAAINIQRGRDHGIPPYHDYRVYCNLSAAHTFEDLKNEIKNPEIREKLKRLYGSTLNIDLFPALVVEDLVPGSRLGPTLMCLLSTQFKRLRDGDRLWYENPGVFSPAQLTQIKQTSLARILCDNADNITRVQSDVFRVAEFPHGYGSCDEIPRVDLRVWQDCCEDCRTRGQFNAFSYHFRGRRSLEFSYQEDKPTKKTRPRKIPSVGRQGEHLSNSTSAFSTRSDASGTNDFREFVLEMQKTITDLRTQIKKLESRLSTTECVDAGGESHANNTKWKKDACTICECKDGQVTCFVEACPPATCAVPVNIPGACCPVCLQKRAEEKP

SEQ ID NO: 57386 - protein, 723 aa, Homo sapiens
  VARIANT 1: note = MOD_RES - Any amino acid
XRGPGRRCLLALVLFCAWGTLAVVAQKPGAGCPSRCLCFRTTVRCMHLLLEAVPAVAPQTSILDLRFNRIREIQPGAFRRLRNLNTLLLNNNQIKRIPSGAFEDLENLKYLYLYKNEIQSIDRQAFKGLASLEQLYLHFNQIETLDPDSFQHLPKLERLFLHNNRITHLVPGTFNHLESMKRLRLDSNTLHCDCEILWLADLLKTYAESGNAQAAAICEYPRRIQGRSVATITPEELNCERPRITSEPQDADVTSGNTVYFTCRAEGNPKPEIIWLRNNNELSMKTDSRLNLLDDGTLMIQNTQETDQGIYQCMAKNVAGEVKTQEVTLRYFGSPARPTFVIQPQNTEVLVGESVTLECSATGHPPPRISWTRGDRTPLPVDPRVNITPSGGLYIQNVVQGDSGEYACSATNNIDSVHATAFIIVQALPQFTVTPQDRVVIEGQTVDFQCEAKGNPPPVIAWTKGGSQLSVDRRHLVLSSGTLRISGVALHDQGQYECQAVNIIGSQKVVAHLTVQPRVTPVFASIPSDTTVEVGANVQLPCSSQGEPEPAITWNKDGVQVTESGKFHISPEGFLTINDVGPADAGRYECVARNTIGSASVSMVLSVNVPDVSRNGDPFVATSIVEAIATVDRAINSTRTHLFDSRPRSPNDLLALFRYPRDPYTVEQARAGEIFERTLQLIQEHVQHGLMVDLNGTSQCQSLFFLLHGLSNGVEHASVKSHS

SEQ ID NO: 57387 - protein, 256 aa, Homo sapiens
MAAAVGRLLRASVARHVSAIPWGISATAALRPAACGRTSLTNLLCSGSSQAKLFSTSSSCHAPAVTQHAPYFKGTAVVNGEFKDLSLDDFKGKYLVLFFYPLDFTFVCPTEIVAFSDKANEFHDVNCEVVAVSVDSHFSHLAWINTPRKNGGLGHMNIALLSDLTKQISRDYGVLLEGSGLALRGLFIIDPNGVIKHLSVNDLPVGRSVEETLRLVKAFQYVETHGEVCPANWTPDSPTIKPSPAASKEYFQKVNQ

SEQ ID NO: 57388 - protein, 238 aa, Homo sapiens
MAAAVGRLLRASVARHVSAIPWGISATAALRPAACGRTSLTNLLCSGSSQAPYFKGTAVVNGEFKDLSLDDFKGKYLVLFFYPLDFTFVCPTEIVAFSDKANEFHDVNCEVVAVSVDSHFSHLAWINTPRKNGGLGHMNIALLSDLTKQISRDYGVLLEGSGLALRGLFIIDPNGVIKHLSVNDLPVGRSVEETLRLVKAFQYVETHGEVCPANWTPDSPTIKPSPAASKEYFQKVNQ

SEQ ID NO: 57389 - protein, 214 aa, Homo sapiens
MGLAGVCALRRSAGYILVGGAGGQSAAAAARRYSEGEWASGGVRSFSRAAAAMAPIKVGDAIPAVEVFEGEPGNKVNLAELFKGKKGVLFGVPGAFTPGCSKTHLPGFVEQAEALKAKGVQVVACLSVNDAFVTGEWGRAHKAEGKVRLLADPTGAFGKETDLLLDDSLVSIFGNRRLKRFSMVVQDGIVKALNVEPDGTGLTCSLAPNIISQL

SEQ ID NO: 57390 - protein, 125 aa, Homo sapiens
MGLAGVCALRRSAGYILVGGAGGQSAAAAARRYSEGEWASGGVRSFSRAAAAMAPIKVRLLADPTGAFGKETDLLLDDSLVSIFGNRRLKRFSMVVQDGIVKALNVEPDGTGLTCSLAPNIISQL

SEQ ID NO: 57391 - protein, 170 aa, Homo sapiens
MGLAGVCALRRSAGYILVGGAGGQSAAAAARRYSEGEWASGGVRSFSRAAAAMAPIKVGDAIPAVEVFEGEPGNKVNLAELFKGKKGVLFGVPGAFTPGCSKVRLLADPTGAFGKETDLLLDDSLVSIFGNRRLKRFSMVVQDGIVKALNVEPDGTGLTCSLAPNIISQL

SEQ ID NO: 57392 - protein, 224 aa, Homo sapiens
MPGGLLLGDVAPNFEANTTVGRIRFHDFLGDSWGILFSHPRDFTPVCTTELGRAAKLAPEFAKRNVKLIALSIDSVEDHLAWSKDINAYNCEEPTEKLPFPIIDDRNRELAILLGMLDPAEKDEKGMPVTARVVFVFGPDKKLKLSILYPATTGRNFDEILRVVISLQLTAEKRVATPVDWKDGDSVMVLPTIPEEEAKKLFPKGVFTKELPSGKKYLRYTPQP

SEQ ID NO: 57393 - protein, 1283 aa, Homo sapiens
MWGSDRLAGAGGGGAAVTVAFTNARDCFLHLPRRLVAQLHLLQNQAIEVVWSHQPAFLSWVEGRHFSDQGENVAEINRQVGQKLGLSNGGQVFLKPCSHVVSCQQVEVEPLSADDWEILELHAVSLEQHLLDQIRIVFPKAIFPVWVDQQTYIFIQIVALIPAASYGRLETDTKLLIQPKTRRAKENTFSKADAEYKKLHSYGRDQKGMMKELQTKQLQSNTVGITESNENESEIPVDSSSVASLWTMIGSIFSFQSEKKQETSWGLTEINAFKNMQSKVVPLDNIFRVCKSQPPSIYNASATSVFHKHCAIHVFPWDQEYFDVEPSFTVTYGKLVKLLSPKQQQSKTKQNVLSPEKEKQMSEPLDQKKIRSDHNEEDEKACVLQVVWNGLEELNNAIKYTKNVEVLHLGKVWIPDDLRKRLNIEMHAVVRITPVEVTPKIPRSLKLQPRENLPKDISEEDIKTVFYSWLQQSTTTMLPLVISEEEFIKLETKDGLKEFSLSIVHSWEKEKDKNIFLLSPNLLQKTTIQVLLDPMVKEENSEEIDFILPFLKLSSLGGVNSLGVSSLEHITHSLLGRPLSRQLMSLVAGLRNGALLLTGGKGSGKSTLAKAICKEAFDKLDAHVERVDCKALRGKRLENIQKTLEVAFSEAVWMQPSVVLLDDLDLIAGLPAVPEHEHSPDAVQSQRLAHALNDMIKEFISMGSLVALIATSQSQQSLHPLLVSAQGVHIFQCVQHIQPPNQEQRCEILCNVIKNKLDCDINKFTDLDLQHVAKETGGFVARDFTVLVDRAIHSRLSRQSISTREKLVLTTLDFQKALRGFLPASLRSVNLHKPRDLGWDKIGGLHEVRQILMDTIQLPAKYPELFANLPIRQRTGILLYGPPGTGKTLLAGVIARESRMNFISVKGPELLSKYIGASEQAVRDIFIRAQAAKPCILFFDEFESIAPRRGHDNTGVTDRVVNQLLTQLDGVEGLQGVYVLAATSRPDLIDPALLRPGRLDKCVYCPPPDQVSRLEILNVLSDSLPLADDVDLQHVASVTDSFTGADLKALLYNAQLEALHGMLLSSGLQDGSSSSDSDLSLSSMVFLNHSSGSDDSAGDGECGLDQSLVSLEMSEILPDESKFNMYRLYFGSSYESELGNGTSSDLSSQCLSAPSSMTQDLPGVPGKDQLFSQPPVLRTASQEGCQELTQEQRDQLRADISIIKGRYRSQSGEDESMNQPGPIKTRLAISQSHLMTALGHTRPSISEDDWKNFAELYESFQNPKRRKNQSGTMFRPGQKVTLA

SEQ ID NO: 57394 - protein, 1226 aa, Homo sapiens
MWGSDRLAGAGGGGAAVTVAFTNARDCFLHLPRRLVAQLHLLQNQAIEVVWSHQPAFLSWVEGRHFSDQGENVAEINRQVGQKLGLSNGGQVFLKPCSHVVSCQQVEVEPLSADDWEILELHAVSLEQHLLDQIRIVFPKAIFPVWVDQQTYIFIQIVALIPAASYGRLETDTKLLIQPKTRRAKENTFSKADAEYKKLHSYGRDQKGMMKELQTKQLQSNTVGITESNENESEIPVDSSSVASLWTMIGSIFSFQSEKKQETSWGLTEINAFKNMQSKVVPLDNIFRVCKSQPPSIYNASATSVFHKHCAIHVFPWDQEYFDVEPSFTVTYGKLVKLLSPKQQQSKTKQNVLSPEKEKQMSEPLDQKKIRSDHNEEDEKACVLQVVWNGLEELNNAIKYTKNVEVLHLGKVWIPDDLRKRLNIEMHAVVRITPVEVTPKIPRSLKLQPRENLPKDISEEDIKTVFYSWLQQSTTTMLPLVISEEEFIKLETKDGLKEFSLSIVHSWEKEKDKNIFLLSPNLLQKTTIQVLLDPMVKEENSEEIDFILPFLKLSSLGGVNSLGVSSLEHITHSLLGRPLSRQLMSLVAGLRNGALLLTGGKGSGKSTLAKAICKEAFDKLDAHVERVDCKALRALNDMIKEFISMGSLVALIATSQSQQSLHPLLVSAQGVHIFQCVQHIQPPNQEQRCEILCNVIKNKLDCDINKFTDLDLQHVAKETGGFVARDFTVLVDRAIHSRLSRQSISTREKLVLTTLDFQKALRGFLPASLRSVNLHKPRDLGWDKIGGLHEVRQILMDTIQLPAKYPELFANLPIRQRTGILLYGPPGTGKTLLAGVIARESRMNFISVKGPELLSKYIGASEQAVRDIFIRAQAAKPCILFFDEFESIAPRRGHDNTGVTDRVVNQLLTQLDGVEGLQGVYVLAATSRPDLIDPALLRPGRLDKCVYCPPPDQVSRLEILNVLSDSLPLADDVDLQHVASVTDSFTGADLKALLYNAQLEALHGMLLSSGLQDGSSSSDSDLSLSSMVFLNHSSGSDDSAGDGECGLDQSLVSLEMSEILPDESKFNMYRLYFGSSYESELGNGTSSDLSSQCLSAPSSMTQDLPGVPGKDQLFSQPPVLRTASQEGCQELTQEQRDQLRADISIIKGRYRSQSGEDESMNQPGPIKTRLAISQSHLMTALGHTRPSISEDDWKNFAELYESFQNPKRRKNQSGTMFRPGQKVTLA

SEQ ID NO: 57395 - protein, 160 aa, Homo sapiens
MSLVAGLRNGALLLTGGKGSGKSTLAKAICKEAFDKLDAHVERVDCKALRGKRLENIQKTLEVAFSEAVWMQPSVVLLDDLDLIAGLPAVPEHEHSPDAVQSQRLAHALNDMIKEFISMGSLVALIATSQSQQSLHPLLVSAQGVHIFQCVQHIQPPNQN

SEQ ID NO: 57396 - protein, 632 aa, Homo sapiens
MWGSDRLAGAGGGGAAVTVAFTNARDCFLHLPRRLVAQLHLLQNQAIEVVWSHQPAFLSWVEGRHFSDQGENVAEINRQVGQKLGLSNGGQVFLKPCSHVVSCQQVEVEPLSADDWEILELHAVSLEQHLLDQIRIVFPKAIFPVWVDQQTYIFIQIVALIPAASYGRLETDTKLLIQPKTRRAKENTFSKADAEYKKLHSYGRDQKGMMKELQTKQLQSNTVGITESNENESEIPVDSSSVASLWTMIGSIFSFQSEKKQETSWGLTEINAFKNMQSKVVPLDNIFRVCKSQPPSIYNASATSVFHKHCAIHVFPWDQEYFDVEPSFTVTYGKLVKLLSPKQQQSKTKQNVLSPEKEKQMSEPLDQKKIRSDHNEEDEKACVLQVVWNGLEELNNAIKYTKNVEVLHLGKVWIPDDLRKRLNIEMHAVVRITPVEVTPKIPRSLKLQPRENLPKDISEEDIKTVFYSWLQQSTTTMLPLVISEEEFIKLETKDGLKEFSLSIVHSWEKEKDKNIFLLSPNLLQKTTIQVLLDPMVKEENSEEIDFILPFLKLSSLGGVNSLGVSSLEHITHSLLGRPLSRQLMSLVAGLRNGALLLTGGKGSGKSTLAKAICKEAFDKLDAHVERVDCKAL

SEQ ID NO: 57397 - protein, 346 aa, Homo sapiens
MAPAAASPPEVIRAAQKDEYYRGGLRSAAGGALHSLAGARKWLEWRKEVELLSDVAYFGLTTLAGYQTLGEEYVSIIQVDPSRIHVPSSLRRGVLVTLHAVLPYLLDKALLPLEQELQADPDSGRPLQGSLGPGGRGCSGARRWMRHHTATLTEQQRRALLRAVFVLRQGLACLQRLHVAWFYIHGVFYHLAKRLTGITYQALRPDPLRVLMSVAPSALQLRVRSLPGEDLRARVSYRLLGVISLLHLVLSMGLQLYGFRQRQRARKEWRLHRGLSHRRASLEERAVSRNPLCTLCLEERRHPTATPCGHLFCWECITAWCSSKAECPLCREKFPPQKLIYLRHYR

SEQ ID NO: 57398 - protein, 326 aa, Homo sapiens
MAPAAASPPEVIRAAQKDEYYRGGLRSAAGGALHSLAGARKWLEWRKEVELLSDVAYFGLTTLAGYQTLGEEYVSIIQVDPSRIHVPSSLRRGVLVTLHAVLPYLLDKALLPLEQELQADPDSGRPLQGSLGPGGRGCSGARRWMRHHTATLTEQQRRALLRAVFVLRQGLACLQRLHVAWFYIHGVFYHLAKRLTGITYLRVRSLPGEDLRARVSYRLLGVISLLHLVLSMGLQLYGFRQRQRARKEWRLHRGLSHRRASLEERAVSRNPLCTLCLEERRHPTATPCGHLFCWECITAWCSSKAECPLCREKFPPQKLIYLRHYR

SEQ ID NO: 57399 - protein, 247 aa, Homo sapiens
MDAFTRFTNQTQGRDRLFRATQYTCMLLRYLLEPKAGKEKVVMKLKKLESSVSTGRKWFRLGNVVHAIQATEQSIHATDLVPRLCLTLANLNRVIYFICDTILWVRSVGLTSGINKEKWRTRAAHHYYYSLLLSLVRDLYEISLQMKRVTCDRAKKEKSASQDPLWFSVAEEETEWLQSFLLLLFRSLKQHPPLLLDTVKNLCDILNPLDQLGIYKSNPGIIGLGGLVSSIAGMITVAYPQMKLKTR

SEQ ID NO: 57400 - protein, 241 aa, Homo sapiens
MASLSGLASALESYRGRDRLIRVLGYCCQLVGGVLVEQCPARSEVGTRLLVVSTQLSHCRTILRLFDDLAMFVYTKQYGLGAQEEDAFVRCVSVLGNLADQLYYPCEHVAWAADARVLHVDSSRWWTLSTTLWALSLLLGVARSLWMLLKLRQRLRSPTAPFTSPLPRGKRRAMEAQMQSEALSLLSNLADLANAVHWLPRGVLWAGRFPPWLVGLMGTISSILSMYQAARAGGQAEATTP

SEQ ID NO: 57401 - protein, 168 aa, Homo sapiens
  VARIANT 1: note = MOD_RES - Any amino acid
XYRGRDRLIRVLGYCCQLVGGVLVEQCPARSEVGTRLLVVSTQLSHCRTILRLFDDLAMFVYTKQYGLGAQEEDAFVRCVSVLGNLADQLYYPCEHVAWAADARVLHVDSSRWWTLSTTLWALSLLLGVARSLWMLLKLRQRLRSPTAPFTSMYQAARAGGQAEATTP

SEQ ID NO: 57402 - protein, 403 aa, Homo sapiens
MASQPPPPPKPWETRRIPGAGPGPGPGPTFQSADLGPTLMTRPGQPALTRVPPPILPRPSQQTGSSSVNTFRPAYSSFSSGYGAYGNSFYGGYSPYSYGYNGLGYNRLRVDDLPPSRFVQQAEESSRGAFQSIESIVHAFASVSMMMDATFSAVYNSFRAVLDVANHFSRLKIHFTKVFSAFALVRTIRYLYRRLQRMLGLRRGSENEDLWAESEGTVACLGAEDRAATSAKSWPIFLFFAVILGGPYLIWKLLSTHSDEVTDSINWASGEDDHVVARAEYDFAAVSEEEISFRAGDMLNLALKEQQPKVRGWLLASLDGQTTGLIPANYVKILGKRKGRKTVESSKVSKQQQSFTNPTLTKGATVADSLDEQEAAFESVFVETNKVPVAPDSIGKDGEKQDL

SEQ ID NO: 57403 - protein, 377 aa, Homo sapiens
MASSEQAEQPSQPSSTPGSENVLPREPLIATAVKFLQNSRVRQSPLATRRAFLKKKGLTDEEIDMAFQQSGTAADEPSSLGPATQVVPVQPPHLISQPYSPAGSRWRDYGALAIIMAGIAFGFHQLYKKYLLPLILGGREDRKQLERMEAGLSELSGSVAQTVTQLQTTLASVQELLIQQQQKIQELAHELAAAKATTSTNWILESQNINELKSEINSLKGLLLNRRQFPPSPSAPKIPSWQIPVKSPSPSSPAAVNHHSSSDISPVSNESTSSSPGKEGHSPEGSTVTYHLLGPQEEGEGVVDVKGQVRMEVQGEEEKREDKEDEEDEEDDDVSHVDEEDCLGVQREDRRGGDGQINEQVEKLRRPEGASNESERD

SEQ ID NO: 57404 - protein, 313 aa, Homo sapiens
MAFQQSGTAADEPSSLGPATQVVPVQPPHLISQPYSPAGSRWRDYGALAIIMAGIAFGFHQLYKKYLLPLILGGREDRKQLERMEAGLSELSGSVAQTVTQLQTTLASVQELLIQQQQKIQELAHELAAAKATTSTNWILESQNINELKSEINSLKGLLLNRRQFPPSPSAPKIPSWQIPVKSPSPSSPAAVNHHSSSDISPVSNESTSSSPGKEGHSPEGSTVTYHLLGPQEEGEGVVDVKGQVRMEVQGEEEKREDKEDEEDEEDDDVSHVDEEDCLGVQREDRRGGDGQINEQVEKLRRPEGASNESERD

SEQ ID NO: 57405 - protein, 346 aa, Homo sapiens
MEKLRLLGLRYQEYVTRHPAATAQLETAVRGFSYLLAGRFADSHELSELVYSASNLLVLLNDGILRKELRKKLPVSLSQQKLLTWLSVLECVEVFMEMGAAKVWGEVGRWLVIALVQLAKAVLRMLLLLWFKAGLQTSPPIVPLDRETQAQPPDGDHSPGNHEQSYVGKRSNRVVRTLQNTPSLHSRHWGAPQQREGRQQQHHEELSATPTPLGLQETIAEFLYIARPLLHLLSLGLWGQRSWKPWLLAGVVDVTSLSLLSDRKGLTRRERRELRRRTILLLYYLLRSPFYDRFSEARILFLLQLLADHVPGVGLVTTSQRAASPCLPARPHTQPWSPPAFLPGHP

SEQ ID NO: 57406 - protein, 336 aa, Homo sapiens
MEKLRLLGLRYQEYVTRHPAATAQLETAVRGFSYLLAGRFADSHELSELVYSASNLLVLLNDGILRKELRKKLPVSLSQQKLLTWLSVLECVEVFMEMGAAKVWGEVGRWLVIALVQLAKAVLRMLLLLWFKAGLQTSPPIVPLDRETQAQPPDGDHSPGNHEQSYVGKRSNRVVRTLQNTPSLHSRHWGAPQQREGRQQQHHEELSATPTPLGLQETIAEFLYIARPLLHLLSLGLWGQRSWKPWLLAGVVDVTSLSLLSDRKGLTRRERRELRRRTILLLYYLLRSPFYDRFSEARILFLLQLLADHVPGVGLVTRPLMDYLPTWQKIYFYSWG

SEQ ID NO: 57407 - protein, 299 aa, Homo sapiens
MAAAEEGCSVGAEADRELEELLESALDDFDKAKPSPAPPSTTTAPDASGPQKRSPGDTAKDALFASQEKFFQELFDSELASQATAEFEKAMKELAEEEPHLVEQFQKLSEAAGRVGSDMTSQQEFTSCLKETLSGLAKNATDLQNSSMSEEELTKAMEGLGMDEGDGEGNILPIMQSIMQNLLSKDVLYPSLKEITEKYPEWLQSHRESLPPEQFEKYQEQHSVMCKICEQFEAETPTDSETTQKARFEMVLDLMQQLQDLGHPPKELAGEMPPGLNFDLDALNLSGPPGASGEQCLIM

SEQ ID NO: 57408 - protein, 235 aa, Homo sapiens
MESGALDDFDKAKPSPAPPSTTTAPDASGPQKRSPGDTAKDALFASQEKFFQELFDSELASQATAEFEKAMKELAEEEPHLVEQFQKLSEAAGRVGSDMTSQQEFTSCLKETLSGLAKNATDLQNSSMSEEELTKAMEGLGMDEGDGEGNILPIMQSIMQNLLSKDVLYPSLKEITEKYPEWLQSHRESLPPEQFEKYQEQHSVMCKICEQFEAETPTDSETTQKARFEMVLDLM

SEQ ID NO: 57409 - protein, 279 aa, Homo sapiens [sequence omitted]

SEQ ID NO: 57410 - protein, 209 aa, Homo sapiens
MKELAEEEPHLVEQFQKLSEAAGRVGSDMTSQQEFTSCLKETLSGLAKNATDLQNSSMSEEELTKAMEGLGMDEGDGEGNILPIMQSIMQNLLSKDVLYPSLKEITEKYPEWLQSHRESLPPEQFEKYQEQHSVMCKICEQFEAETPTDSETTQKARFEMVLDLMQQLQDLGHPPKELAGEMPPGLNFDLDALNLSGPPGASGEQCLIM

SEQ ID NO: 57411 - protein, 186 aa, Homo sapiens
MAAAEEGCSVGAEADRELEELLESALDDFDKAKPSPAPPSTTTAPDASGPQKRSPGDTAKDALFASQEKFFQELFDSELASQATAEFEKAMKELAEEEPHLVEQFQKLSEAAGRVELQHVGRRADQGHGGARHGRRGWGREHPPHHAEYYAEPTLQGCAVPITEGDHRKVSRMVAESSGISTSRAV

SEQ ID NO: 57412 - protein, 305 aa, Homo sapiens
MASRKENAKSANRVLRISQLDALELNKALEQLVWSQFTQCFHGFKPGLLARFEPEVKACLWVFLWRFTIYSKNATVGQSVLNIKYKNDFSPNLRYQPPSKNQKIWYAVCTIGGRWLEERCYDLFRNHHLASFGKVKQCVNFVIGLLKLGGLINFLIFLQRGKFATLTERLLGIHSVFCKPQNICEVGFEYMNRELLWHGFAEFLIFLLPLINVQKLKAKLSSWCIPLTGAPNSDNTLATSGKECALCGEWPTMPHTIGCEHIFCYFCAKSSFLFDVYFTCPKCGTEVHSLQPLKSGIEMSEVNAL

SEQ ID NO: 57413 - protein, 305 aa, Homo sapiens; identical to SEQ ID NO: 57412

SEQ ID NO: 57414 - protein, 180 aa, Homo sapiens
MASRKENAKSANRVLRISQLDALELNKALEQLVWSQFTQCFHGFKPGLLARFEPEVKACLWVFLWRFTIYSKNATVGQSVLNIKYKNDFSPNLRYQPPSKNQKIWYAVCTIGGRWLEERCYDLFRNHHLASFGKVKQCVNFVIGLLKLGGLINFLIFLQRGKFATLTERLLGIHSVFCKP

SEQ ID NO: 57415 - skipped

SEQ ID NO: 57416 - protein, 305 aa, Homo sapiens; identical to SEQ ID NO: 57412

SEQ ID NO: 57417 - protein, 305 aa, Homo sapiens; identical to SEQ ID NO: 57412

SEQ ID NO: 57418 - protein, 305 aa, Homo sapiens
MKSDSSTSAAPLRGLGGPLRSSEPVRAVPARAPAVDLLEEAADLLVVHLDFRAALETCERAWQSLANHAVAEEPAGTSLEVKCSLCVVGIQALAEMDRWQEVLSWVLQYYQVPEKLPPKVLELCILLYSKMQEPGAVLDVVGAWLQDPANQNLPEYGALAEFHVQRVLLPLGCLSEAEELVVGSAAFGEERRLDVLQAIHTARQQQKQEHSGSEEAQKPNLEGSVSHKFLSLPMLVRQLWDSAVSHFFSLPFKKSLLAALILCLLVVRFDPASPSSLHFLYKLAQLFRWIRKAAFSRLYQLRIRD

SEQ ID NO: 57419 - protein, 305 aa, Homo sapiens; identical to SEQ ID NO: 57418

SEQ ID NO: 57420 - protein, 365 aa, Homo sapiens
MKSDSSTSAAPLRGLGGPLRSSEPVRAVPARAPAVDLLEEAADLLVVHLDFRAALETCERAWQSLANHAVAEEPAGTSLEVKCSLCVVGIQALAEMDRWQEVLSWVLQYYQVPEKLPPKVLELCILLYSKMQEPGAVLDVVGAWLQDPANQNLPEYGALAEFHVQRVLLPLGCLSEAEELVVGSAAFGEERRLDVLQAIHTARQQQKQEHSGSEEAQKPNLEGSVSHKFLSLPMLVRQLWDSAVSHFFSLPFKKSLLAALILCLLVVRFDPASPSSLHFLYKLAQLFAGSGRLHFLASTSSASVTEGPCAPQPLCSSRPWPQKQSDRATHPQAPLGKWDQPNLAECTVSCCLGALSFAPYFGWSR

SEQ ID NO: 57421 - protein, 256 aa, Homo sapiens
MKSDSSTSAAPLRGLGGPLRSSEPVRAVPARAPAVDLLEEAADLLVVHLDFRAALETCERAWQSLANHAVAEEPAGTSLEVKCSLCVVGIQALAEMDRWQEVLSWVLQYYQVPEKLPPKVLELCILLYSKMQEPGAVLDVVGAWLQDPANQNLPEYGALAEFHVQRVLLPLGCLSEAEELVVGSAAFGEERRLDVLQAIHTARQQQKQEHSGSEEAQKPNLEASPSSLHFLYKLAQLFRWIRKAAFSRLYQLRIRD

SEQ ID NO: 57422 - protein, 182 aa, Homo sapiens
MLRSVWNFLKRHKKKCIFLGTVLGVLSMLPTLREALMQQLNSESLTALLKNRPSNKLEIWEDLKIISFTRSTVAVYSTCMLVVLLRVQLNIIGGYIYLDNAAVGKNGTTILAPPDVQQQYLSSIQHLLGDGLTELITVIKQAVQKVLGSVSLKHSLSLLDLEQKLKEIRNLVEQHKSSSWIN

SEQ ID NO: 57423 - protein, 373 aa, Homo sapiens
MLRSVWNFLKRHKKKCIFLGTVLGGVYILGKYGQKKIREIQEREAAEYIAQARRQYHFESNQRTCNMTVLSMLPTLREALMQQLNSESLTALLKNRPSNKLEIWEDLKIISFTRSTVAVYSTCMLVVLLRVQLNIIGGYIYLDNAAVGKNGTTILAPPDVQQQYLSSIQHLLGDGLTELITVIKQAVQKVLGSVSLKHSLSLLDLEQKLKEIRNLVEQHKSSSWINKDGSKPLLCHYMMPDEETPLAVQACGLSPRDITTIKLLNETRDMLESPDFSTVLNTCLNRGFSRLLDNMAEFFRPTEQDLQHGNSMNSLSSVSLPLAKIIPIVNGQIHSVCSETPSHFVQDLLTMEQVKDFAANVYEAFSTPQQLEK

SEQ ID NO: 57424 - protein, 182 aa, Homo sapiens; identical to SEQ ID NO: 57422

SEQ ID NO: 57425 - protein, 602 aa, Homo sapiens
MAMRELVEAECGGANPLMKLAGHFTQDKALRQEGLRPGPWPPGAPASEAASKPLGVASEDELVAEFLQDQNAPLVSRAPQTFKMDDLLAEMQQIEQSNFRQAPQRAPGVADLALSENWAQEFLAAGDAVDVTQDYNETDWSQEFISEVTDPLSVSPARWAEEYLEQSEEKLWLGEPEGTATDRWYDEYHPEEDLQHTASDFVAKVDDPKLANSEGTSDAWVDQFTRPVNTSALDMEFERAKSAIESDVDFWDKLQAELEEMAKRDAEAHPWLSDYDDLTSATYDKGYQFEEENPLRDHPQPFEEGLRRLQEGDLPNAVLLFEAAVQQDPKHMEAWQYLGTTQAENEQELLAISALRRCLELKPDNQTALMALAVSFTNESLQRQACETLRDWLRYTPAYAHLVTPAEEGAGGAGLGPSKRILGSLLSDSLFLEVKELFLAAVRLDPTSIDPDVQCGLGVLFNLSGEYDKAVDCFTAALSVRPNDYLLWNKLGATLANGNQSEEAVAAYRRALELQPGYIRSRYNLGISCINLGAHREAVEHFLEALNMQRKSRGPRGEGGAMSENIWSTLRLALSMLGQSDAYGAADARDLSTLLTMFGLPQ

SEQ ID NO: 57426 - protein, 631 aa, Homo sapiens
MAMRELVEAECGGANPLMKLAGHFTQDKALRQEGLRPGPWPPGAPASEAASKPLGVASEDELVAEFLQDQNAPLVSRAPQTFKMDDLLAEMQQIEQSNFRQAPQRAPGVADLALSENWAQEFLAAGDAVDVTQDYNETDWSQEFISEVTDPLSVSPARWAEEYLEQSEEKLWLGEPEGTATDRWYDEYHPEEDLQHTASDFVAKVDDPKLANSEFLKFVRQIGEGQVSLESGAGSGRAQAEQWAAEFIQQQGTSDAWVDQFTRPVNTSALDMEFERAKSAIELQAELEEMAKRDAEAHPWLSDYDDLTSATYDKGYQFEEENPLRDHPQPFEEGLRRLQEGDLPNAVLLFEAAVQQDPKHMEAWQYLGTTQAENEQELLAISALRRCLELKPDNQTALMALAVSFTNESLQRQACETLRDWLRYTPAYAHLVTPAEEGAGGAGLGPSKRILGSLLSDSLFLEVKELFLAAVRLDPTSIDPDVQCGLGVLFNLSGEYDKAVDCFTAALSVRPNDYLLWNKLGATLANGNQSEEAVAAYRRALELQPGYIRSRYNLGISCINLGAHREAVEHFLEALNMQRKSRGPRGEGGAMSENIWSTLRLALSMLGQSDAYGAADARDLSTLLTMFGLPQ

SEQ ID NO: 57427 - protein, 410 aa, Homo sapiens
MAMRELVEAECGGANPLMKLAGHFTQDKALRQEGLRPGPWPPGAPASEAVSVLEVESPGAASEAASKPLGVASEDELVAEFLQDQNAPLVSRAPQTFKMDDLLAEMQQIEQSNFRQAPQRAPGVADLALSENWAQEFLAAGDAVDVTQDYNETDWSQEFISEVTDPLSVSPARWAEEYLEQSEEKLWLGEPEGTATDRWYDEYHPEEDLQHTASDFVAKVDDPKLANSEGTSDAWVDQFTRPVNTSALDMEFERAKSAIELQAELEEMAKRDAEAHPWLSDYDDLTSATYDKGYQFEEENPLRDHPQPFEEGLRRLQEGDLPNAVLLFEAAVQQDPKHMEAWQYLGTTQAENEQELLAISALRRCLELKPDNQTALMALAVSFTNESLQRQACETLRDWLRYTPAYAHLV

SEQ ID NO: 57428 - protein, 660 aa, Homo sapiens
MLLCRAHRVLGLRGARELAVTMAMRELVEAECGGANPLMKLAGHFTQDKALRQEGLRPGPWPPGAPASEAASKPLGVASEDELVAEFLQDQNAPLVSRAPQTFKMDDLLAEMQQIEQSNFRQAPQRAPGVADLALSENWAQEFLAAGDAVDVTQDYNETDWSQEFISEVTDPLSVSPARWAEEYLEQSEEKLWLGEPEGTATDRWYDEYHPEEDLQHTASDFVAKVDDPKLANSEFLKFVRQIGEGQVSLESGAGSGRAQAEQWAAEFIQQQGTSDAWVDQFTRPVNTSALDMEFERAKSAIESDVDFWDKLQAELEEMAKRDAEAHPWLSDYDDLTSATYDKGYQFEEENPLRDHPQPFEEGLRRLQEGDLPNAVLLFEAAVQQDPKHMEAWQYLGTTQAENEQELLAISALRRCLELKPDNQTALMALAVSFTNESLQRQACETLRDWLRYTPAYAHLVTPAEEGAGGAGLGPSKRILGSLLSDSLFLEVKELFLAAVRLDPTSIDPDVQCGLGVLFNLSGEYDKAVDCFTAALSVRPNDYLLWNKLGATLANGNQSEEAVAAYRRALELQPGYIRSRYNLGISCINLGAHREAVEHFLEALNMQRKSRGPRGEGGAMSENIWSTLRLALSMLGQSDAYGAADARDLSTLLTMFGLPQ

SEQ ID NO: 57429 - protein, 639 aa, Homo sapiens
MAMRELVEAECGGANPLMKLAGHFTQDKALRQEGLRPGPWPPGAPASEAASKPLGVASEDELVAEFLQDQNAPLVSRAPQTFKMDDLLAEMQQIEQSNFRQAPQRAPGVADLALSENWAQEFLAAGDAVDVTQDYNETDWSQEFISEVTDPLSVSPARWAEEYLEQSEEKLWLGEPEGTATDRWYDEYHPEEDLQHTASDFVAKVDDPKLANSEFLKFVRQIGEGQVSLESGAGSGRAQAEQWAAEFIQQQGTSDAWVDQFTRPVNTSALDMEFERAKSAIESDVDFWDKLQAELEEMAKRDAEAHPWLSDYDDLTSATYDKGYQFEEENPLRDHPQPFEEGLRRLQEGDLPNAVLLFEAAVQQDPKHMEAWQYLGTTQAENEQELLAISALRRCLELKPDNQTALMALAVSFTNESLQRQACETLRDWLRYTPAYAHLVTPAEEGAGGAGLGPSKRILGSLLSDSLFLEVKELFLAAVRLDPTSIDPDVQCGLGVLFNLSGEYDKAVDCFTAALSVRPNDYLLWNKLGATLANGNQSEEAVAAYRRALELQPGYIRSRYNLGISCINLGAHREAVEHFLEALNMQRKSRGPRGEGGAMSENIWSTLRLALSMLGQSDAYGAADARDLSTLLTMFGLPQ

SEQ ID NO: 57430 - protein, 654 aa, Homo sapiens
MAMRELVEAECGGANPLMKLAGHFTQDKALRQEGLRPGPWPPGAPASEAVSVLEVESPGAASEAASKPLGVASEDELVAEFLQDQNAPLVSRAPQTFKMDDLLAEMQQIEQSNFRQAPQRAPGVADLALSENWAQEFLAAGDAVDVTQDYNETDWSQEFISEVTDPLSVSPARWAEEYLEQSEEKLWLGEPEGTATDRWYDEYHPEEDLQHTASDFVAKVDDPKLANSEFLKFVRQIGEGQVSLESGAGSGRAQAEQWAAEFIQQQGTSDAWVDQFTRPVNTSALDMEFERAKSAIESDVDFWDKLQAELEEMAKRDAEAHPWLSDYDDLTSATYDKGYQFEEENPLRDHPQPFEEGLRRLQEGDLPNAVLLFEAAVQQDPKHMEAWQYLGTTQAENEQELLAISALRRCLELKPDNQTALMALAVSFTNESLQRQACETLRDWLRYTPAYAHLVTPAEEGAGGAGLGPSKRILGSLLSDSLFLEVKELFLAAVRLDPTSIDPDVQCGLGVLFNLSGEYDKAVDCFTAALSVRPNDYLLWNKLGATLANGNQSEEAVAAYRRALELQPGYIRSRYNLGISCINLGAHREAVEHFLEALNMQRKSRGPRGEGGAMSENIWSTLRLALSMLGQSDAYGAADARDLSTLLTMFGLPQ

SEQ ID NO: 57431 - protein, 639 aa, Homo sapiens; identical to SEQ ID NO: 57429

SEQ ID NO: 57432 - protein, 114 aa, Homo sapiens
MAMRELVEAECGGANPLMKLAGHFTQDKALRQEGLRPGPWPPGAPASEAASKPLGVASEDELVAEFLQDQNAPLVSRAPQTFKMDDLLAEMQQIEQSNFRQAPQRAPGVADLAL

SEQ ID NO: 57433 - protein, 102 aa, Homo sapiens
MAMRELVEAECGGANPLMKLAGHFTQDKALRQEGLRPGPWPPGAPASEAASKPLGVASEDELVAEFLQDQNAPLVSRAPQTFKMDDLLAEMQQIEQSNFRQA

SEQ ID NO: 57434 - protein, 248 aa, Homo sapiens
MAMRELVEAECGGANPLMKLAGHFTQDKALRQEGLRPGPWPPGAPASEAASKPLGVASEDELVAEFLQDQNAPLVSRAPQTFKMDDLLAEMQQIEQSNFRQAPQRAPGVADLALSENWAQEFLAAGDAVDVTQDYNETDWSQEFISEVTDPLSVSPARWAEEYLEQSEEKLWLGEPEGTATDRWYDEYHPEEDLQHTASDFVAKVDDPKLANSEFLKFVRQIGEGQVSLESGAGSGRAQAEQWAAEFI

SEQ ID NO: 57435 - protein, 104 aa, Homo sapiens
MAMRELVEAECGGANPLMKLAGHFTQDKALRQEGLRPGPWPPGAPASEAASKPLGVASEDELVAEFLQDQNAPLVSRAPQTFKMDDLLAEMQQIEQSNFRQAPQ

SEQ ID NO: 57436 - protein, 624 aa, Homo sapiens
MYQGHMQVVGVTLKKKWHCLQKSDLTLALGKGSRAADKAVAMVMKEIPREESAEEKPLLTMTSQLVNEQQESRPLLSPSIDDFLCETKSEAIARPVTSNTAVLTTGLDLLDLSEPVSQTQTKAKKSEPSSKTSSLKKKADGSDLISTDAEQRGQPLRVPETSSLDLDIQTQLEKWDDVKFHGDRNTKGHPMAERKSSSSRTGSKELLWSSEHRSQPELSGGKSALNSESASELELVAPTQARLTKEHRWGSALLSRNHSLEEEFERAKAAVESDTEFWDKMQAEWEEMARRNWISENQEAQNQVTISASEKGYYFHTENPFKDWPGAFEEGLKRLKEGDLPVTILFMEAAILQDPGDAEAWQFLGITQAENENEQAAIVALQRCLELQPNNLKALMALAVSYTNTGHQQDACDALKNWIKQNPKYKYLVKSKKGSPGLTRRMSKSPVDSSVLEGVKELYLEAAHQNGDMIDPDLQTGLGVLFHLSGEFNRAIDAFNAALTVRPEDYSLWNRLGATLANGDRSEEAVEAYTRALEIQPGFIRSRYNLGISCINLGAYREAVSNFLTALSLQRKSRNQQQVPHPAISGNIWAALRIALSLMDQPELFQAANLGDLDVLLRAFNLDP

SEQ ID NO: 57437 - protein, 624 aa, Homo sapiens
MHQNGSQVVGVTLKKKWHCLQKSDLTLALGKGSRAADKAVAMVMKEIPREESAEEKPLLTMTSQLVNEQQESRPLLSPSIDDFLCETKSEAIARPVTSNTAVLTTGLDLLDLSEPVSQTQTKAKKSEPSSKTSSLKKKADGSDLISTDAEQRGQPLRVPETSSLDLDIQTQLEKWDDVKFHGDRNTKGHPMAERKSSSSRTGSKELLWSSEHRSQPELSGGKSALNSESASELELVAPTQARLTKEHRWGSALLSRNHSLEEEFERAKAAVESDTEFWDKMQAEWEEMARRNWISENQEAQNQVTISASEKGYYFHTENPFKDWPGAFEEGLKRLKEGDLPVTILFMEAAILQDPGDAEAWQFLGITQAENENEQAAIVALQRCLELQPNNLKALMALAVSYTNTGHQQDACDALKNWIKQNPKYKYLVKSKKGSPGLTRRMSKSPVDSSVLEGVKELYLEAAHQNGDMIDPDLQTGLGVLFHLSGEFNRAIDAFNAALTVRPEDYSLWNRLGATLANGDRSEEAVEAYTRALEIQPGFIRSRYNLGISCINLGAYREAVSNFLTALSLQRKSRNQQQVPHPAISGNIWAALRIALSLMDQPELFQAANLGDLDVLLRAFNLDP

SEQ ID NO: 57438 - protein, 518 aa, Homo sapiens
MVMKEIPREESAEEKPLLTMTSQLVNEQQESRPLLSPSIDDFLCETKSEAIARPVTSNTADIQTQLEKWDDVKFHGDRNTKGHPMAERKSSSSRTGSKELLWSSEHRSQPELSGGKSALNSESASELELVAPTQARLTKEHRWGSALLSRNHSLEEEFERAKAAVESDTEFWDKMQAEWEEMARRNWISENQEAQNQVTISASEKGYYFHTENPFKDWPGAFEEGLKRLKEGDLPVTILFMEAAILQDPGDAEAWQFLGITQAENENEQAAIVALQRCLELQPNNLKALMALAVSYTNTGHQQDACDALKNWIKQNPKYKYLVKSKKGSPGLTRRMSKSPVDSSVLEGVKELYLEAAHQNGDMIDPDLQTGLGVLFHLSGEFNRAIDAFNAALTVRPEDYSLWNRLGATLANGDRSEEAVEAYTRALEIQPGFIRSRYNLGISCINLGAYREAVSNFLTALSLQRKSRNQQQVPHPAISGNIWAALRIALSLMDQPELFQAANLGDLDVLLRAFNLDP

SEQ ID NO: 57439 - protein, 602 aa, Homo sapiens
MYQGHMQGKGSRAADKAVAMVMKEIPREESAEEKPLLTMTSQLVNEQQESRPLLSPSIDDFLCETKSEAIARPVTSNTAVLTTGLDLLDLSEPVSQTQTKAKKSEPSSKTSSLKKKADGSDLISTDAEQRGQPLRVPETSSLDLDIQTQLEKWDDVKFHGDRNTKGHPMAERKSSSSRTGSKELLWSSEHRSQPELSGGKSALNSESASELELVAPTQARLTKEHRWGSALLSRNHSLEEEFERAKAAVESDTEFWDKMQAEWEEMARRNWISENQEAQNQVTISASEKGYYFHTENPFKDWPGAFEEGLKRLKEGDLPVTILFMEAAILQDPGDAEAWQFLGITQAENENEQAAIVALQRCLELQPNNLKALMALAVSYTNTGHQQDACDALKNWIKQNPKYKYLVKSKKGSPGLTRRMSKSPVDSSVLEGVKELYLEAAHQNGDMIDPDLQTGLGVLFHLSGEFNRAIDAFNAALTVRPEDYSLWNRLGATLANGDRSEEAVEAYTRALEIQPGFIRSRYNLGISCINLGAYREAVSNFLTALSLQRKSRNQQQVPHPAISGNIWAALRIALSLMDQPELFQAANLGDLDVLLRAFNLDP

SEQ ID NO: 57440 - protein, 514 aa, Homo sapiens
MSSLSLKPLVQVSVGAFVQLVNEQQESRPLLSPSIDDFLCETKSEAIARPVTSNTADIQTQLEKWDDVKFHGDRNTKGHPMAERKSSSSRTGSKELLWSSEHRSQPELSGGKSALNSESASELELVAPTQARLTKEHRWGSALLSRNHSLEEEFERAKAAVESDTEFWDKMQAEWEEMARRNWISENQEAQNQVTISASEKGYYFHTENPFKDWPGAFEEGLKRLKEGDLPVTILFMEAAILQDPGDAEAWQFLGITQAENENEQAAIVALQRCLELQPNNLKALMALAVSYTNTGHQQDACDALKNWIKQNPKYKYLVKSKKGSPGLTRRMSKSPVDSSVLEGVKELYLEAAHQNGDMIDPDLQTGLGVLFHLSGEFNRAIDAFNAALTVRPEDYSLWNRLGATLANGDRSEEAVEAYTRALEIQPGFIRSRYNLGISCINLGAYREAVSNFLTALSLQRKSRNQQQVPHPAISGNIWAALRIALSLMDQPELFQAANLGDLDVLLRAFNLDP

SEQ ID NO: 57441 - protein, 626 aa, Homo sapiens
MYQGHMQKSKEQGYGKLSSDEDLEIIVDQKQGKGSRAADKAVAMVMKEIPREESAEEKPLLTMTSQLVNEQQESRPLLSPSIDDFLCETKSEAIARPVTSNTAVLTTGLDLLDLSEPVSQTQTKAKKSEPSSKTSSLKKKADGSDLISTDAEQRGQPLRVPETSSLDLDIQTQLEKWDDVKFHGDRNTKGHPMAERKSSSSRTGSKELLWSSEHRSQPELSGGKSALNSESASELELVAPTQARLTKEHRWGSALLSRNHSLEEEFERAKAAVESDTEFWDKMQAEWEEMARRNWISENQEAQNQVTISASEKGYYFHTENPFKDWPGAFEEGLKRLKEGDLPVTILFMEAAILQDPGDAEAWQFLGITQAENENEQAAIVALQRCLELQPNNLKALMALAVSYTNTGHQQDACDALKNWIKQNPKYKYLVKSKKGSPGLTRRMSKSPVDSSVLEGVKELYLEAAHQNGDMIDPDLQTGLGVLFHLSGEFNRAIDAFNAALTVRPEDYSLWNRLGATLANGDRSEEAVEAYTRALEIQPGFIRSRYNLGISCINLGAYREAVSNFLTALSLQRKSRNQQQVPHPAISGNIWAALRIALSLMDQPELFQAANLGDLDVLLRAFNLDP

SEQ ID NO: 57442 - protein, 583 aa, Homo sapiens
MVMKEIPREESAEEKPLLTMTSQLVNEQQESRPLLSPSIDDFLCETKSEAIARPVTSNTAVLTTGLDLLDLSEPVSQTQTKAKKSEPSSKTSSLKKKADGSDLISTDAEQRGQPLRVPETSSLDLDIQTQLEKWDDVKFHGDRNTKGHPMAERKSSSSRTGSKELLWSSEHRSQPELSGGKSALNSESASELELVAPTQARLTKEHRWGSALLSRNHSLEEEFERAKAAVESDTEFWDKMQAEWEEMARRNWISENQEAQNQVTISASEKGYYFHTENPFKDWPGAFEEGLKRLKEGDLPVTILFMEAAILQDPGDAEAWQFLGITQAENENEQAAIVALQRCLELQPNNLKALMALAVSYTNTGHQQDACDALKNWIKQNPKYKYLVKSKKGSPGLTRRMSKSPVDSSVLEGVKELYLEAAHQNGDMIDPDLQTGLGVLFHLSGEFNRAIDAFNAALTVRPEDYSLWNRLGATLANGDRSEEAVEAYTRALEIQPGFIRSRYNLGISCINLGAYREAVSNFLTALSLQRKSRNQQQVPHPAISGNIWAALRIALSLMDQPELFQAANLGDLDVLLRAFNLDP

SEQ ID NO: 57443 - protein, 591 aa, Homo sapiens
MYQGHMQKSKEQGYGKLSSDEDLEIIVDQKQLVNEQQESRPLLSPSIDDFLCETKSEAIARPVTSNTAVLTTGLDLLDLSEPVSQTQTKAKKSEPSSKTSSLKKKADGSDLISTDAEQRGQPLRVPETSSLDLDIQTQLEKWDDVKFHGDRNTKGHPMAERKSSSSRTGSKELLWSSEHRSQPELSGGKSALNSESASELELVAPTQARLTKEHRWGSALLSRNHSLEEEFERAKAAVESDTEFWDKMQAEWEEMARRNWISENQEAQNQVTISASEKGYYFHTENPFKDWPGAFEEGLKRLKEGDLPVTILFMEAAILQDPGDAEAWQFLGITQAENENEQAAIVALQRCLELQPNNLKALMALAVSYTNTGHQQDACDALKNWIKQNPKYKYLVKSKKGSPGLTRRMSKSPVDSSVLEGVKELYLEAAHQNGDMIDPDLQTGLGVLFHLSGEFNRAIDAFNAALTVRPEDYSLWNRLGATLANGDRSEEAVEAYTRALEIQPGFIRSRYNLGISCINLGAYREAVSNFLTALSLQRKSRNQQQVPHPAISGNIWAALRIALSLMDQPELFQAANLGDLDVLLRAFNLDP

SEQ ID NO: 57444 - protein, 738 aa, Homo sapiens
MALAVLRVLEPFPTETPPLAVLLPPGGPWPAAELGLVLALRPAGESPAGPALLVAALEGPDAGTEEQGPGPPQLLVSRALLRLLALGSGAWVRARAVRRPPALGWALLGTSLGPGLGPRVGPLLVRRGETLPVPGPRVLETRPALQGLLGPGTRLAVTELRGRARLCPESGDSSRPPPPPVVSSFAVSGTVRRLQGVLGGTGDSLGVSRSCLRGLGLFQGEWVWVAQARESSNTSQPHLARVQVLEPRWDLSDRLGPGSGPLGEPLADGLALVPATLAFNLGCDPLEMGELRIQRYLEGSIAPEDKGSCSLLPGPPFARELHIEIVSSPHYSTNGNYDGVLYRHFQIPRVVQEGDVLCVPTIGQVEILEGSPEKLPRWREMFFKVKKTVGEAPDGPASAYLADTTHTSLYMVGSTLSPVPWLPSEESTLWSSLSPPGLEALVSELCAVLKPRLQPGGALLTGTSSVLLRGPPGCGKTTVVAAACSHLGLHLLKVPCSSLCAESSGAVETKLQAIFSRARRCRPAVLLLTAVDLLGRDRDGLGEDARVMAVLRHLLLNEDPLNSCPPLMVVATTSRAQDLPADVQTAFPHELEVPALSEGQRLSILRALTAHLPLGQEVNLAQLARRCAGFVVGDLYALLTHSSRAACTRIKNSGLAGGLTEEDEGELCAAGFPLLAEDFGQALEQLQTAHSQAVGAPKVETKSLECLPGPGLQLHALSSLMNWTLWPQAGGEVEILEE

SEQ ID NO: 57445 - protein, 980 aa, Homo sapiens
MALAVLRVLEPFPTETPPLAVLLPPGGPWPAAELGLVLALRPAGESPAGPALLVAALEGPDAGTEEQGPGPPQLLVSRALLRLLALGSGAWVRARAVRRPPALGWALLGTSLGPGLGPRVGPLLVRRGETLPVPGPRVLETRPALQGLLGPGTRLAVTELRGRARLCPESGDSSRPPPPPVVSSFAVSGTVRRLQGVLGGTGDSLGVSRSCLRGLGLFQGEWVWVAQARESSNTSQPHLARVQVLEPRWDLSDRLGPGSGPLGEPLADGLALVPATLAFNLGCDPLEMGELRIQRYLEGSIAPEDKGSCSLLPGPPFARELHIEIVSSPHYSTNGNYDGVLYRHFQIPRVVQEGDVLCVPTIGQVEILEGSPEKLPRWREMFFKVKKTVGEAPDGPASAYLADTTHTSLYMVGSTLSPVPWLPSEESTLWSSLSPPGLEALVSELCAVLKPRLQPGGALLTGTSSVLLRGPPGCGKTTVVAAACSHLGLHLLKVPCSSLCAESSGAVETKLQAIFSRARRCRPAVLLLTAVDLLGRDRDGLGEDARVMAVLRHLLLNEDPLNSCPPLMVVATTSRAQDLPADVQTAFPHELEVPALSEGQRLSILRALTAHLPLGQEVNLAQLARRCAGFVVGDLYALLTHSSRAACTRIKNSGLAGGLTEEDEGELCAAGFPLLAEDFGQALEQLQTAHSQAVGAPKIPSVSWHDVGGLQEVKKEILETIQLPLEHPELLSLGLRRSGLLLHGPPGTGKTLLAKAVATECSLTFLSVKGPELINMYVGQSEENVREVFARARAAAPCIIFFDELDSLAPSRGRSGDSGGVMDRVVSQLLAELDGLHSTQDVFVIGATNRPDLLDPALLRPGRFDKLVFVGANEDRASQLRVLSAITRKFKLEPSVSLVNVLDCCPPQLTGADLYSLCSDAMTAALKRRVHDLEEGLEPGSSALMLTMEDLLQAAARLQPSVSEQELLRYKRIQRKFAAC

SEQ ID NO: 57446 - protein, 323 aa, Homo sapiens
MSAVCGGAARMLRTPGRHGYAAEFSPYLPGRLACATAQHYGIAGCGTLLILDPDEAGLRLFRSFDWNDGLFDVTWSENNEHVLITCSGDGSLQLWDTAKAAGPLQVYKEHAQEVYSVDWSQTRGEQLVVSGSWDQTVKLWDPTVGKSLCTFRGHESIIYSTIWSPHIPGCFASASGDQTLRIWDVKAAGVRIVIPAHQAEILSCDWCKYNENLLVTGAVDCSLRGWDLRNVRQPVFELLGHTYAIRRVKFSPFHASVLASCSYDFTVRFWNFSKPDSLLETVEHHTEFTCGLDFSLQSPTQVADCSWDETIKIYDPACLTIPA

SEQ ID NO: 57447 - protein, 122 aa, Homo sapiens
MSAVCGGAARMLRTPGRHGYAAEFSPYLPGRLACATAQHYGIAGCGTLLILDPDEAGLRLFRSFDWNDGLFDVTWSENNEHVLITCSGDGSLQLWDTAKAAGPLQVYKEHAQEYVQGSCVVK

SEQ ID NO: 57448 - protein, 280 aa, Homo sapiens
MSAVCGGAARMLRTPGRHGYAAEFSPYLPGRLACATAQHYGIAGCGTLLILDPDEAGLRLFRSFDWNDGLFDVTWSENNEHVLITCSGDGSLQLWDTAKAAGPLQVYKEHAQEVYSVDWSQTRGEQLVVSGSWDQTVKLWDPTVGKSLCTFRGHESIIYSTIWSPHIPGCFASASGDQTLRIWDVKAAGVRIVIPAHQAEILSCDWCKYNENLLVTGAVDCSLRGWDLRNVRQPVFELLGHTYAIRRVKMESCPVTQTRSQLTATSAFWVQAVLLPQPTE

SEQ ID NO: 57449 - protein, 303 aa, Homo sapiens
MASWAKGRSYLAPGLLQGQVAIVTGGATGIGKAIVKELLELGSNVVIASRKLERLKSAADELQANLPPTKQARVIPIQCNIRNEEEVNNLVKSTLDTFGKINFLVNNGGGQFLSPAEHISSKGWHAVLETNLTGTFYMCKAVYSSWMKEHGGSIVNIIVPTKAGFPLAVHSGAARAGVYNLTKSLALEWACSGIRINCVAPGVIYSQTAVENYGSWGQSFFEGSFQKIPAKRIGVPEEVSSVVCFLLSPAASFITGQSVDVDGGRSLYTHSYEVPDHDNWPKGAGDLSVVKKMKETFKEKAKL

SEQ ID NO: 57450 - protein, 468 aa, Homo sapiens
MVDTESPLCPLSPLEAGDLESPLSEEFLQEMGNIQEISQSIGEDSSGSFGFTEYQYLGSCPGSDGSVITDTLSPASSPSSVTYPVVPGSVDESPSGALNIECRICGDKASGYHYGVHACEGCKGFFRRTIRLKLVYDKCDRSCKIQKKNRNKCQYCRFHKCLSVGMSHNAIRFGRMPRSEKAKLKAEILTCEHDIEDSETADLKSLAKRIYEAYLKNFNMNKVKARVILSGKASNNPPFVIHDMETLCMAEKTLVAKLVANGIQNKEAEVRIFHCCQCTSVETVTELTEFAKAIPGFANLDLNDQVTLLKYGVYEAIFAMLSSVMNKDGMLVAYGNGFITREFLKSLRKPFCDIMEPKFDFAMKFNALELDDSDISLFVAAIICCGDRPGLLNVGHIEKMQEGIVHVLRLHLQSNHPDDIFLFPKLLQKMADLRQLVTEHAQLVQIIKKTESDAALHPLLQEIYRDMY

SEQ ID NO: 57451 - protein, 468 aa, Homo sapiens; identical to SEQ ID NO: 57450

SEQ ID NO: 57452 - protein, 468 aa, Homo sapiens; identical to SEQ ID NO: 57450

SEQ ID NO: 57453 - protein, 468 aa, Homo sapiens; identical to SEQ ID NO: 57450

SEQ ID NO: 57454 - protein, 69 aa, Homo sapiens
MVDTESPLCPLSPLEAGDLESPLSEEFLQEMGNIQEISQSIGEDSSGSFGFTEYQYLGSCPGSDGSVIT

SEQ ID NO: 57455 - protein, 133 aa, Homo sapiens
MVDTESPLCPLSPLEAGDLESPLSEEFLQEMGNIQEISQSIGEDSSGSFGFTEYQYLGSCPGSDGSVITDTLSPASSPSSVTYPVVPGSVDESPSGALNIECRICGDKASGYHYGVHACEGCKVEGSWNRAWW

SEQ ID NO: 57456 - protein, 174 aa, Homo sapiens
MVDTESPLCPLSPLEAGDLESPLSEEFLQEMGNIQEISQSIGEDSSGSFGFTEYQYLGSCPGSDGSVITDTLSPASSPSSVTYPVVPGSVDESPSGALNIECRICGDKASGYHYGVHACEGCKGFFRRTIRLKLVYDKCDRSCKIQKKNRNKCQYCRFHKCLSVGMSHNAFCHT

SEQ ID NO: 57457 - protein, 9 aa, Homo sapiens
MVDTESPLC

SEQ ID NO: 57458 - protein, 162 aa, Homo sapiens
MNKVKARVILSGKASNNPPFVIHDMETLCMAEKTLVAKLVANGIQNKEAEVRIFHCCQCTSVETVTELTEFAKAIPGFANLDLNDQVTLLKYGVYEAIFAMLSSVMNKDGMLVAYGNGFITREFLKSLRKPFCDIMEPKFDFAMKFNALELDDSDISLFVAA

SEQ ID NO: 57459 - protein, 441 aa, Homo sapiens
MEQPQEEAPEVREEEEKEEVAEAEGAPELNGGPQHALPSSSYTDLSRSSSPPSLLDQLQMGCDGASCGSLNMECRVCGDKASGFHYGVHACEGCKGFFRRTIRMKLEYEKCERSCKIQKKNRNKCQYCRFQKCLALGMSHNAIRFGRMPEAEKRKLVAGLTANEGSQYNPQVADLKAFSKHIYNAYLKNFNMTKKKARSILTGKASHTAPFVIHDIETLWQAEKGLVWKQLVNGLPPYKEISVHVFYRCQCTTVETVRELTEFAKSIPSFSSLFLNDQVTLLKYGVHEAIFAMLASIVNKDGLLVANGSGFVTREFLRSLRKPFSDIIEPKFEFAVKFNALELDDSDLALFIAAIILCGDRPGLMNVPRVEAIQDTILRALEFHLQANHPDAQYLFPKLLQKMADLRQLVTEHAQMMQRIKKTETETSLHPLLQEIYKDMY

SEQ ID NO: 57460 - protein, 361 aa, Homo sapiens
MEQPQEEAPEVREEEEKEEVAEAEGAPELNGGPQHALPSSSYTDLSRSSSPPSLLDQLQMGCDGASCGSLNMECRVCGDKASGFHYGVHACEGCKGFFRRTIRMKLEYEKCERSCKIQKKNRNKCQYCRFQKCLALGMSHNAIRFGRMPEAEKRKLVAGLTANEGSQYNPQVADLKAFSKHIYNAYLKNFNMTKKKARSILTGKASHTAPFVIHDIETLWQAEKGLVWKQLVNGLPPYKEISVHVFYRCQCTTVETVRELTEFAKSIPSFSSLFLNDQVTLLKYGVHEAIFAMLASIVNKDGLLVANGSGFVTREFLRSLRKPFSDIIEPKFEFAVKFNALELDDSDLALFIAAIILCGGE

SEQ ID NO: 57461 - protein, 441 aa, Homo sapiens; identical to SEQ ID NO: 57459

SEQ ID NO: 57462 - protein, 343 aa, Homo sapiens
MEQPQEEAPEVREEEEKEEVAEAEGAPELNGGPQHALPSSSYTAIRFGRMPEAEKRKLVAGLTANEGSQYNPQVADLKAFSKHIYNAYLKNFNMTKKKARSILTGKASHTAPFVIHDIETLWQAEKGLVWKQLVNGLPPYKEISVHVFYRCQCTTVETVRELTEFAKSIPSFSSLFLNDQVTLLKYGVHEAIFAMLASIVNKDGLLVANGSGFVTREFLRSLRKPFSDIIEPKFEFAVKFNALELDDSDLALFIAAIILCGDRPGLMNVPRVEAIQDTILRALEFHLQANHPDAQYLFPKLLQKMADLRQLVTEHAQMMQRIKKTETETSLHPLLQEIYKDMY

SEQ ID NO: 57463 - protein, 361 aa, Homo sapiens; identical to SEQ ID NO: 57460

SEQ ID NO: 57464 - protein, 402 aa, Homo sapiens
MHQRDLSRSSSPPSLLDQLQMGCDGASCGSLNMECRVCGDKASGFHYGVHACEGCKGFFRRTIRMKLEYEKCERSCKIQKKNRNKCQYCRFQKCLALGMSHNAIRFGRMPEAEKRKLVAGLTANEGSQYNPQVADLKAFSKHIYNAYLKNFNMTKKKARSILTGKASHTAPFVIHDIETLWQAEKGLVWKQLVNGLPPYKEISVHVFYRCQCTTVETVRELTEFAKSIPSFSSLFLNDQVTLLKYGVHEAIFAMLASIVNKDGLLVANGSGFVTREFLRSLRKPFSDIIEPKFEFAVKFNALELDDSDLALFIAAIILCGDRPGLMNVPRVEAIQDTILRALEFHLQANHPDAQYLFPKLLQKMADLRQLVTEHAQMMQRIKKTETETSLHPLLQEIYKDMY

SEQ ID NO: 57465 - protein, 338 aa, Homo sapiens [sequence omitted]

SEQ ID NO: 57466 - protein, 505 aa, Homo sapiens
MGETLGDSPIDPESDSFTDTLSANISQEMTMVDTEMPFWPTNFGISSVDLSVMEDHSHSFDIKPFTTVDFSSISTPHYEDIPFTRTDPVVADYKYDLKLQEYQSAIKVEPASPPYYSEKTQLYNKPHEEPSNSLMAIECRVCGDKASGFHYGVHACEGCKGFFRRTIRLKLIYDRCDLNCRIHKKSRNKCQYCRFQKCLAVGMSHNAIRFGRMPQAEKEKLLAEISSDIDQLNPESADLRALAKHLYDSYIKSFPLTKAKARAILTGKTTDKSPFVIYDMNSLMMGEDKIKFKHITPLQEQSKEVAIRIFQGCQFRSVEAVQEITEYAKSIPGFVNLDLNDQVTLLKYGVHEIIYTMLASLMNKDGVLISEGQGFMTREFLKSLRKPFGDFMEPKFEFAVKFNALELDDSDLAIFIAVIILSGDRPGLLNVKPIEDIQDNLLQALELQLKLNHPESSQLFAKLLQKMTDLRQIVTEHVQLLQVIKKTETDMSLHPLLQEIYKDLY

SEQ ID NO: 57467 - protein, 477 aa, Homo sapiens
MTMVDTEMPFWPTNFGISSVDLSVMEDHSHSFDIKPFTTVDFSSISTPHYEDIPFTRTDPVVADYKYDLKLQEYQSAIKVEPASPPYYSEKTQLYNKPHEEPSNSLMAIECRVCGDKASGFHYGVHACEGCKGFFRRTIRLKLIYDRCDLNCRIHKKSRNKCQYCRFQKCLAVGMSHNAIRFGRMPQAEKEKLLAEISSDIDQLNPESADLRALAKHLYDSYIKSFPLTKAKARAILTGKTTDKSPFVIYDMNSLMMGEDKIKFKHITPLQEQSKEVAIRIFQGCQFRSVEAVQEITEYAKSIPGFVNLDLNDQVTLLKYGVHEIIYTMLASLMNKDGVLISEGQGFMTREFLKSLRKPFGDFMEPKFEFAVKFNALELDDSDLAIFIAVIILSGDRPGLLNVKPIEDIQDNLLQALELQLKLNHPESSQLFAKLLQKMTDLRQIVTEHVQLLQVIKKTETDMSLHPLLQEIYKDLY

SEQ ID NO: 57468 - protein, 250 aa, Homo sapiens
MTMVDTEMPFWPTNFGISSVDLSVMEDHSHSFDIKPFTTVDFSSISTPHYEDIPFTRTDPVVADYKYDLKLQEYQSAIKVEPASPPYYSEKTQLYNKPHEEPSNSLMAIECRVCGDKASGFHYGVHACEGCKGFFRRTIRLKLIYDRCDLNCRIHKKSRNKCQYCRFQKCLAVGMSHNAIRFGRMPQAEKEKLLAEISSDIDQLNPESADLRALAKHLYDSYIKSFPLTKAKARAILTGKTTDKSTAQVC

SEQ ID NO: 57469 - protein, 477 aa, Homo sapiens; identical to SEQ ID NO: 57467

SEQ ID NO: 57470 - protein, 477 aa, Homo sapiens; identical to SEQ ID NO: 57467

SEQ ID NO: 57471 - protein, 477 aa, Homo sapiens; identical to SEQ ID NO: 57467

SEQ ID NO: 57472 - protein, 483 aa, Homo sapiens
MKGFSEMTMVDTEMPFWPTNFGISSVDLSVMEDHSHSFDIKPFTTVDFSSISTPHYEDIPFTRTDPVVADYKYDLKLQEYQSAIKVEPASPPYYSEKTQLYNKPHEEPSNSLMAIECRVCGDKASGFHYGVHACEGCKGFFRRTIRLKLIYDRCDLNCRIHKKSRNKCQYCRFQKCLAVGMSHNAIRFGRMPQAEKEKLLAEISSDIDQLNPESADLRALAKHLYDSYIKSFPLTKAKARAILTGKTTDKSPFVIYDMNSLMMGEDKIKFKHITPLQEQSKEVAIRIFQGCQFRSVEAVQEITEYAKSIPGFVNLDLNDQVTLLKYGVHEIIYTMLASLMNKDGVLISEGQGFMTREFLKSLRKPFGDFMEPKFEFAVKFNALELDDSDLAIFIAVIILSGDRPGLLNVKPIEDIQDNLLQALELQLKLNHPESSQLFAKLLQKMTDLRQIVTEHVQLLQVIKKTETDMSLHPLLQEIYKDLY

SEQ ID NO: 57473 - protein, 132 aa, Homo sapiens
MTMVDTEMPFWPTNFGISSVDLSVMEDHSHSFDIKPFTTVDFSSISTPHYEDIPFTRTDPVVADYKYDLKLQEYQSAIKVEPASPPYYSEKTQLYNKPHEEPSNSLMAIECRVCGDKASGFHYGVHACEGCK

SEQ ID NO: 57474 - protein, 99 aa, Homo sapiens
MTMVDTEMPFWPTNFGISSVDLSVMEDHSHSFDIKPFTTVDFSSISTPHYEDIPFTRTDPVVADYKYDLKLQEYQSAIKVEPASPPYYSEKTQLYNKPH

SEQ ID NO: 57475 - protein, 43 aa, Homo sapiens
MTMVDTEMPFWPTNFGISSVDLSVMEDHSHSFDIKPFTTVDFS

SEQ ID NO: 57476 - protein, 248 aa, Homo sapiens
MVDTEMPFWPTNFGISSVDLSVMEDHSHSFDIKPFTTVDFSSISTPHYEDIPFTRTDPVVADYKYDLKLQEYQSAIKVEPASPPYYSEKTQLYNKPHEEPSNSLMAIECRVCGDKASGFHYGVHACEGCKGFFRRTIRLKLIYDRCDLNCRIHKKSRNKCQYCRFQKCLAVGMSHNAIRFGRMPQAEKEKLLAEISSDIDQLNPESADLRALAKHLYDSYIKSFPLTKAKARAILTGKTTDKSTAQVC

SEQ ID NO: 57477 - protein, 984 aa, Homo sapiens
MAGNDCGALLDEELSSFFLNYLADTQGGGSGEEQLYADFPELDLSQLDASDFDSATCFGELQWCPENSETEPNQYSPDDSELFQIDSENEALLAELTKTLDDIPEDDVGLAAFPALDGGDALSCTSASPAPSSAPPSPAPEKPSAPAPEVDELSLADSTQDKKAPMMQSQSRSCTELHKHLTSAQCCLQDRGLQPPCLQSPRLPAKEDKEPGEDCPSPQPAPASPRDSLALGRADPGAPVSQEDMQAMVQLIRYMHTYCLPQRKLPPQTPEPLPKACSNPSQQVRSRPWSRHHSKASWAEFSILRELLAQDVLCDVSKPYRLATPVYASLTPRSRPRPPKDSQASPGRPSSVEEVRIAASPKSTGPRPSLRPLRLEVKREVRRPARLQQQEEEDEEEEEEEEEEEKEEEEEWGRKRPGRGLPWTKLGRKLESSVCPVRRSRRLNPELGPWLTFADEPLVPSEPQGALPSLCLAPKAYDVERELGSPTDEDSGQDQQLLRGPQIPALESPCESGCGDMDEDPSCPQLPPRDSPRCLMLALSQSDPTFGKKSFEQTLTVELCGTAGLTPPTTPPYKPTEEDPFKPDIKHSLGKEIALSLPSPEGLSLKATPGAAHKLPKKHPERSELLSHLRHATAQPASQAGQKRPFSCSFGDHDYCQVLRPEGVLQRKVLRSWEPSGVHLEDWPQQGAPWAEAQAPGREEDRSCDAGAPPKDSTLLRDHEIRASLTKHFGLLETALEEEDLASCKSPEYDTVFEDSSSSSGESSFLPEEEEEEGEEEEEDDEEEDSGVSPTCSDHCPYQSPPSKANRQLCSRSRSSSGSSPCHSWSPATRRNFRCESRGPCSDRTPSIRHARKRREKAIGEGRVVYIQNLSSDMSSRELKRRFEVFGEIEECEVLTRNRRGEKYGFITYRCSEHAALSLTKGAALRKRNEPSFQLSYGGLRHFCWPRYTDYDSNSEEALPASGKSKYEAMDFDSLLKEAQQSLH

SEQ ID NO: 57478 - protein, 959 aa, Homo sapiens
MGGGSGEEQLYADFPELDLSQLDASDFDSATCFGELQWCPENSETEPNQYSPDDSELFQIDSENEALLAELTKTLDDIPEDDVGLAAFPALDGGDALSCTSASPAPSSAPPSPAPEKPSAPAPEVDELSLADSTQDKKAPMMQSQSRSCTELHKHLTSAQCCLQDRGLQPPCLQSPRLPAKEDKEPGEDCPSPQPAPASPRDSLALGRADPGAPVSQEDMQAMVQLIRYMHTYCLPQRKLPPQTPEPLPKACSNPSQQVRSRPWSRHHSKASWAEFSILRELLAQDVLCDVSKPYRLATPVYASLTPRSRPRPPKDSQASPGRPSSVEEVRIAASPKSTGPRPSLRPLRLEVKREVRRPARLQQQEEEDEEEEEEEEEEEKEEEEEWGRKRPGRGLPWTKLGRKLESSVCPVRRSRRLNPELGPWLTFADEPLVPSEPQGALPSLCLAPKAYDVERELGSPTDEDSGQDQQLLRGPQIPALESPCESGCGDMDEDPSCPQLPPRDSPRCLMLALSQSDPTFGKKSFEQTLTVELCGTAGLTPPTTPPYKPTEEDPFKPDIKHSLGKEIALSLPSPEGLSLKATPGAAHKLPKKHPERSELLSHLRHATAQPASQAGQKRPFSCSFGDHDYCQVLRPEGVLQRKVLRSWEPSGVHLEDWPQQGAPWAEAQAPGREEDRSCDAGAPPKDSTLLRDHEIRASLTKHFGLLETALEEEDLASCKSPEYDTVFEDSSSSSGESSFLPEEEEEEGEEEEEDDEEEDSGVSPTCSDHCPYQSPPSKANRQLCSRSRSSSGSSPCHSWSPATRRNFRCESRGPCSDRTPSIRHARKRREKAIGEGRVVYIQNLSSDMSSRELKRRFEVFGEIEECEVLTRNRRGEKYGFITYRCSEHAALSLTKGAALRKRNEPSFQLSYGGLRHFCWPRYTDYDSNSEEALPASGKSKYEAMDFDSLLKEAQQSLH

SEQ ID NO: 57479 - protein, 798 aa, Homo sapiens
MAWDMCNQDSESVWSDIECAALVGEDQPLCPDLPELDLSELDVNDLDTDSFLGGLKWCSDQSEIISNQYNNEPSNIFEKIDEENEANLLAVLTETLDSLPVDEDGLPSFDALTDGDVTTDNEASPSSMPDGTPPPQEAEEPSLLKKLLLAPANTQLSYNECSGLSTQNHANHNHRIRTNPAIVKTENSWSNKAKSICQQQKPQRRPCSELLKYLTTNDDPPHTKPTENRNSSRDKCTSKKKSHTQSQSQHLQAKPTTLSLPLTPESPNDPKGSPFENKTIERTLSVELSGTAGLTPPTTPPHKANQDNPFRASPKLKSSCKTVVPPPSKKPRYSESSGTQGNNSTKKGPEQSELYAQLSKSSVLTGGHEERKTKRPSLRLFGDHDYCQSINSKTEILINISQELQDSRQLENKDVSSDWQGQICSSTDSDQCYLRETLEASKQVSPCSTRKQLQDQEIRAELNKHFGHPSQAVFDDEADKTGELRDSDFSNEQFSKLPMFINSGLAMDGLFDDSEDESDKLSYPWDGTQSYSLFNVSPSCSSFNSPCRDSVSPPKSLFSQRPQRMRSRSRSFSRHRSCSRSPYSRSRSRSPGSRSSSRSCYYYESSHYRHRTHRNSPLYVRSRSRSPYSRRPRYDSYEEYQHERLKREEYRREYEKRESERAKQRERQRQKAIEERRVIYVGKIRPDTTRTELRDRFEVFGEIEECTVNLRDDGDSYGFITYRYTCDAFAALENGYTLRRSNETDFELYFCGRKQFFKSNYADLDSNSDDFDPASTKSKYDSLDFDSLLKEAQRSLRR

SEQ ID NO: 57480 - protein, 1023 aa, Homo sapiens
MAGNDCGALLDEELSSFFLNYLADTQGGGSGEEQLYADFPELDLSQLDASDFDSATCFGELQWCPENSETEPNQYSPDDSELFQIDSENEALLAELTKTLDDIPEDDVGLAAFPALDGGDALSCTSASPAPSSAPPSPAPEKPSAPAPEVDELSLLQKLLLATSYPTSSSDTQKEGTAWRQAGLRSKSQRPCVKADSTQDKKAPMMQSQSRSCTELHKHLTSAQCCLQDRGLQPPCLQSPRLPAKEDKEPGEDCPSPQPAPASPRDSLALGRADPGAPVSQEDMQAMVQLIRYMHTYCLPQRKLPPQTPEPLPKACSNPSQQVRSRPWSRHHSKASWAEFSILRELLAQDVLCDVSKPYRLATPVYASLTPRSRPRPPKDSQASPGRPSSVEEVRIAASPKSTGPRPSLRPLRLEVKREVRRPARLQQQEEEDEEEEEEEEEEEKEEEEEWGRKRPGRGLPWTKLGRKLESSVCPVRRSRRLNPELGPWLTFADEPLVPSEPQGALPSLCLAPKAYDVERELGSPTDEDSGQDQQLLRGPQIPALESPCESGCGDMDEDPSCPQLPPRDSPRCLMLALSQSDPTFGKKSFEQTLTVELCGTAGLTPPTTPPYKPTEEDPFKPDIKHSLGKEIALSLPSPEGLSLKATPGAAHKLPKKHPERSELLSHLRHATAQPASQAGQKRPFSCSFGDHDYCQVLRPEGVLQRKVLRSWEPSGVHLEDWPQQGAPWAEAQAPGREEDRSCDAGAPPKDSTLLRDHEIRASLTKHFGLLETALEEEDLASCKSPEYDTVFEDSSSSSGESSFLPEEEEEEGEEEEEDDEEEDSGVSPTCSDHCPYQSPPSKANRQLCSRSRSSSGSSPCHSWSPATRRNFRCESRGPCSDRTPSIRHARKRREKAIGEGRVVYIQNLSSDMSSRELKRRFEVFGEIEECEVLTRNRRGEKYGFITYRCSEHAALSLTKGAALRKRNEPSFQLSYGGLRHFCWPRYTDYDSNSEEALPASGKSKYEAMDFDSLLKEAQQSLH

SEQ ID NO: 57481 - protein, 1017 aa, Homo sapiens
MAGNDCGALLDEELSSFFLNYLADTQGGGSGEEQLYADFPELDLSQLDASDFDSATCFGELQWCPENSETEPNQYSPDDSELFQIDSENEALLAELTKTLDDIPEDDVGLAAFPALDGGDALSCTSASPAPSSAPPSPAPEKPSAPAPEVDELSLLQKLLLATSYPTSSSDTQKEGTAWRQAGLRSKSQRPCVKADSTQDKKAPMMQSQSRSCTELHKHLTSAQCCLQDRGLQPPCLQSPRLPAKEDKEPGEDCPSPQPAPASPRDSLALGRADPGAPVSQEDMQAMVQLIRYMHTYCLPQRKLPPQTPEPLPKACSNPSQQVRSRPWSRHHSKASWAEFSILRELLAQDVLCDVSKPYRLATPVYASLTPRSRPRPPKDSQASPGRPSSVEEVRIAASPKSTGPRPSLRPLRLEVKREVRRPARLQQQEEEDEEEEEEEEEEEKEEEEEWGRKRPGRGLPWTKLGRKLESSVCPVRRSRRLNPELGPWLTFADEPLVPSEPQGALPSLCLAPKAYDVERELGSPTDEDSGQDQQLLRGPQIPALESPCESGCGDMDEDPSCPQLPPRDSPRCLMLALSQSDPTFGKKSFEQTLTVELCGTAGLTPPTTPPYKPTEEDPFKPDIKHSLGKEIALSLPSPEGLSLKATPGAAHKLPKKHPERSELLSHLRHATAQPASQAGQKRPFSCSFGDHDYCQVLRPEGVLQRKVLRSWEPSGVHLEDWPQQGAPWAEAQAPGREEDRSCDAGAPPKDSTLLRDHEIRASLTKHFGLLETALEEEDLASCKSPEYDTVFEDSSSSSGESSFLPEEEEEEGEEEEEDDEEEDSGVSPTCSDHCPYQSPPSKANRQLCSRSRSSSGSSPCHSWSPATRRNFRCESRGPCSDRTPSIRHARKRREKAIGEGRVVYIQNLSSDMSSRELKRRFEVFGEIEECEVLTRNRRGEKYGFITYRCSEHAALSLTKGAALRKRNEPSFQLSYGGLRHFCWPRYTDYGKPLKPSHSLVRLKAWEAVPSLNKTQS

SEQ ID NO: 57482 - protein, 156 aa, Homo sapiens
MAVGKFLLGSLLLLSLQLGQGWGPDARGVPVADGEFSSEQVAKAGGTWLGTHRPLARLRRALSGPCQLWSLTLSVAELGLGYASEEKVIFRYCAGSCPRGARTQHGLALARLQGQGRAHGGPCCRPTRYTDVAFLDDRHRWQRLPQLSAAACGCGG

SEQ ID NO: 57483 - protein, 473 aa, Homo sapiens
MGQSGRSRHQKRARAQAQLRNLEAYAANPHSFVFTRGCTGRNIRQLSLDVRRVMEPLTASRLQVRKKNSLKDCVAVAGPLGVTHFLILSKTETNVYFKLMRLPGGPTLTFQVKKYSLVRDVVSSLRRHRMHEQQFAHPPLLVLNSFGPHGMHVKLMATMFQNLFPSINVHKVNLNTIKRCLLIDYNPDSQELDFRHYSIKVVPVGASRGMKKLLQEKFPNMSRLQDISELLATGAGLSESEAEPDGDHNITELPQAVAGRGNMRAQQSAVRLTEIGPRMTLQLIKVQEGVGEGKVMFHSFVSKTEEELQAILEAKEKKLRLKAQRQAQQAQNVQRKQEQREAHRKKSLEGMKKARVGGSDEEASGIPSRTASLELGEDDDEQEDDDIEYFCQAVGEAPSEDLFPEAKQKRLAKSPGRKRKRWEMDRGRGRLCDQKFPKTKDKSQGAQARRGPRGASRDGGRGRGRGRPGKRVA

SEQ ID NO: 57484 - protein, 460 aa, Homo sapiens
MGQSGRSRHQKRARAQAQLRNLEAYAANPHSFVFTRGCTGRNIRQLSLDVRRVMEPLTASRLQVRKKNSLKDCVAVAGPLGVTHFLILSKTETNVYFKLMRLPGGPTLTFQVKKYSLVRDVVSSLRRHRMHEQQFAHPPLLVLNSFGPHGMHVKLMATMFQNLFPSINVHKVNLNTIKRCLLIDYNPDSQELDFRHYSIKVVPVGASRGMKKLLQEKFPNMSRLQDISELLATGAGLSESEAEPDGDHNITELPQAVAGRGNMRAQQSAVRLTEIGPRMTLQLIKVQEGVGEGKVMFHSFVSKTEEELQAILEAKEKKLRLKAQRQAQQAQNVQRKQEQREAHRKKSLEGMKKARVGGSDEEASGIPSRTASLELGEDDDEQEDDDIEYFCQAVGEAPSEDLFPEAKQKRLAKSPGRKRKRWEMDRGRGRLCDQKFPKTKDKSQDGGRGRGRGRPGKRVA

SEQ ID NO: 57485 - protein, 794 aa, Homo sapiens
MGQSGRSRHQKRARAQAQLRNLEAYAANPHSFVFTRGCTGRNIRQLSLDVRRVMEPLTASRLQVRKKNSLKDCVAVAGPLGVTHFLILSKTETNVYFKLMRLPGGPTLTFQVKKYSLVRDVVSSLRRHRMHEQQFAHPPLLVLNSFGPHGMHVKLMATMFQNLFPSINVHKVNLNTIKRCLLIDYNPDSQELDFRHYSIKVVPVGASRGMKKLLQEKFPNMSRLQDISELLATGAGLSESEAEPDGDHNITELPQAVAGRGNMRAQQSAVRLTEIGPRMTLQLIKVQEGVGEGKVMFHSFVSKTEEELQAILEAKEKKLRLKAQRQAQQAQNVQRKQEQREAHRKKSLEGMKKARVGGSDEEASGIPSRTASLELGEDDDEQEDDDIEYFCQAVGEAPSEDLFPEAKQKRLAKSPGRKRKRWEMDRGAKSCPANFLAAADDKLSGFQGDFLWPILVVEFLVAVASNGLALYRFSIRKQRPWHPAVVFSVQLAVSDLLCALTLPPLAAYLYPPKHWRYGEAACRLERFLFTCNLLGSVIFITCISLNRYLGIVHPFFARSHLRPKHAWAVSAAGWVLAALLAMPTLSFSHLKRPQQGAGNCSVARPEACIKCLGTADHGLAAYRAYSLVLAGLGCGLPLLLTLAAYGALGRAVLRSPGMTVAEKLRVAALVASGVALYASSYVPYHIMRVLNVDARRRWSTRCPSFADIAQATAALELGPYVGYQVMRGLMPLAFCVHPLLYMAAVPSLGCCCRHCPGYRDSWNPEDAKSTGQALPLNATAAPKPSEPQSRELSQ

SEQ ID NO: 57486 - protein, 457 aa, Homo sapiens
MAQPPRLSRSGASSLWDPASPAPTSGPRPRLWEGQDVLARWTDGLLYLGTIKKVDSAREVCLVQFEDDSQFLVLWKDISPAALPGEELLCCVCRSETVVPGNRLVSCEKCRHAYHQDCHVPRAPAPGEGEGTSWVCRQCVFAIATKRGGALKKGPYARAMLGMKLSLPYGLKGLDWDAGHLSNRQQSYCYCGGPGEWNLKMLQCRSCLQWFHEACTQCLSKPLLYGDRFYEFECCVCRGGPEKVRRLQLRWVDVAHLVLYHLSVCCKKKYFDFDREILPFTSENWDSLLLGELSDTPKGERSSRLLSALNSHKDRFISGREIKKRKCLFGLHARMPPPVEPPTGDGALTRAGPWGRGLTSPGEAPEAGARAPEEEAEGESGGAGATLSSAQSARAPGAEGAGSSAEGTAAAPSGCLLPSTLLPAPQGPLGTVDPQTGHPWNFTLVSPQTSLKVPPTR

SEQ ID NO: 57487 - protein, 567 aa, Homo sapiens
MAQPPRLSRSGASSLWDPASPAPTSGPRPRLWEGQDVLARWTDGLLYLGTIKKVDSAREVCLVQFEDDSQFLVLWKDISPAALPGEELLCCVCRSETVVPGNRLVSCEKCRHAYHQDCHVPRAPAPGEGEGTSWVCRQCVFAIATKRGGALKKGPYARAMLGMKLSLPYGLKGLDWDAGHLSNRQQSYCYCGGPGEWNLKMLQCRSCLQWFHEACTQCLSKPLLYGDRFYEFECCVCRGGPEKVRRLQLRWVDVAHLVLYHLSVCCKKKYFDFDREILPFTSENWDSLLLGELSDTPKGERSSRLLSALNSHKDRFISGREIKKRKCLFGLHARMPPPVEPPTGDGALTSFPSGQGPGGGVSRPLGKRRRPEPEPLRRRQKGKVEELGPPSAVRNQPEPQEQRERAHLQRALQASVSPPSPSPNQSYQGSSGYNFRPTDARCLPSSPIRMFASFHPSASTAGTSGDSGPPDRSPLELHIGFPTDIPKSAPHSMTASSSSVSSPSPGLPRRSAPPSPLCRSLSPGTGGGVRGGVGYLSRGDPVRVLARRVRPDGSVQYLVEWGGGGIF

SEQ ID NO: 57488 - protein, 243 aa, Homo sapiens
  VARIANT 1: note = MOD_RES - Any amino acid
XSLLLTATRTVSFQGERLRRGNVCLVSMLGCLPLWSPLLEMEHSPGQGPGGGVSRPLGKRRRPEPEPLRRRQKGKVEELGPPSAVRNQPEPQEQRERAHLQRALQASVSPPSPSPNQSYQGSSGYNFRPTDARCLPSPIRMFASFHPSASTAGTSGDSGPPDRSPLELHIGFPTDIPKSAPHSMTASSSSVSSPSPGLPRRSAPPSPLCRSLSPGTGGGVRGGVGYLSRGDPVRVLARRVRPD

SEQ ID NO: 57489 - protein, 145 aa, Homo sapiens
MAQPPRLSRSGASSLWDPASPAPTSGPRPRLWEGQDVLARWTDGLLYLGTIKKVDSAREVCLVQFEDDSQFLVLWKDISPAALPGEELLCCVCRSETVVPGNRLVSCEKCRHAYHQDCHVPRAPAPGEGEGTSWVCRQCVFAIAT

SEQ ID NO: 57490 - protein, 181 aa, Homo sapiens
WGHPQQCAISPSPRSRGSGLICRGHCRPQCLHHPPALTRVTRAAAATTSGPQMPAACPGHPIRMFASFHPSASTAGTSGDSGPPDRSPLELHIGFPTDIPKSAPHSMTASSSSVSSPSPGLPRRSAPPSPLCRSLSPGTGGGVRGGVGYLSRGDPVRVLARRVRPDGSVQYLVEWGGGGIF

SEQ ID NO: 57491 - protein, 145 aa, Homo sapiens; identical to SEQ ID NO: 57489

SEQ ID NO: 57492 - protein, 567 aa, Homo sapiens
MAQPPRLSRSGASSLWDPASPAPTSGPRPRLWEGQDVLARWTDGLLYLGTIKKVDSAREVCLVQFEDDSQFLVLWKDISPAALPGEELLCCVCRSETVVPGNRLVSCEKCRHAYHQDCHVPRAPAPGEGEGTSWVCRQCVFAIATKRGGALKKGPYARAMLGMKLSLPYGLKGLDWDAGHLSNRQQSYCYCGGPGEWNLKMLQCRSCLQWFHEACTQCLSKPLLYGDRFYEFECCVCRGGPEKVRRLQLRWVDVAHLVLYHLSVCCKKKYFDFDREILPFTSENWDSLLLGELSDTPKGERSSKLLSALNSHKDRFISGREIKKRKCLFGLHARMPPPVEPPTGDGALTSFPSGQGPGGGVSRPLGKRRRPEPEPLRRRQKGKVEELGPPSAVRNQPEPQEQRERAHLQRALQASVSPPSPSPNQSYQGSSGYNFRPTDARCLPSSPIRMFASFHPSASTAGTSGDSGPPDRSPLELHIGFPTDIPKSAPHSMTASSSSVSSPSPGLPRRSAPPSPLCRSLSPGTGGGVRGGVGYLSRGDPVRVLARRVRPDGSVQYLVEWGGGGIF

SEQ ID NO: 57493 - protein, 227 aa, Homo sapiens
MAQPPRLSRSGASSLWDPASPAPTSGPRPRLWEGQDVLARWTDGLLYLGTIKKVDSAREVCLVQFEDDSQFLVLWKDISPAALPGEELLCCVCRSETVVPGNRLVSCEKCRHAYHQDCHVPRAPAPGEGEGTSWVCRQCVFAIATKRGGALKKGPYARAMLGMKLSLPYGLKGLDWDAGHLSNRQQSYCYCGGPGEWNLKMLQCRSCLQWFHEACTQCLSKPLLYGD

SEQ ID NO: 57494 - protein, 227 aa, Homo sapiens; identical to SEQ ID NO: 57493

SEQ ID NO: 57495 - protein, 457 aa, Homo sapiens
MAQPPRLSRSGASSLWDPASPAPTSGPRPRLWEGQDVLARWTDGLLYLGTIKKVDSAREVCLVQFEDDSQFLVLWKDISPAALPGEELLCCVCRSETVVPGNRLVSCEKCRHAYHQDCHVPRAPAPGEGEGTSWVCRQCVFAIATKRGGALKKGPYARAMLGMKLSLPYGLKGLDWDAGHLSNRQQSYCYCGGPGEWNLKMLQCRSCLQWFHEACTQCLSKPLLYGDRFYEFECCVCRGGPEKVRRLQLRWVDVAHLVLYHLSVCCKKKYFDFDREILPFTSENWDSLLLGELSDTPKGERSSKLLSALNSHKDRFISGREIKKRKCLFGLHARMPPPVEPPTGDGALTRAGPWGRGLTSPGEAPEAGARAPEEEAEGESGGAGATLSSAQSARAPGAEGAGSSAEGTAAAPSGCLLPSTLLPAPQGPLGTVDPQTGHPWNFTLVSPQTSLKVPPTR

SEQ ID NO: 57496 - protein, 498 aa, Homo sapiens
MAAAAGPGAALSPRPCDSDPATPGAQSPKDDNEDNSNDGTQPSKRRRMGSGDSSRSCETSSQDLGFSYYPAENLIEYKWPPDETGEYYMLQEQVSEYLGVTSFKRKYPDLERRDLSHKEKLYLRELNVITETQCTLGLTALRSDEVIDLMIKEYPAKHAEYSVILQEKERQRITDHYKEYSQMQQQNTQKVEASKVPEYIKKAAKKAAEFNSNLNRERMEERRAYFDLQTHVIQVPQGKYKVLPTERTKVSSYPVALIPGQFQEYYKRYSPDELRYLPLNTALYEPPLDPELPALDSDGDSDDGEDGRGDEKRKNKGTSDSSSGNVSEGESPPDSQEDSFQGRQKSKDKAATPRKDGPKRSVLSKSVPGYKPKVIPNAICGICLKGKESNKKGKAESLIHCSQCENSGHPSCLDMTMELVSMIKTYPWQCMECKTCIICGQPHHEEEMMFCDMCDRGYHTFCVGLGAIPSGRWICDCCQRAPPTPRKVGRRGKNSKEG

SEQ ID NO: 57497 - protein, 496 aa, Homo sapiens
MAAAAGPGAALSPRPCDSDPATPGAQSPKDDNEDNSNDGTQPSKRRRMGSGDSSRSCETSSQDLGFSYYPAENLIEYKWPPDETGEYYMLQEQVSEYLGVTSFKRKYPERRDLSHKEKLYLRELNVITETQCTLGLTALRSDEVIDLMIKEYPAKHAEYSVILQEKERQRITDHYKEYSQMQQQNTQKVEASKVPEYIKKAAKKAAEFNSNLNRERMEERRAYFDLQTHVIQVPQGKYKVLPTERTKVSSYPVALIPGQFQEYYKRYSPDELRYLPLNTALYEPPLDPELPALDSDGDSDDGEDGRGDEKRKNKGTSDSSSGNVSEGESPPDSQEDSFQGRQKSKDKAATPRKDGPKRSVLSKSVPGYKPKVIPNAICGICLKGKESNKKGKAESLIHCSQCENSGHPSCLDMTMELVSMIKTYPWQCMECKTCIICGQPHHEEEMMFCDMCDRGYHTFCVGLGAIPSGRWICDCCQRAPPTPRKVGRRGKNSKEG

SEQ ID NO: 57498 - protein, 292 aa, Homo sapiens
MEKRTCALCPKDVEYNVLYFAQSENIAAHENCLLYSSGLVECEDQDPLNPDRSFDVESVKKEIQRGRKLKCKFCHKRGATVGCDLKNCNKNYHFFCAKKDDAVPQSDGVRGIYKLLCQQHAQFPIIAQSAKFSGVKRKRGRKKPLSGNHVQPPETMKCNTFIRQVKEEHGRHTDATVKVPFLKKCKEAGLLNYLLEEILDKVHSIPEKLMDETTSESDYEEIGSALFDCRLFEDTFVNFQAAIEKKIHASQQRWQQLKEEIELLQDLKQTLCSFQENRDLMSSSTSISSLSY

SEQ ID NO: 57499 - protein, 331 aa, Homo sapiens
MAQASPPRPERVLGASSPEARPAQEALLLPTGVFQVAEKMEKRTCALCPKDVEYNVLYFAQSENIAAHENCLLYSSGLVECEDQDPLNPDRSFDVESVKKEIQRGRKLKCKFCHKRGATVGCDLKNCNKNYHFFCAKKDDAVPQSDGVRGIYKLLCQQHAQFPIIAQSAKFSGVKRKRGRKKPLSGNHVQPPETMKCNTFIRQVKEEHGRHTDATVKVPFLKKCKEAGLLNYLLEEILDKVHSIPEKLMDETTSESDYEEIGSALFDCRLFEDTFVNFQAAIEKKIHASQQRWQQLKEEIELLQDLKQTLCSFQENRDLMSSSTSISSLSY

SEQ ID NO: 57500 - protein, 286 aa, Homo sapiens
  VARIANT 1: note = MOD_RES - Any amino acid
XRPGPRGCSAPAARRPGPRRRRSSFPPLYSSGLVECEDQDPLNPDRSFDVESVKKEIQRGRKLKCKFCHKRGATVGCDLKNCNKNYHFFCAKKDDAVPQSDGVRGIYKLLCQQHAQFPIIAQSAKFSGVKRKRGRKKPLSGNHVQPPETMKCNTFIRQVKEEHGRHTDATVKVPFLKKCKEAGLLNYLLEEILDKVHSIPEKLMDETTSESDYEEIGSALFDCRLFEDTFVNFQAAIEKKIHASQQRWQQLKEEIELLQDLKQTLCSFQENRDLMSSSTSISSLSY

SEQ ID NO: 57501 - protein, 168 aa, Homo sapiens
MEKRTCALCPKDVEYNVLYFAQSENIAAHENCLLYSSGLVECEDQDPLNPDRSFDVESVKKEIQRGRKLKCKFCHKRGATVGCDLKNCNKNYHFFCAKKDDAVPQSDGVRGIYKLLCQQHAQFPIIAQSAKFSGVKRKRGRKKPLSGNHVQPPETMKCNTFIRQVKEE

SEQ ID NO: 57502 - protein, 98 aa, Homo sapiens
MEKRTCALCPKDVEYNVLYFAQSENIAAHENCLLYSSGLVECEDQDPLNPDRSFDVESVKKEIQRGRKLKCKFCHKRGATVGCDLKNCNKNYHFFCAK

SEQ ID NO: 57503 - protein, 292 aa, Homo sapiens; identical to SEQ ID NO: 57498

SEQ ID NO: 57504 - protein, 207 aa, Homo sapiens
MENRALDPGTRDSYGATSHLPNKGALAKVKNNFKDLMSKLTEGQYVLCRWTDGLYYLGKIKRVSSSKQSCLVTFEDNSKYWVLWKDIQHAGVPGEEPKCNICLGKTSGPLNEILICGKCGLGYHQQCHIPIAGSADQPLLTPWFCRRCIFALAVRVSLPSSPVPASPASSSGADQRLPSQSLSSKQKGHTWALETDSASATVLGQDL

SEQ ID NO: 57505 - protein, 580 aa, Homo sapiens
MENRALDPGTRDSYGATSHLPNKGALAKVKNNFKDLMSKLTEGQYVLCRWTDGLYYLGKIKRVSSSKQSCLVTFEDNSKYWVLWKDIQHAGVPGEEPKCNICLGKTSGPLNEILICGKCGLGYHQQCHIPIAGSADQPLLTPWFCRRCIFALAVRKGGALKKGAIARTLQAVKMVLSYQPEELEWDSPHRTNQQQCYCYCGGPGEWYLRMLQCYRCRQWFHEACTQCLNEPMMFGDRFYLFFCSVCNQGPEYIERLPLRWVDVVHLALYNLGVQSKKKYFDFEEILAFVNHHWELLQLGKLTSTPVTDRGPHLLNALNSYKSRFLCGKEIKKKKCIFRLRIRVPPNPPGKLLPDKGLLPNENSASSELRKRGKSKPGLLPHEFQQQKRRVYRRKRSKFLLEDAIPSSDFTSAWSTNHHLASIFDFTLDEIQSLKSASSGQTFFSDVDSTDAASTSGSASTSLSYDSRWTVGSRKRKLAAKAYMPLRAKRWAAELDGRCPSDSSAEGASVPERPDEGIDSHTFESISEDDSSLSHLKSSITNYFGAAGRLACGEKYQVLARRVTPEGKVQYLVEWEGTTPY

SEQ ID NO: 57506 - protein, 371 aa, Homo sapiens
MLQCYRCRQWFHEACTQCLNEPMMFGDRFYLFFCSVCNQGPEYIERLPLRWVDVVHLALYNLGVQSKKKYFDFEEILAFVNHHWELLQLGKLTSTPVTDRGPHLLNALNSYKSRFLCGKEIKKKKCIFRLRIRVPPNPPGKLLPDKGLLPNENSASSELRKRGKSKPGLLPHEFQQQKRRVYRRKRSKFLLEDAIPSSDFTSAWSTNHHLASIFDFTLDEIQSLKSASSGQTFFSDVDSTDAASTSGSASTSLSYDSRWTVGSRKRKLAAKAYMPLRAKRWAAELDGRCPSDSSAEGASVPERPDEGIDSHTFESISEDDSSLSHLKSSITNYFGAAGRLACGEKYQVLARRVTPEGKVQYLVEWEGTTPY

SEQ ID NO: 57507 - protein, 166 aa, Homo sapiens
MENRALDPGTRDSYGATSHLPNKGALAKVKNNFKDLMSKLTEGQYVLCRWTDGLYYLGKIKRVSSSKQSCLVTFEDNSKYWVLWKDIQHAGVPGEEPKCNICLGKTSGPLNEILICGKCGLGYHQQCHIPIAGSADQPLLTPWFCRRCIFALAVRKGGALKKGAIA

SEQ ID NO: 57508 - protein, 107 aa, Homo sapiens
MENRALDPGTRDSYGATSHLPNKGALAKVKNNFKDLMSKLTEGQYVLCRWTDGLYYLGKIKRVSSSKQSCLVTFEDNSKYWVLWKDIQHAGVPGEEPKCNICLGKTS

SEQ ID NO: 57509 - protein, 563 aa, Homo sapiens
MENRALDPGTRDSYGATSHLPNKGALAKVKNNFKDLMSKLTEGQYVLCRWTDGLYYLGKIKRVSSSKQSCLVTFEDNSKYWVLWKDIQHAGVPGEEPKCNICLGKTSGPLNEILICGKCGLGYHQQCHIPIAGSADQPLLTPWFCRRCIFALAVRKGGALKKGAIARTLQAVKMVLSYQPEELEWDSPHRTNQQQCYCYCGGPGEWYLRMLQCYRCRQWFHEACTQCLNEPMMFGDRFYLFFCSVCNQGPEYIERLPLRWVDVVHLALYNLGVQSKKKYFDFEEILAFVNHHWELLQLGKLTSTPVTDRGPHLLNALNSYKSRFLCGKEIKKKKCIFRLRIRVPPNPPGKLLPDKGLLPNENSASSELRKRGKSKPGLLPHEFQQQKRRVYRRKRSKFLLEDAIPSSDFTSAWSTNHHLASIFDFTLDEIQSLKSASSGQTFFSDVDSTDAASTSGSASTSLSYDSRWTVGSRKRKLAAKAYMPLRAKRWAAELDGRCPSDSSAEGASVPERPDEGIDSHTFESISEDDSSLSHLKSSITNYFGAAGRLAWGEVPGVGSEGHT

SEQ ID NO: 57510 - protein, 1096 aa, Homo sapiens
MATVPVYCVCRLPYDVTRFMIECDACKDWFHGSCVGVEEEEAPDIDIYHCPNCEKTHGKSTLKKKRTWHKHGPGQAPDVKPVQNGSQLFIKELRSRTFPSAEDVVARVPGSQLTLGYMEEHGFTEPILVPKKDGLGLAVPAPTFYVSDVENYVGPERSVDVTDVTKQKDCKMKLKEFVDYYYSTNRKRVLNVTNLEFSDTRMSSFVEPPDIVKKLSWVENYWPDDALLAKPKVTKYCLICVKDSYTDFHIDSGGASAWYHVLKGEKTFYLIRPASANISLYERWRSASNHSEMFFADQVDKCYKCIVKQGQTLFIPSGWIYATLTPVDCLAFAGHFLHSLSVEMQMRAYEVERRLKLGSLTQFPNFETACWYMGKHLLEAFKGSHKSGKQLPPHLVQGAKILNGAFRSWTKKQALAEHEDELPEHFKPSQLIKDLAKEIRLSENASKAVRPEVNTVASSDEVCDGDREKEEPPSPIEATPPQSLLEKVSKKKTPKTVKMPKPSKIPKPPKPPKPPRPPKTLKLKDGGKKKGKKSRESASPTIPNLDLLEAHTKEALTKMEPPKKGKATKSVLSVPNKDVVHMQNDVERLEIREQTKSKSEAKWKYKNSKPDSLLKMEEEQKLEKSPLAGNKDNKFSFSFSNKKLLGSKALRPPTSPGVFGALQNFKEDKPKPVRDEYEYVSDDGELKIDEFPIRRKKNAPKRDLSFLLDKKAVLPTPVTKPKLDSAAYKSDDSSDEGSLHIDTDTKPGRNARVKKESGSSAAGILDLLQASEEVGALEYNPSSQPPASPSTQEAIQGMLSMANLQASDSCLQTTWGAGQAKGSSLAAHGARKNGGGSGKSAGKRLLKRAAKNSVDLDDYEEEQDHLDACFKDSDYVYPSLESDEDNPIFKSRSKKRKGSDDAPYSPTARVGPSVPRQDRPVREGTRVASIETGLAAAAAKLSQQEEQKSKKKKSAKRKLTPNTTSPSTSTSISAGTTSTSTTPASTTPASTTPASTSTASSQASQEGSSPEPPPESHSSSLADHEYTAAGTFTGAQAGRTSQPMAPGVFLTQRRPSASSPNNNTAAKGKRTKKGMATAKQRLGKILKIHRNGKLLL

SEQ ID NO: 57511 - protein, 327 aa, Homo sapiens
MATVPVYCVCRLPYDVTRFMIECDACKDWFHGSCVGVEEEEAPDIDIYHCPNCEKTHGKSTLKKKRTWHKHGPGQAPDVKPKNSVDLDDYEEEQDHLDACFKDSDYVYPSLESDEDNPIFKSRSKKRKGSDDAPYSPTARVGPSVPRQDRPVREGTRVASIETGLAAAAAKLSQQEEQKSKKKKSAKRKLTPNTTSPSTSTSISAGTTSTSTTPASTTPASTTPASTSTASSQASQEGSSPEPPPESHSSSLADHEYTAAGTFTGAQAGRTSQPMAPGVFLTQRRPSASSPNNNTAAKGKRTKKGMATAKQRLGKILKIHRNGKLLL

SEQ ID NO: 57512 - protein, 681 aa, Homo sapiens
MELQTLQEALKVEIQVHQKLVAQMKQDPQNADLKKQLHELQAKITALSEKQKRVVEQLRKNLIVKQEQPDKFQIQPLPQSENKLQTAQQQPLQQLQQQQQYHHHHAQQSAAASPNLTASQKTVTTASMITTKTLPLVLKAATATMPASVVGQRPTIAMVTAINSQKAVLSTDVQNTPVNLQTSSKVTGPGAEAVQIVAKNTVTLQVQATPPQPIKVPQFIPPPRLTPRPNFLPQVRPKPVAQNNIPIAPAPPPMLAAPQLIQRPVMLTKFTPTTLPTSQNSIHPVRVVNGQTATIAKTFPMAQLTSIVIATPGTRLAGPQTVQLSKPSLEKQTVKSHTETDEKQTESRTITPPAAPKPKREENPQKLAFMVSLGLVTHDHLEEIQSKRQERKRRTTANPVYSGAVFEPERKKSAVTYLNSTMHPGTRKRGRPPKYNAVLGFGALTPTSPQSSHPDSPENEKTETTFTFPAPVQPVSLPSPTSTDGDIHEDFCSVCRKSGQLLMCDTCSRVYHLDCLDPPLKTIPKGMWICPRCQDQMLKKEEAIPWPGTLAIVHSYIAYKAAKEEEKQKLLKWSSDLKQEREQLEQKVKQLSNSISKCMEMKNTILARQKEMHSSLEKVKQLIRLIHGIDLSKPVDSEATVGAISNGPDCTPPANAATSTPAPSPSSQSCTANCNQGEETK

SEQ ID NO: 57513 - protein, 634 aa, Homo sapiens
MELQTLQEALKVEIQVHQKLVAQMKQDPQNADLKKQLHELQAKITALSEKQKRVVEQLRKNLIVKQEQPDKFQIQPLPQSENKLQTAQQQPLQQLQQQQQYHHHHAQQSAAASPNLTASQKTVTTASMITTKTLPLVLKAATATMPASVVGQRPTIAMVTAINSQKAVLSTDVQNTPVNLQTSSKVTGPGAEAVQIVAKNTVTLQVQATPPQPIKVPQFIPPPRLTPRPNFLPQVRPKPVAQNNIPIAPAPPPMLAAPQLIQRPVMLTKFTPTTLPTSQNSIHPVRVVNGQTATIAKTFPMAQLTSIVIATPGTRLAGPQTVQLSKPSLEKQTVKSHTETDEKQTESRTITPPAAPKPKREENPQKLAFMVSLGLVTHDHLEEIQSKRQERKRRTTANPVYSGAVFEPERKKSAVTYLNSTMHPGTRKRANEEHWPKGDIHEDFCSVCRKSGQLLMCDTCSRVYHLDCLDPPLKTIPKGMWICPRCQDQMLKKEEAIPWPGTLAIVHSYIAYKAAKEEEKQKLLKWSSDLKQEREQLEQKVKQLSNSISKCMEMKNTILARQKEMHSSLEKVKQLIRLIHGIDLSKPVDSEATVGAISNGPDCTPPANAATSTPAPSPSSQSCTANCNQGEETK

SEQ ID NO: 57514 - protein, 680 aa, Homo sapiens
MELQTLQEALKVEIQVHQKLVAQMKQDPQNADLKKQLHELQAKITALSEKQKRVVEQLRKNLIVKQEQPDKFQIQPLPQSENKLQTAQQQPLQQLQQQQQYHHHHAQQSAAASPNLTASQKTVTTASMITTKTLPLVLKAATATMPASVVGQRPTIAMVTAINSQKAVLSTDVQNTPVNLQTSSKVTGPGAEAVQIVAKNTVTLVQATPPQPIKVPQFIPPPRLTPRPNFLPQVRPKPVAQNNIPIAPAPPPMLAAPQLIQRPVMLTKFTPTTLPTSQNSIHPVRVVNGQTATIAKTFPMAQLTSIVIATPGTRLAGPQTVQLSKPSLEKQTVKSHTETDEKQTESRTITPPAAPKPKREENPQKLAFMVSLGLVTHDHLEEIQSKRQERKRRTTANPVYSGAVFEPERKKSAVTYLNSTMHPGTRKRGRPPKYNAVLGFGALTPTSPQSSHPDSPENEKTETTFTFPAPVQPVSLPSPTSTDGDIHEDFCSVCRKSGQLLMCDTCSRVYHLDCLDPPLKTIPKGMWICPRCQDQMLKKEEAIPWPGTLAIVHSYIAYKAAKEEEKQKLLKWSSDLKQEREQLEQKVKQLSNSISKCMEMKNTILARQKEMHSSLEKVKQLIRLIHGIDLSKPVDSEATVGAISNGPDCTPPANAATSTPAPSPSSQSCTANCNQGEETK

SEQ ID NO: 57515 - protein, 26 aa, Homo sapiens
MELQTLQEALKVEIQVHQKLVAQMKQ

SEQ ID NO: 57516 - protein, 11 aa, Homo sapiens
MELQTLQEALK

SEQ ID NO: 57517 - protein, 101 aa, Homo sapiens
MELQTLQEALKVEIQVHQKLVAQMKQDPQNADLKKQLHELQAKITALSEKQKRVVEQLRKNLIVKQEQPDKFQIQPLPQSENKLQTAQQQPLQQLQQQQQY

SEQ ID NO: 57518 - protein, 9 aa, Homo sapiens
MELQTLQEA

SEQ ID NO: 57519 - protein, 51 aa, Homo sapiens
MELQTLQEALKVEIQVHQKLVAQMKQDPQNADLKKQLHELQAKITALSEKQ

SEQ ID NO: 57520 - protein, 158 aa, Homo sapiens
MLEAMAEPSPEDPPPTLKPETQPPEKRRRTIEDFNKFCSFVLAYAGYIPPSKEESDWPASGSSSPLRGESAADSDGWDSAPSDLRTIQTFVKKAKSSKRRAAQAGPTQPGPPRSTFSRLQAPDSATLLEKMKLKDSLFDLDGPKVASPLSPPCAANTP

SEQ ID NO: 57521 - protein, 403 aa, Homo sapiens
MLEAMAEPSPEDPPPTLKPETQPPEKRRRTIEDFNKFCSFVLAYAGYIPPSKEESDWPASGSSSPLRGESAADSDGWDSAPSDLRTIQTFVKKAKSSKRRAAQAGPTQPGPPRSTFSRLQAPDSATLLEKMKLKDSLFDLDGPKVASPLSPTSLTHTSRPPAALTPVPLSQGDLSHPPRKKDRKNRKLGPGAGAGFGVLRRPRPTPGDGEKRSRIKKSKKRKLKKAERGDRLPPPGPPQAPPSDTDSEEEEEEEEEEEEEEMATVVGGEAPVPVLPTPPEAPRPPATVHPEGVPPADSESKEVGSTETSQDGDASSSEGEMRVMDEDIMVESGDDSWDLITCYCRKPFAGRPMIECSLCGTWIHLSCAKIKKTNVPDFFYCQKCKELRPEARRLGGPPKSGEP

SEQ ID NO: 57522 - protein, 399 aa, Homo sapiens
MPGDCRRDPPPTLKPETQPPEKRRRTIEDFNKFCSFVLAYAGYIPPSKEESDWPASGSSSPLRGESAADSDGWDSAPSDLRTIQTFVKKAKSSKRRAAQAGPTQPGPPRSTFSRLQAPDSATLLEKMKLKDSLFDLDGPKVASPLSPTSLTHTSRPPAALTPVPLSQGDLSHPPRKKDRKNRKLGPGAGAGFGVLRRPRPTPGDGEKRSRIKKSKKRKLKKAERGDRLPPPGPPQAPPSDTDSEEEEEEEEEEEEEEMATVVGGEAPVPVLPTPPEAPRPPATVHPEGVPPADSESKEVGSTETSQDGDASSSEGEMRVMDEDIMVESGDDSWDLITCYCRKPFAGRPMIECSLCGTWIHLSCAKIKKTNVPDFFYCQKCKELRPEARRLGGPPKSGEP

SEQ ID NO: 57523 - protein, 2039 aa, Homo sapiens
MDIVDTFNHLIPTEHLDDALFLGSNLENEVCEDFSASQNVLEDSLKNMLSDKDPMLGSASNQFCLPVLDSNDPNFQMPCSTVVGLDDIMDEGVVKESGNDTIDEEELILPNRNLRDKVEENSVRSPRKSPRLMAQEQVRSLRQSTIAKRSNAAPLSNTKKASGKTVSTAKAGVKQPERSQVKEEVCMSLKPEYHKENRRCSRNSGQIEVVPEVSVSSSHSSVSSCLEMKDEDGLDSKHKCNNPGEIDVPSHELNCSLLSETCVTIGEKKNEALMECKAKPVGSPLFKFSDKEEHEQNDSISGKTGETVVEEMIATRKVEQDSKETVKLSHEDDHILEDAGSSDISSDAACTNPNKTENSLVGLPSCVDEVTECNLELKDTMGIADKTENTLERNKIEPLGYCEDAESNRQLESTEFNKSNLEVVDTSTFGPESNILENAICDVPDQNSKQLNAIESTKIESHETANLQDDRNSQSSSVSYLESKSVKSKHTKPVIHSKQNMTTDAPKKIVAAKYEVIHSKTKVNVKSVKRNTDVPESQQNFHRPVKVRKKQIDKEPKIQSCNSGVKSVKNQAHSVLKKTLQDQTLVQIFKPLTHSLSDKSHAHPGCLKEPHHPAQTGHVSHSSQKQCHKPQQQAPAMKTNSHVKEELEHPGVEHFKEEDKLKLKKPEKNLQPRQRRSSKSFSLDEPPLFIPDNIATIRREGSDHSSSFESKYMWTPSKQCGFCKKPHGNRFMVGCGRCDDWFHGDCVGLSLSQAQQMGEEDKEYVCVKCCAEEDKKTEILDPDTLENQATVEFHSGDKTMECEKLGLSKHTTNDRTKYIDDTVKHKVKILKRESGEGRNSSDCRDNEIKKWQLAPLRKMGQPVLPRRSSEEKSEKIPKESTTVTCTGEKASKPGTHEKQEMKKKKVEKGVLNVHPAASASKPSADQIRQSVRHSLKDILMKRLTDSNLKVPEEKAAKVATKIEKELFSFFRDTDAKYKNKYRSLMFNLKDPKNNILFKKVLKGEVTPDHLIRMSPEELASKELAAWRRRENRHTIEMIEKEQREVERRPITKITHKGEIEIESDAPMKEQEAAMEIQEPAANKSLEKPEGSEKQKEEVDSMSKDTTSQHRQHLFDLNCKICIGRMAPPVDDLSPKKVKVVVGVARKHSDNEAESIADALSSTSNILASEFFEEEKQESPKSTFSPAPRPEMPGTVEVESTFLARLNFIWKGFINMPSVAKFVTKAYPVSGSPEYLTEDLPDSIQVGGRISPQTVWDYVEKIKASGTKEICVVRFTPVTEEDQISYTLLFAYFSSRKRYGVAANNMKQVKDMYLIPLGATDKIPHPLVPFDGPGLELHRPNLLLGLIIRQKLKRQHSACASTSHIAETPESAPPIALPPDKKSKIEVSTEEAPEEENDFFNSFTTVLHKQRNKPQQNLQEDLPTAVEPLMEVTKQEPPKPLRFLPGVLIGWENQPTTLELANKPLPVDDILQSLLGTTGQVYDQAQSVMEQNTVKEIPFLNEQTNSKIEKTDNVEVTDGENKEIKVKVDNISESTDKSAEIETSVVGSSSISAGSLTSLSLRGKPPDVSTEAFLTNLSIQSKQEETVESKEKTLKRQLQEDQENNLQDNQTSNSSPCRSNVGKGNIDGNVSCSENLVANTARSPQFINLKRDPRQAAGRSQPVTTSESKDGDSCRNGEKHMLPGLSHNKEHLTEQINVEEKLCSAEKNSCVQQSDNLKVAQNSPSVENIQTSQAEQAKPLQEDILMQNIETVHPFRRGSAVATSHFEVGNTCPSEFPSKSITFTSRSTSPRTSTNFSPMRPQQPNLQHLKSSPPGFPFPGPPNFPPQSMFGFPPHLPPPLLPPPGFGFAQNPMVPWPPVVHLPGQPQRMMGPLSQASRYIGPQNFYQVKDIRRPERRHSDPWGRQDQQQLDRPFNRGKGDRQRFYSDSHHLKRERHEKEWEQESERHRRRDRSQDKDRDRKSREEGHKDKERARLSHGDRGTDGKASRDSRNVDKKPDKPKSEDYEKDKEREKSKHREGEKDRDRYHKDRDHTDRTKSKR

SEQ ID NO: 57524 - protein, 2039 aa, Homo sapiens; identical to SEQ ID NO: 57523

SEQ ID NO: 57525 - protein, 365 aa, Homo sapiens
MSSSVEQKKGPTRQRKCGFCKSNRDKECGQLLISENQKVAAHHKCMLFSSALVSSHSDNESLGGFSIEDVQKEIKRGTKLMCSLCHCPGATIGCDVKTCHRTYHYHCALHDKAQIREKPSQGIYMVYCRKHKKTAHNSEADLEESFNEHELEPSSPKSKKKSRKGRPRKTNFKGLSEDTRSTSSHGTDEMESSSYRDRSPHRSSPSDTRPKCGFCHVGEEENEARGKLHIFNAKKAAAHYKCMLFSSGTVQLTTTSRAEFGDFDIKTVLQEIKRGKRMKCTLCSQPGATIGCEIKACVKTYHYHCGVQDKAKYIENMSRGIYKLYCKNHSGNDERDEEDEERESKSRGKVEIDQQQLTQQQLNGN

SEQ ID NO: 57526 - protein, 324 aa, Homo sapiens
MSSSVEQKKGPTRQRKCGFCKSNRDKECGQLLISENQKVAAHHKCMLFSSALVSSHSDNESLGGFSIEDVQKEIKRGTKLMCSLCHCPGATIGCDVKTCHRTYHYHCALHDKAQIREKPSQGIYMVYCRKHKKTAHNSEAADLEESFNEHELEPSSPKSKKKSRKGRPRKTNFKGLSEDTRSTSSHGTDEMESSSYRDRSPHRSSPSDTRPKCGFCHVGEEENEARGKLHIFNAKKAAAHYKCMLFSSGTVQLTTTSRAEFGDFDIKTVLQEIKRGKRMKCTLCSQPGATIGCEIKACVKTYHYHCGVQDKAKYIENMSRGIYK

SEQ ID NO: 57527 - protein, 312 aa, Homo sapiens
MSSSVEQKKGPTRQRKCGFCKSNRDKECGQLLISENQKVAAHHKCMLFSSALVSSHSDNESLGGFSIEDVQKEIKRGTKLMCSLCHCPGATIGCDVKTCHRTYHYHCALHDKAQIREKPSQGIYMVYCRKHKKTAHNSEAADLEESFNEHELEPSSPKSKKKSRKGRPRKTNFKGLSEDTRSTSSHGTDEMESSSYRDRSPHRSSPSDTRPKCGFCHVGEEENEARGKLHIFNAKKAAAHYKCMLFSSGTVQLTTTSRAEFGDFDIKTVLQEIKRGKRMVCSFYICYATLHLICCFKFRVHPKFIQSSENLK

SEQ ID NO: 57528 - protein, 365 aa, Homo sapiens; identical to SEQ ID NO: 57525

SEQ ID NO: 57529 - protein, 366 aa, Homo sapiens
MSSSVEQKKGPTRQRKCGFCKSNRDKECGQLLISENQKVAAHHKCMLFSSALVSSHSDNESLGGFSIEDVQKEIKRGTKLMCSLCHCPGATIGCDVKTCHRTYHYHCALHDKAQIREKPSQGIYMVYCRKHKKTAHNSEAADLEESFNEHELEPSSPKSKKKSRKGRPRKTNFKGLSEDTRSTSSHGTDEMESSSYRDRSPHRSSPSDTRPKCGFCHVGEEENEARGKLHIFNAKKAAAHYKCMLFSSGTVQLTTTSRAEFGDFDIKTVLQEIKRGKRMKCTLCSQPGATIGCEIKACVKTYHYHCGVQDKAKYIENMSRGIYKLYCKNHSGNDERDEEDEERESKSRGKVEIDQQQLTQQQLNGN

SEQ ID NO: 57530 - protein, 331 aa, Homo sapiens
MSSSVEQKKGPTRQRKCGFCKSNRDKECGQLLISENQKVAAHHKCMMCSLCHCPGATIGCDVKTCHRTYHYHCALHDKAQIREKPSQGIYMVYCRKHKKTAHNSEADLEESFNEHELEPSSPKSKKKSRKGRPRKTNFKGLSEDTRSTSSHGTDEMESSSYRDRSPHRSSPSDTRPKCGFCHVGEEENEARGKLHIFNAKKAAAHYKCMLFSSGTVQLTTTSRAEFGDFDIKTVLQEIKRGKRMKCTLCSQPGATIGCEIKACVKTYHYHCGVQDKAKYIENMSRGIYKLYCKNHSGNDERDEEDEERESKSRGKVEIDQQQLTQQQLNGN

SEQ ID NO: 57531 - protein, 1024 aa, Homo sapiens
MASVPVYCLCRLPYDVTRFMIECDMCQDWFHGSCVGVEEEKAADIDLYHCPNCEVLHGPSIMKKRRGSSKGHDTHKGKPVKTGSPTFVRELRSRTFDSSDEVILKPTGNQLTVEFLEENSFSVPILVLKKDGLGMTLPSPSFTVRDVEHYVGSDKEIDVIDVTRQADCKMKLGDFVKYYYSGKREKVLNVISLEFSDTRLSNLVETPKIVRKLSWVENLWPEECVFERPNVQKYCLMSVRDSYTDFHIDFGGTSVWYHVLKGEKIFYLIRPTNANLTLFECWSSSSNQNEMFFGDQVDKCYKCSVKQGQTLFIPTGWIHAVLTPVDCLAFGGNFLHSLNIEMQLKAYEIEKRLSTADLFRFPNFETICWYVGKHILDIFRGLRENRRHPASYLVHGGKALNLAFRAWTRKEALPDHEDEIPETVRTVQLIKDLAREIRLVEDIFQQNVGKTSNIFGLQRIFPAGSIPLTRPAHSTSVSMSRLSLPSKNGSKKKGLKPKELFKKAERKGKESSALGPAGQLSYNLMDTYSHQALKTGSFQKAKFNITGACLNDSDDDSPDLDLDGNESPLALLMSNGSTKRVKSLSKSRRTKIAKKVDKARLMAEQVMEDEFDLDSDDELQIDERLGKEKATLIIRPKFPRKLPRAKPCSDPNRVREPGEVEFDIEEDYTTDEDMVEGVEGKLGNGSGAGGILDLLKASRQVGGPDYAALTEAPASPSTQEAIQGMLCMANLQSSSSSPATSSLQAWWTGGQDRSSGSSSSGLGTVSNSPASQRTPGKRPIKRPAYWRTESEEEEENASLDEQDSLGACFKDAEYIYPSLESDDDDPALKSRPKKKKNSDDAPWSPKARVTPTLPKQDRPVREGTRVASIETGLAAAAAKLAQQELQKAQKKKYIKKKPLLKEVEQPRPQDSNLSLTVPAPTVAATPQLVTSSSPLPPPEPKQEALSGSLADHEYTARPNAFGMAQANRSTTPMAPGVFLTQRRPSVGSQSNQAGQGKRPKKGLATAKQRLGRILKIHRNGKLLL

SEQ ID NO: 57532 - protein, 948 aa, Homo sapiens
MASVPVYCLCRLPYDVTRFMIECDMCQDWFHGSCVGVEEEKAADIDLYHCPNCEVLHGPSIMKKRRGSSKGHDTHKGKPVKTGSPTFVRELRSRTFDSSDEVILKPTGNQLTVEFLEENSFSVPILVLKKDGLGMTLPSPSFTVRDVEHYVGSDKEIDVIDVTRQADCKMKLGDFVKYYYSGKREKVLNVISLEFSDTRLSNLVETPKIVRKLSWVENLWPEECVFERPNVQKYCLMSVRDSYTDFHIDFGGTSVWYHVLKGEKIFYLIRPTNANLTLFECWSSSSNQNEMFFGDQVDKCYKCSVKQGQTLFIPTGWIHAVLTPVDCLAFGGNFLHSLNIEMQLKAYEIEKRLSTADLFRFPNFETICWYVGKHILDIFRGLRENRRHPASYLVHGGKALNLAFRAWTRKEALPDHEDEIPETVRTVQLIKDLAREIRLVEFNITGACLNDSDDDSPDLDLDGNESPLALLMSNGSTKRVKSLSKSRRTKIAKKVDKARLMAEQVMEDEFDLDSDDELQIDERLGKEKATLIIRPKFPRKLPRAKPCSDPNRVREPGEVEFDIEEDYTTDEDMVEGVEGKLGNGSGAGGILDLLKASRQVGGPDYAALTEAPASPSTQEAIQGMLCMANLQSSSSSPATSSLQAWWTGGQDRSSGSSSSGLGTVSNSPASQRTPGKRPIKRPAYWRTESEEEEENASLDEQDSLGACFKDAEYIYPSLESDDDDPALKSRPKKKKNSDDAPWSPKARVTPTLPKQDRPVREGTRVASIETGLAAAAAKLAQQELQKAQKKKYIKKKPLLKEVEQPRPQDSNLSLTVPAPTVAATPQLVTSSSPLPPPEPKQEALSGSLADHEYTARPNAFGMAQANRSTTPMAPGVFLTQRRPSVGSQSNQAGQGKRPKKGLATAKQRLGRILKIHRNGKLLLRQVIVQAECRQAIHEPKLKRRDAHP

SEQ ID NO: 57533 - protein, 1060 aa, Homo sapiens
MNRSRAIVQRGRVLPPPAPLDTTNLAGRRTLQGRAKMASVPVYCLCRLPYDVTRFMIECDMCQDWFHGSCVGVEEEKAADIDLYHCPNCEVLHGPSIMKKRRGSSKGHDTHKGKPVKTGSPTFVRELRSRTFDSSDEVILKPTGNQLTVEFLEENSFSVPILVLKKDGLGMTLPSPSFTVRDVEHYVGSDKEIDVIDVTRQADCKMKLGDFVKYYYSGKREKVLNVISLEFSDTRLSNLVETPKIVRKLSWVENLWPEECVFERPNVQKYCLMSVRDSYTDFHIDFGGTSVWYHVLKGEKIFYLIRPTNANLTLFECWSSSSNQNEMFFGDQVDKCYKCSVKQGQTLFIPTGWIHAVLTPVDCLAFGGNFLHSLNIEMQLKAYEIEKRLSTADLFRFPNFETICWYVGKHILDIFRGLRENRRHPASYLVHGGKALNLAFRAWTRKEALPDHEDEIPETVRTVQLIKDLAREIRLVEDIFQQNVGKTSNIFGLQRIFPAGSIPLTRPAHSTSVSMSRLSLPSKNGSKKKGLKPKELFKKAERKGKESSALGPAGQLSYNLMDTYSHQALKTGSFQKAKFNITGACLNDSDDDSPDLDLDGNESPLALLMSNGSTKRVKSLSKSRRTKIAKKVDKARLMAEQVMEDEFDLDSDDELQIDERLGKEKATLIIRPKFPRKLPRAKPCSDPNRVREPGEVEFDIEEDYTTDEDMVEGVEGKLGNGSGAGGILDLLKASRQVGGPDYAALTEAPASPSTQEAIQGMLCMANLQSSSSSPATSSLQAWWTGGQDRSSGSSSSGLGTVSNSPASQRTPGKRPIKRPAYWRTESEEEEENASLDEQDSLGACFKDAEYIYPSLESDDDDPALKSRPKKKKNSDDAPWSPKARVTPTLPKQDRPVREGTRVASIETGLAAAAAKLAQQELQKAQKKKYIKKKPLLKEVEQPRPQDSNLSLTVPAPTVAATPQLVTSSSPLPPPEPKQEALSGSLADHEYTARPNAFGMAQANRSTTPMAPGVFLTQRRPSVGSQSNQAGQGKRPKKGLATAKQRLGRILKIHRNGKLLL

SEQ ID NO: 57534 - protein, 303 aa, Homo sapiens
MDTYSHQALKTGSFQKAKFNITGACLNDSDDDSPDLDLDGNESPLALLMSNGSTKRVKSLSKSRRTKIAKKVDKARLMAEQVMEDEFDLDSDDELQIDERLGKEKATLIIRPKFPRKLPRASLALTPTEFVNQEKLSLTLRRTIQQMRTWWKGLKASLGMVVALVAFLICSRPAGRWGDLTMLPSPRPQLLPALRRPSRACCAWPTCSPHRPHRLPLACRPGGLGDRIEAVGAPAVGWAQCLTVLLPSAPQGSGPSSGQHTGEPRARRRRRTPVWMNRTAWERASRMQSISILHWSLMMMTLL

SEQ ID NO: 57535 - protein, 953 aa, Homo sapiens
IVQRGRVLPPPAPLDTTNLAGRRTLQGRAKMASVPVYCLCRLPYDVTRFMIECDMCQDWFHGSCVGVEEEKAADIDLYHCPNCEVLHGPSIMKKRRGSSKGHDTHKGKPVKTGSPTFVRELRSRTFDSSDEVILKPTGNQLTVEFLEENSFSVPILVLKKDGLGMTLPSPSFTVRDVEHYVGSDKEIDVIDVTRQADCKMKLGDFVKYYYSGKREKVLNVISLEFSDTRLSNLVETPKIVRKLSWVENLWPEECVFERPNVQKYCLMSVRDSYTDFHIDFGGTSVWYHVLKGEKIFYLIRPTNANLTLFECWSSSSNQNEMFFGDQVDKCYKCSVKQGQTLFIPTGWIHAVLTPVDCLAFGGNFLHSLNIEMQLKAYEIEKRLSTADLFRFPNFETICWYVGKHILDIFRGLRENRRHPASYLVHGGKALNLAFRAWTRKEALPDHEDEIPETVRTVQLIKDLAREIRLVEFNITGACLNDSDDDSPDLDLDGNESPLALLMSNGSTKRVKSLSKSRRTKIAKKVDKARLMAEQVMEDEFDLDSDDELQIDERLGKEKATLIIRPKFPRKLPRAKPCSDPNRVREPGEVEFDIEEDYTTDEDMVEGVEGKLGNGSGAGGILDLLKASRQVGGPDYAALTEAPASPSTQEAIQGMLCMANLQSSSSSPATSSLQAWWTGGQDRSSGSSSSGLGTVSNSPASQRTPGKRPIKRPAYWRTESEEEEENASLDEQDSLGACFKDAEYIYPSLESDDDDPALKSRPKKKKNSDDAPWSPKARVTPTLPKQDRPVREGTRVASIETGLAAAAAKLAQQELQKAQKKKYIKKKPLLKEVEQPRPQDSNLSLTVPAPTVAATPQLVTSSSPLPPPEPKQEALSGSLADHEYTARPNAFGMAQANRSTTPMAPGVFLTQRRPSVGSQSNQAGQGKRPKKGLATAKQRLGRILKIHRNGKLLL

SEQ ID NO: 57536 - protein, 114 aa, Homo sapiens
MASVPVYCLCRLPYDVTRFMIECDMCQDWFHGSCVGVEEEKAADIDLYHCPNCEVLHGPSIMKKRRGSSKGHDTHKGKPVKTGSPTFVRELRSRTFDSSDEVILKPTGNQLTVE

SEQ ID NO: 57537 - protein, 126 aa, Homo sapiens
MASVPVYCLCRLPYDVTRFMIECDMCQDWFHGSCVGVEEEKAADIDLYHCPNCEVLHGPSIMKKRRGSSKGHDTHKGKPVKTGSPTFVRELRSRTFDSSDEVILKPTGNQLTVEFLEENSFSVPIL

SEQ ID NO: 57538 - protein, 97 aa, Homo sapiens
MASVPVYCLCRLPYDVTRFMIECDMCQDWFHGSCVGVEEEKAADIDLYHCPNCEVLHGPSIMKKRRGSSKGHDTHKGKPVKTGSPTFVRELRSRTFD

SEQ ID NO: 57539 - protein, 115 aa, Homo sapiens
MASVPVYCLCRLPYDVTRFMIECDMCQDWFHGSCVGVEEEKAADIDLYHCPNCEVLHGPSIMKKRRGSSKGHDTHKGKPVKTGSPTFVRELRSRTFDSSDEVILKPTGNQLTVEF

SEQ ID NO: 57540 - protein, 97 aa, Homo sapiens; identical to SEQ ID NO: 57538

SEQ ID NO: 57541 - protein, 148 aa, Homo sapiens
MNRSRAIVQRGRVLPPPAPLDTTNLAGRRTLQGRAKMASVPVYCLCRLPYDVTRFMIECDMCQDWFHGSCVGVEEEKAADIDLYHCPNCEVLHGPSIMKKRRGSSKGHDTHKGKPVKTGSPTFVRELRSRTFDSSDEVILKPTGNQLT

SEQ ID NO: 57542 - protein, 878 aa, Homo sapiens
MASVPVYCLCRLPYDVTRFMIECDMCQDWFHGSCVGVEEEKAADIDLYHCPNCEVLHGPSIMKKRRGSSKGHDTHKGKPVKTGSPTFVRELRSRTFDSSDEVILKPTGNQLTVEFLEENSFSVPILVLKKDGLGMTLPSPSFTVRDVEHYVGSDKEIDVIDVTRQADCKMKLGDFVKYYYSGKREKVLNVISLEFSDTRLSNLVETPKIVRKLSWVENLWPEECVFERPNVQKYCLMSVRDSYTDFHIDFGGTSVWYHVLKGEKIFYLIRPTNANLTLFECWSSSSNQNEMFFGDQVDKCYKCSVKQGQTLFIPTGWIHAVLTPVDCLAFGGNFLHSLNIEMQLKAYEIEKRLSTADLFRFPNFETICWYVGKHILDIFRGLRENRRHPASYLVHGGKALNLAFRAWTRKEALPDHEDEIPETVRTVQLIKDLAREIRLVEDIFQQNVGKTSNIFGLQRIFPAGSIPLTRPAHSTSVSMSRLSLPSKNGSKKKGLKPKELFKKAERKGKESSALGPAGQLSYNLMDTYSHQALKTGSFQKAKFNITGACLNDSDDDSPDLDLDGNESPLALLMSNGSTKRVKSLSKSRRTKIAKKVDKARLMAEQVMEDEFDLDSDDELQIDERLGKEKATLIIRPKFPRKLPRAKPCSDPNRVREPGEVEFDIEEDYTTDEDMVEGVEGYQTATPAPAQGASEAPASPSTQEAIQGMLCMANLQSSSSSPATSSLQAWWTGGQDRSSGSSSSGLGTVSNSPASQRTPGKRPIKRPAYWRTESEEEEENASLDEQDSLGACFKDAEYIYPSLESDDDDPALKSRPKKKKNSDDAPWSPKARVTPTLPKQDRPVREGTRVASIETGLAAAAAKLAQQVKKMKLSLTDSG

SEQ ID NO: 57543 - protein, 138 aa, Homo sapiens
MKLPIFIADAFTARAFRGNPAAVCLLENELDEDMHQKIAREMNLSETAFIRKLHPTDNFAQKNMNSTLTFVTLSGELRARRAEDGIVLDLPLYPAHPQDFHEVEDLIKTAIGNTLVQDICYSPDTQKLLVRLSDVYNR

SEQ ID NO: 57544 - protein, 288 aa, Homo sapiens
MKLPIFIADAFTARAFRGNPAAVCLLENELDEDMHQKIAREMNLSETAFIRKLHPTDNFAQSSCFGLRWFTPASEVPLCGHATLASAAVLFHKIKNMNSTLTFVTLSGELRARRAEDGIVLDLPLYPAHPQDFHEVEDLIKTAIGNTLVQDICYSPDTQKLLVRLSDVYNRSFLENLKVNTENLLQVENTGKVKGLILTLKGEPGGQTQAFDFYSRYFAPWVGVAEDPVTGSAHAVLSSYWSQHLGKKEMHAFQCSHRGGELGISLRPDGRVDIRGGAAVVLEGTLTA

SEQ ID NO: 57545 - protein, 255 aa, Homo sapiens
MHQKIAREMNLSETAFIRKLHPTDNFAQSSCFGLRWFTPASEVPLCGHATLASAAVLFHKIKNMNSTLTFVTLSGELRARRAEDGIVLDLPLYPAHPQDFHEVEDLIKTAIGNTLVQDICYSPDTQKLLVRLSDVYNRSFLENLKVNTENLLQVENTGKVKGLILTLKGEPGGQTQAFDFYSRYFAPWVGVAEDPVTGSAHAVLSSYWSQHLGKKEMHAFQCSHRGGELGISLRPDGRVDIRGGAAVVLEGTLTA

SEQ ID NO: 57546 - protein, 288 aa, Homo sapiens; identical to SEQ ID NO: 57544

SEQ ID NO: 57547 - protein, 280 aa, Homo sapiens
MKLPIFIADAFTARAFRGNPAAVCLLENELDEDMHQKIAREMNLSETAFIRKLHPTDNFAQSSCFGLRWFTPASEVPLCGHATLASAAVLFHKIKNMNSTLTFVTLSGELRARRAEDGIVLDLPLYPAHPQDFHEVEDLIKTAIGNTLVQDICYSPDTQKLLVRLSDVYNRSFLENLKVNTENLLQVENTGKVKGLILTLKGEPGGQTQAFDFYSRYFAPWVGVAEDPVTGSAHAVLSSYWSQHLGKKEMHGRTALYQFLFYLPNSKLVFLLICTIPLKM

SEQ ID NO: 57548 - protein, 451 aa, Homo sapiens
MVGSALRRGAHAYVYLVSKASHISRGHQHQAWGSRPPAAECATQRAPGSVVELLGKSYPQDDHSNLTRKVLTRVGRNLHNQQHHPLWLIKERVKEHFYKQYVGRFGTPLFSVYDNLSPVVTTWQNFDSLLIPADHPSRKKGDNYYLNRTHMLRAHTSAHQWDLLHAGLDAFLVVGDVYRRDQIDSQHYPIFHQLEAVRLFSKHELFAGIKDGESLQLFEQSSRSAHKQETHTMEAVKLVEFDLKQTLTRLMAHLFGDELEIRWVDCYFPFTHPSFEMEINFHGEWLEVLGCGVMEQQLVNSAGAQDRIGWAFGLGLERLAMILYDIPDIRLFWCEDERFLKQFCVSNINQKVKFQPLSKYPAVINDISFWLPSENYAENDFYDLVRTIGGDLVEKVDLIDKFVHPKTHKTSHCYRITYRHMERTLSQREVRHIHQALQEAAVQLLGVEGRF

SEQ ID NO: 57549 - protein, 451 aa, Homo sapiens; identical to SEQ ID NO: 57548

SEQ ID NO: 57550 - protein, 155 aa, Homo sapiens
MLRAHTSAHQWDLLHAGLDAFLVVGDVYRRDQIDSQHYPIFHQLEAVRLFSKHELFAGIKDGESLQLFEQSSRSAHKQETHTMEAVKLVEFDLKQTLTRLMAHLFGDELEIRWVDCYFPFTHPSFEMEINFHGEWLEVLGCGVMEQQLVNSGGAT

SEQ ID NO: 57551 - protein, 101 aa, Homo sapiens
LFAGIKDGESLQLFEQSSRSAHKQETHTMEAVKLVEFDLKQTLTRLMAHLFGDELEIRWVDCYFPFTHPSFEMEINFHGEWLEVLGCGVMEQQLVNSGGAT

SEQ ID NO: 57552 - protein, 282 aa, Homo sapiens
MSGADRSPNAGAAPDSAPGQAAVASAYQRFEPRAYLRNNYAPPRGDLCNPNGVGPWKLRCLAQTFATGEVSGRTLIDIGSGPTVYQLLSACSHFEDITMTDFLEVNRQELGRWLQEEPGAFNWSMYSQHACLIEGKGECWQDKERQLRARVKRVLPIDVHQPQPLGAGSPAPLPADALVSAFCLEAVSPDLASFQRALDHITTLLRPGGHLLLIGALEESWYLAGEARLTVVPVSEEEVREALVRSGYKVRDLRTYIMPAHLQTGVDDVKGVFFAWAQKVGL

SEQ ID NO: 57553 - protein, 184 aa, Homo sapiens
MTDFLEVNRQELGRWLQEEPGAFNWSMYSQHACLIEGKGECWQDKERQLRARVKRVLPIDVHQPQPLGAGSPAPLPADALVSAFCLEAVSPDLASFQRALDHITTLLRPGGHLLLIGALEESWYLAGEARLTVVPVSEEEVREALVRSGYKVRDLRTYIMPAHLQTGVDDVKGVFFAWAQKVGL

SEQ ID NO: 57554 - protein, 246 aa, Homo sapiens
MEEAKSQSLEEDFEGQATHTGPKGVINDWRKFKLESQDSDSIPPSKKEILRQMSSPQSRNGKDSKERVSRKMSIQEYELIHKEKEDENCLRKYRRQCMQDMHQKLSFGPRYGFVYELETGKQFLETIEKELKITTIVVHIYEDGIKGCDALNSSLTCLAAEYPIVKFCKIKASNTGAGDRFSLDVLPTLLIYKGGELISNFISVAEQFAEEFFAGDVESFLNEYGLLPEREVHVLEHTKIEEEDVE

SEQ ID NO: 57555 - protein, 246 aa, Homo sapiens; identical to SEQ ID NO: 57554

SEQ ID NO: 57556 - protein, 194 aa, Homo sapiens
MSSPQSRNGKDSKERVSRKMSIQEYELIHKEKEDENCLRKYRRQCMQDMHQKLSFGPRYGFVYELETGKQFLETIEKELKITTIVVHIYEDGIKGCDALNSSLTCLAAEYPIVKFCKIKASNTGAGDRFSLDVLPTLLIYKGGELISNFISVAEQFAEEFFAGDVESFLNEYGLLPEREVHVLEHTKIEEEDVE

SEQ ID NO: 57557 - protein, 194 aa, Homo sapiens; identical to SEQ ID NO: 57556

SEQ ID NO: 57558 - protein, 301 aa, Homo sapiens
MTTLDDKLLGEKLQYYYSSSEDEDSDHEDKDRGRCAPASSSVPAEAELAGEGISVNTGPKGVINDWRRFKQLETEQREEQCREMERLIKKLSMTCRSHLDEEEEQQKQKDLQEKISGKMTLKEFAIMNEDQDDEEFLQQYRKQRMEEMRQQLHKGPQFKQVFEISSGEGFLDMIDKEQKSIVIMVHIYEDGIPGTEAMNGCMICLAAEYPAVKFCKVKSSVIGASSQFTRNALPALLIYKGGELIGNFVRVTDQLGDDFFAVDLEAFLQEFGLLPEKEVLVLTSVRNSATCHSEDSDLEID

SEQ ID NO: 57559 - protein, 109 aa, Homo sapiens
  VARIANT 1: note = MOD_RES - Any amino acid
XLQYYYSSSEDEDSDHEDKDRGRCAPASSSVPAEAELAGEGISVNTGPKGVINDWRRFKQLETEQREEQCREMERLIKKLSMTCRSHLDEEEEQQKQKDLQEKISGKER

SEQ ID NO: 57560 - protein, 91 aa, Homo sapiens
  VARIANT 1: note = MOD_RES - Any amino acid
XCAPASSSVPAEAELAGEGISVNTGPKGVINDWRRFKQLETEQREEQCREMERLIKKLSMTCRSHLDEEEEQQKQKDLQEKISGKKSWAIL

SEQ ID NO: 57561 - protein, 241 aa, Homo sapiens
MQDPNEDTEWNDILRDFGILPPKEESKDEIEEMVLRLQKEAMVKPFEKMTLAQLKEAEDEFDEEDMQAVETYRKKRLQEWKALKKKQKFGELREISGNQYVNEVTNAEEDVWVIIHLYRSSIPMCLLVNQHLSLLARKFPETKFVKAIVNSCIQHYHDNCLPTIFVYKNGQIEAKFIGIIECGGINLKLEELEWKLAEVGAIQTDLEENPRKDMVDMMVSSIRNTSIHDDSDSSNSDNDTK

SEQ ID NO: 57562 - protein, 239 aa, Homo sapiens
MQDPNADTEWNDILRKKGILPPKESLKELEEEAEEEQRILQQSVVKTYEDMTLEELEDHEDEFNEEDERAIEMYRRRRLAEWKATKLKNKFGEVLEISGKDYVQEVTKAGEGLWVILHLYKQGIPLCALINQHLSGLARKFPDVKFIKAISTTCIPNYPDRNLPTIFVYLEGDIKAQFIGPLVFGGMNLTRDELEWKLSESGAIMTDLEENPKKPIEDVLLSSVRRSVLMKRDSDSEGD

SEQ ID NO: 57563 - protein, 367 aa, Homo sapiens
MDAQCSAKVNARKRRKEAPGPNGATEEDGVPSKVQRCAVGLRQPAPFSDEIEVDFSKPYVRVTMEEASRGTPCERPVRVYADGIFDLFHSGHARALMQAKNLFPNTYLIVGVCSDELTHNFKGFTVMNENERYDAVQHCRYVDEVVRNAPWTLTPEFLAEHRIDFVAHDDIPYSSAGSDDVYKHIKEAGMFAPTQRTEGISTSDIITRIVRDYDVYARRNLQRGYTAKELNVSFINEKKYHLQERVDKVKKKVKDVEEKSKEFVQKVEEKSIDLIQKWEEKSREFIGSFLEMFGPEGALKHMLKEGKGRMLQAISPKQSPSSSPTRERSPSPSFRWPFSGKTSPPCSPANLSRHKAAAYDISEDEED

SEQ ID NO: 57564 - protein, 293 aa, Homo sapiens
MDAQCSAKVNARKRRKEAPGPNGATEEDGVPSKVQRCAVGLRQPAPFSDEIEVDFSKPYVRVTMEEASRGTPCERPVRVYADGIFDLFHSGHARALMQAKNLFPNTYLIVGVCSDELTHNFKGFTVMNENERYDAVQHCRYVDEVVRNAPWTLTPEFLAEHRIDFVAHDDIPYSSAGSDDVYKHIKEAGMFAPTQRTEGISTSDIITRIVRDYDVYARRNLQRGYTAKELNVSFINEKKYHLQERVDKVKKKVKDVEEKSKEFVQKVEEKSIDLIQKWEEKSREFIGSFLEMF

SEQ ID NO: 57565 - protein, 133 aa, Homo sapiens
MDAQCSAKVNARKRRKEAPGPNGATEEDGVPSKVQRCAVGLRQPAPFSDEIEVDFSKPYVRVTMEEASRGTPCERPVRVYADGIFDLFHSGHARALMQAKNLFPNTYLIVGVCSDELTHNFKGFTVMNENERY

SEQ ID NO: 57566 - protein, 328 aa, Homo sapiens
MDAQCSAKVNARKRRKEAPGPNGATEEASRGTPCERPVRVYADGIFDLFHSGHARALMQAKNLFPNTYLIVGVCSDELTHNFKGFTVMNENERYDAVQHCRYVDEVVRNAPWTLTPEFLAEHRIDFVAHDDIPYSSAGSDDVYKHIKEAGMFAPTQRTEGISTSDIITRIVRDYDVYARRNLQRGYTAKELNVSFINEKKYHLQERVDKVKKKVKDVEEKSKEFVQKVEEKSIDLIQKWEEKSREFIGSFLEMFGPEGALKHMLKEGKGRMLQAISPKQSPSSSPTRERSPSPSFRWPFSGKTSPPCSPANLSRHKAAAYDISEDEED

SEQ ID NO: 57567 - protein, 367 aa, Homo sapiens; identical to SEQ ID NO: 57563

SEQ ID NO: 57568 - protein, 115 aa, Homo sapiens
MDAQCSAKVNARKRRKEAPGPNGATEEDGVPSKVQRCAVGLRQPAPFSDEIEVDFSKPYVRVTMEEASRGTPCERPVRVYADGIFDLFHSGHARALMQAKNLFPNTYLIVGVCSD

SEQ ID NO: 57569 - protein, 749 aa, Homo sapiens
MEAETGSSVETGKKANRGTRIALVVFVGGTLVLGTILFLVSQGLLSLQAKQEYCLKPECIEAAAAILSKVNLSVDPCDNFFRFACDGWISNNPIPEDMPSYGVYPWLRHNVDLKLKELLEKSISRRRDTEAIQKAKILYSSCMNEKAIEKADAKPLLHILRHSPFRWPVLESNIGPEGVWSERKFSLLQTLATFRGQYSNSVFIRLYVSPDDKASNEHILKLDQATLSLAVREDYLDNSTEAKSYRDALYKFMVDTAVLLGANSSRAEHDMKSVLRLEIKIAEIMIPHENRTSEAMYNKMNISELSAMIPQFDWLGYIKKVIDTRLYPHLKDISPSENVVVRVPQYFKDLFRILGSERKKTIANYLVWRMVYSRIPNLSRRFQYRWLEFSRVIQGTTTLLPQWDKCVNFIESALPYVVGKMFVDVYFQEDKKEMMEELVEGVRWAFIDMLEKENEWMDAGTKRKAKEKARAVLAKVGYPEFIMNDTHVNEDLKAIKFSEADYFGNVLQTRKYLAQSDFFWLRKAVPKTEWFTNPTTVNAFYSASTNQIRFPAGELQKPFFWGTEYPRSLSYGAIGVIVGHEFTHGFDNNGRKYDKNGNLDPWWSTESEEKFKEKTKCMINQYSNYYWKKAGLNVKGKRTLGENIADNGGLREAFRAYRKWINDRRQGLEEPLLPGITFTNNQLFFLSYAHVRCNSYRPEAAREQVQIGAHSPPQFRVNGAISNFEEFQKAFNCPPNSTMNRGMDSCRLW

SEQ ID NO: 57570 - protein, 452 aa, Homo sapiens
MIHLPRPPKVLGLQFDWLGYIKKVIDTRLYPHLKDISPSENVVVRVPQYFKDLFRILGSERKKTIANYLVWRMVYSRIPNLSRRFQYRWLEFSRVIQGTTTLLPQWDKCVNFIESALPYVVGKMFVDVYFQEDKKEMMEELVEGVRWAFIDMLEKENEWMDAGTKRKAKEKARAVLAKVGYPEFIMNDTHVNEDLKAIKFSEADYFGNVLQTRKYLAQSDFFWLRKAVPKTEWFTNPTTVNAFYSASTNQIRFPAGELQKPFFWGTEYPRSLSYGAIGVIVGHEFTHGFDNNGRKYDKNGNLDPWWSTESEEKFKEKTKCMINQYSNYYWKKAGLNVKGKRTLGENIADNGGLREAFRAYRKWINDRRQGLEEPLLPGITFTNNQLFFLSYAHVRCNSYRPEAAREQVQIGAHSPPQFRVNGAISNFEEFQKAFNCPPNSTMNRGMDSCRLW

SEQ ID NO: 57571 - protein, 652 aa, Homo sapiens
MPSYGVYPWLRHNVDLKLKELLEKSISRRRDTEAIQKAKILYSSCMNEKAIEKADAKPLLHILRHSPFRWPVLESNIGPEGVWSERKFSLLQTLATFRGQYSNSVFIRLYVSPDDKASNEHILKLDQATLSLAVREDYLDNSTEAKSYRDALYKFMVDTAVLLGANSSRAEHDMKSVLRLEIKIAEIMIPHENRTSEAMYNKMNISELSAMIPQFDWLGYIKKVIDTRLYPHLKDISPSENVVVRVPQYFKDLFRILGSERKKTIANYLVWRMVYSRIPNLSRRFQYRWLEFSRVIQGTTTLLPQWDKCVNFIESALPYVVGKMFVDVYFQEDKKEMMEELVEGVRWAFIDMLEKENEWMDAGTKRKAKEKARAVLAKVGYPEFIMNDTHVNEDLKAIKFSEADYFGNVLQTRKYLAQSDFFWLRKAVPKTEWFTNPTTVNAFYSASTNQIRFPAGELQKPFFWGTEYPRSLSYGAIGVIVGHEFTHGFDNNGRKYDKNGNLDPWWSTESEEKFKEKTKCMINQYSNYYWKKAGLNVKGKRTLGENIADNGGLREAFRAYRKWINDRRQGLEEPLLPGITFTNNQLFFLSYAHVRCNSYRPEAAREQVQIGAHSPPQFRVNGAISNFEEFQKAFNCPPNSTMNRGMDSCRLW

SEQ ID NO: 57572 - protein, 695 aa, Homo sapiens
MEAETGSSVETGKKANRGTRIALVVFVGGTLVLGTILFLVSQGLLSLQAKQEYCLKPECIEAAAAILSKVNLSVDPCDNFFRFACDGWISNNPIPEDMPSYGVYPWLRHNVDLKLKELLEKSISRRRDTEAIQKAKILYSSCMNEKAIEKADAKPLLHILRHSPFRWPVLESNIGPEGVWSERKFSLLQTLATFRGQYSNSVFIRLYVSPDDKASNEHILKLDQATLSLAVREDYLDNSTEAKSYRDALYKFMVDTAVLLGANSSRAEHDMKSVLRLEIKIAEIMIPHENRTSEAMYNKMNISELSAMIPQFDWLGYIKKVIDTRLYPHLKDISPSENVVVRVPQYFKDLFRILGSERKKTIANYLVWRMVYSRIPNLSRRFQYRWLEFSRVIQGTTTLLPQWDKCVNFIESALPYVVGKMFVDVYFQEDKKEMMEELVEGVRWAFIDMLEKENEWMDAGTKRKAKEKARAVLAKVGYPEFIMNDTHVNEDLKAIKFSEADYFGNVLQTRKYLAQSDFFWLRKAVPKTEWFTNPTTVNAFYSASTNQIRFPAGELQKPFFWGTEYPRSLSYGAIGVIVGHEFTHGFDNNGRKYDKNGNLDPWWSTESEEKFKEKTKCMINQYSNYYWKKAGLNVKGKRTLGENIADNGGLREAFRAYRKWINDRRQGLEEPLLPGITFTNNQLFFLSYAHGQWCN

SEQ ID NO: 57573 - protein, 295 aa, Homo sapiens
MPSPRRSMEGRPLGVSASSSSSSPGSPAHGGGGGGSRFEFQSLLSSRATAVDPTCARLRASESPVHRRGSFPLAAAGPSQSPAPPLPEEDRMDLNPSFLGIALRSLLAIDLWLSKKLGVCAGESSSWGSVRPLMKLLEISGHGIPWLLGTLYCLCRSDSWAGREVLMNLLFALLLDLLLVALIKGLVRRRRPAHNQMDMFVTLSVDKYSFPSGHATRAALMSRFILNHLVLAIPLRVLVVLWAFVLGLSRVMLGRHNVTDVAFGFFLGYMQYSIVDYCWLSPHNAPVLFLLWSQR

SEQ ID NO: 57574 - protein, 204 aa, Homo sapiens [sequence omitted]

SEQ ID NO: 57575 - protein, 214 aa, Homo sapiens
MELAAGSFSEEQFWEACAELQQPALAGADWQLLVETSGISIYRLLDKKTGLYEYKVFGVLEDCSPTLLADIYMDSDYRKQWDQYVKELYEQECNGETVVYWEVKYPFPMSNRDYVYLRQRRDLDMEGRKIHVILARSTSMPQLGERSGVIRVKQYKQSLAIESDGKKGSKVFMYYFDNPGGQIPSWLINWAAKNGVPNFLKDMARACQNYLKKT

SEQ ID NO: 57576 - protein, 193 aa, Homo sapiens
LAQGRCLQVTAVQIQGSWKVTGVQPQKTGLYEYKVFGVLEDCSPTLLADIYMDSDYRKQWDQYVKELYEQECNGETVVYWEVKYPFPMSNRDYVYLRQRRDLDMEGRKIHVILARSTSMPQLGERSGVIRVKQYKQSLAIESDGKKGSKVFMYYFDNPGGQIPSWLINWAAKNGVPNFLKDMARACQNYLKKT

SEQ ID NO: 57577 - protein, 142 aa, Homo sapiens
MDSDYRKQWDQYVKELYEQECNGETVVYWEVKYPFPMSNRDYVYLRQRRDLDMEGRKIHVILARSTSMPQLGERSGVIRVKQYKQSLAIESDGKKGSKVFMYYFDNPGGQIPSWLINWAAKNGVPNFLKDMARACQNYLKKT

SEQ ID NO: 57578 - protein, 187 aa, Homo sapiens
MPVDLSKWSGPLSLQEVDEQPQHPLHVTYAGAAVDELGKVLTPTQVKNRPTSISWDGLDSGKLYTLVLTDPDAPSRKDPKYREWHHFLVVNMKGNDISSGTVLSDYVGSGPPKGTGLHRYVWLVYEQDRPLKCDEPILSNRSGDHRGKFKVASFRKKYELRAPVAGTCYQAEWDDYVPKLYEQLSGK

SEQ ID NO: 57579 - protein, 155 aa, Homo sapiens
MPVDLSKWSGPLSLQEVDEQPQHPLHVTYAGAAVDELGKVLTPTQVKNRPTSISWDGLDSGKLYTLVLTDPDAPSRKDPKYREWHHFLVVNMKGNDISSGTVLSDYVGSGPPKGTGLHRYVWLVYEQDRPLKCDFSCCLAFIILLTHSDLCFDQI

SEQ ID NO: 57580 - protein, 2044 aa, Homo sapiens
MCPVDFHGIFQLDERRRDAVIALGIFLIESDLQHKDCVVPYLLRLLKGLPKVYWVEESTARKGRGALPVAESFSFCLVTLLSDVAYRDPSLRDEILEVLLQVLHVLLGMCQALEIQDKEYLCKYAIPCLIGISRAFGRYSNMEESLLSKLFPKIPPHSLRVLEELEGVRRRSFNDFRSILPSNLLTVCQEGTLKRKTSSVSSISQVSPERGMPPPSSPGGSAFHYFEASCLPDGTALEPEYYFSTISSSFSVSPLFNGVTYKEFNIPLEMLRELLNLVKKIVEEAVLKSLDAIVASVMEANPSADLYYTSFSDPLYLTMFKMLRDTLYYMKDLPTSFVKEIHDFVLEQFNTSQGELQKILHDADRIHNELSPLKLRCQANAACVDLMVWAVKDEQGAENLCIKLSEKLQSKTSSKVIIAHLPLLICCLQGLGRLCERFPVVVHSVTPSLRDFLVIPSPVLVKLYKYHSQYHTVAGNDIKISVTNEHSESTLNVMSGKKSQPSMYEQLRDIAIDNICRCLKAGLTVDPVIVEAFLASLSNRLYISQESDKDAHLIPDHTIRALGHIAVALRDTPKVMEPILQILQQKFCQPPSPLDVLIIDQLGCLVITGNQYIYQEVWNLFQQISVKASSVVYSATKDYKDHGYRHCSLAVINALANIAANIQDEHLVDELLMNLLELFVQLGLEGKRASERASEKGPALKASSSAGNLGVLIPVIAVLTRRLPPIKEAKPRLQKLFRDFWLYSVLMGFAVEGSGLWPEEWYEGVCEIATKSPLLTFPSKEPLRSVLQYNSAMKNDTVTPAELSELRSTIINLLDPPPEVSALINKLDFAMSTYLLSVYRLEYMRVLRSTDPDRFQVMFCYFEDKAIQKDKSGMMQCVIAVADKVFDAFLNMMADKAKTKENEEELERHAQFLLVNFNHIHKRIRRVADKYLSGLVDKFPHLLWSGTVLKTMLDILQTLSLSLSADIHKDQPYYDIPDAPYRITVPDTYEARESIVKDFAARCGMILQEAMKWAPTVTKSHLQEYLNKHQNWVSGLSQHTGLAMATESILHFAGYNKQNTTLGATQLSERPACVKKDYSNFMASLNLRNRYAGEVYGMIRFSGTTGQMSDLNKMMVQDLHSALDRSHPQHYTQAMFKLTAMLISSKDCDPQLLHHLCWGPLRMFNEHGMETALACWEWLLAGKDGVEVPFMREMAGAWHMTVEQKFGLFSAEIKEADPLAASEASQPKPCPPEVTPHYIWIDFLVQRFEIAKYCSSDQVEIFSSLLQRSMSLNIGGAKGSMNRHVAAIGPRFKLLTLGLSLLHADVVPNATIRNVLREKIYSTAFDYFSCPPKFPTQGEKRLREDISIMIKFWTAMFSDKKYLTASQLVPPDNQDTRSNLDITVGSRQQATQGWINTYPLSSGMSTISKKSGMSKKTNRGSQLHKYYMKRRTLLLSLLATEIERLITWYNPLSAPELELDQAGENSVANWRSKYISLSEKQWKDNVNLAWSISPYLAVQLPARFKNTEAIGNEVTRLVRLDPGAVSDVPEAIKFLVTWHTIDADAPELSHVLCWAPTDPPTGLSYFSSMYPPHPLTAQYGVKVLRSFPPDAILFYIPQIVQALRYDKMGYVREYILWAASKSQLLAHQFIWNMKTNIYLDEEGHQKDPDIGDLLDQLVEEITGSLSGPAKDFYQREFDFFNKITNVSAIIKPYPKGDERKKACLSALSEVKVQPGCYLPSNPEAIVLDIDYKSGTPMQSAAKAPYLAKFKVKRCGVSELEKEGLRCRSDSEDECSTQEADGQKISWQAAIFKVGDDCRQDMLALQIIDLFKNIFQLVGLDLFVFPYRVVATAPGCGVIECIPDCTSRDQLGRQTDFGMYDYFTRQYGDESTLAFQQARYNFIRSMAAYSLLLFLLQIKDRHNGNIMLDKKGHIIHIDFGFMFESSPGGNLGWEPDIKLTDEMVMIMGGKMEATPFKWFMEMCVRGYLAVRPYMDAVVSLVTLMLDTGLPCFRGQTIKLLKHRFSPNMTEREAANFIMKVIQSCFLSNRSRTYDMIQYYQNDIPY

SEQ ID NO: 57581 - protein, 479 aa, Homo sapiens
MDETSPLVSPERAQPPDYTFPSGSGAHFPQVPGGAVRVAAAAGSGPSPPGSPGHDRERQPLLDRARGAAAQGQTQTVAAQAQALAAQAAAAAHAAQAHRERNEFPEDPEFEAVVRQAELAIERCIFPERIYQGSSGSYFVKDPQGRIIAVFKPKNEEPYGHLNPKWTKWLQKLCCPCCFGRDCLVLNQGYLSEAGASLVDQKLELNIVPRTKVVYLASETFNYSAIDRVKSRGKRLALEKVPKVGQRFNRIGLPPKVGSFQLFVEGYKDADYWLRRFEAEPLPENTNRQLLLQFERLVVLDYIIRNTDRGNDNWLIKYDCPMDSSSSRDTDWVVVKEPVIKVAAIDNGLAFPLKHPDSWRAYPFYWAWLPQAKVPFSQEIKDLILPKISDPNFVKDLEEDLYELFKKDPGFDRGQFHKQIAVMRGQILNLTQALKDNKSPLHLVQMPPVIVETARSHQRSSSESYTQSFQSRKPFFSWW

SEQ ID NO: 57582 - protein, 449 aa, Homo sapiens
MLGPQVWSSVRQGLSRSLSRNVGVWASGEGKKVDIAGIYPPVTTPFTATAEVDYGKLEENLHKLGTFPFRGAVGGVCALANVLGAQVCQLERLCCTGQWEDAQKLQHRLIEPNAARIIAVFKPKNEEPYGHLNPKWTKWLQKLCCPCCFGRDCLVLNQGYLSEAGASLVDQKLELNIVPRTKVVYLASETFNYSAIDRVKSRGKRLALEKVPKVGQRFNRIGLPPKVGSFQLFVEGYKDADYWLRRFEAEPLPENTNRQLLLQFERLVVLDYIIRNTDRGNDNWLIKYDCPMDSSSSRDTDWVVVKEPVIKVAAIDNGLAFPLKHPDSWRAYPFYWAWLPQAKVPFSQEIKDLILPKISDPNFVKDLEEDLYELFKKDPGFDRGQFHKQIAVMRGQILNLTQALKDNKSPLHLVQMPPVIVETARSHQRSSSESYTQSFQSRKPFFSWW

SEQ ID NO: 57583 - protein, 481 aa, Homo sapiens
MEDPSEPDRLASADGGSPEEEEDGEREPLLPRIAWAHPRRGAPGSAVRLLDAAGEEGEAGDEELPLPPGDVGVSRSSSAELDRSRPAVSVTIGTSEMNAFLDDPEFADIMLRAEQAIEVGIFPERISQGSSGSYFVKDPKRKIIGVFKPKSEEPYGQLNPKWTKYVHKVCCPCCFGRGCLIPNQGYLSEAGAYLVDNKLHLSIVPKTKVVWLVSETFNYNAIDRAKSRGKKYALEKVPKVGRKFHRIGLPPKIGSFQLFVEGYKEAEYWLRKFEADPLPENIRKQFQSQFERLVILDYIIRNTDRGNDNWLVRYEKQKCEKEIDHKESKWIDDEEFLIKIAAIDNGLAFPFKHPDEWRAYPFHWAWLPQAKVPFSEEIRNLILPYISDMNFVQDLCEDLYELFKTDKGFDKATFESQMSVMRGQILNLTQALRDGKSPFQLVQIPCVIVERSQGGSQGRIVHLSNSFTQTVNCRKPFFSSW

SEQ ID NO: 57584 - protein, 450 aa, Homo sapiens
MEDPSEPDRLASADGGSPEEEEDGEREPLLPRIAWAHPRRGAPGSAVRLLDRSRPAVSVTIGTSEMNAFLDDPEFADIMLRAEQAIEVGIFPERISQGSSGSYFVKDPKRKIIGVFKPKSEEPYGQLNPKWTKYVHKVCCPCCFGRGCLIPNQGYLSEAGAYLVDNKLHLSIVPKTKVVWLVSETFNYNAIDRAKSRGKKYALEKVPKVGRKFHRIGLPPKIGSFQLFVEGYKEAEYWLRKFEADPLPENIRKQFQSQFERLVILDYIIRNTDRGNDNWLVRYEKQKCEKEIDHKESKWIDDEEFLIKIAAIDNGLAFPFKHPDEWRAYPFHWAWLPQAKVPFSEEIRNLILPYISDMNFVQDLCEDLYELFKTDKGFDKATFESQMSVMRGQILNLTQALRDGKSPFQLVQIPCVIVERSQGGSQGRIVHLSNSFTQTVNCRKPFFSSW

SEQ ID NO: 57585 - protein, 2044 aa, Homo sapiens; identical to SEQ ID NO: 57580

SEQ ID NO: 57586 - protein, 854 aa, Homo sapiens
MREMAGAWHMTVEQKFGLFSAEIKEADPLAASEASQPKPCPPEVTPHYIWIDFLVQRFEIAKYCSSDQVEIFSSLLQRSMSLNIGGAKGSMNRHVAAIGPRFKLLTLGLSLLHADVVPNATIRNVLREKIYSTAFDYFSCPPKFPTQGEKRLREDISIMIKFWTAMFSDKKYLTASQLVPPDNQDTRSNLDITVGSRQQATQGWINTYPLSSGMSTISKKSGMSKKTNRGSQLHKYYMKRRTLLLSLLATEIERLITWYNPLSAPELELDQAGENSVANWRSKYISLSEKQWKDNVNLAWSISPYLAVQLPARFKNTEAIGNEVTRLVRLDPGAVSDVPEAIKFLVTWHTIDADAPELSHVLCWAPTDPPTGLSYFSSMYPPHPLTAQYGVKVLRSFPPDAILFYIPQIVQALRYDKMGYVREYILWAASKSQLLAHQFIWNMKTNIYLDEEGHQKDPDIGDLLDQLVEEITGSLSGPAKDFYQREFDFFNKITNVSAIIKPYPKGDERKKACLSALSEVKVQPGCYLPSNPEAIVLDIDYKSGTPMQSAAKAPYLAKFKVKRCGVSELEKEGLRCRSDSEDECSTQEADGQKISWQAAIFKVGDDCRQDMLALQIIDLFKNIFQLVGLDLFVFPYRVVATAPGCGVIECIPDCTSRDQLGRQTDFGMYDYFTRQYGDESTLAFQQARYNFIRSMAAYSLLLFLLQIKDRHNGNIMLDKKGHIIHIDFGFMFESSPGGNLGWEPDIKLTDEMVMIMGGKMEATPFKWFMEMCVRGYLAVRPYMDAVVSLVTLMLDTGLPCFRGQTIKLLKHRFSPNMTEREAANFIMKVIQSCFLSNRSRTYDMIQYYQNDIPY

SEQ ID NO: 57587 - protein, 87 aa, Homo sapiens
MCPVDFHGIFQLDERRRDAVIALGIFLIESDLQHKDCVVPYLLRLLKGLPKVYWVEESTARKGRGALPVAESFSFCLVTLLSDVAYR

SEQ ID NO: 57588 - protein, 652 aa, Homo sapiens
MSGQSLTDRITAAQHSVTGSAVSKTVCKATTHEIMGPKKKHLDYLIQCTNEMNVNIPQLADSLFERTTNSSWVVVFKSLITTHHLMVYGNERFIQYLASRNTLFNLSNFLDKSGLQGYDMSTFIRRYSRYLNEKAVSYRQVAFDFTKVKRGADGVMRTMNTEKLLKTVPIIQNQMDALLDFNVNSNELTNGVINAAFMLLFKDAIRLFAAYNEGIINLLEKYFDMKKNQCKEGLDIYKKFLTRMTRISEFLKVAEQVGIDRGDIPDLSQAPSSLLDALEQHLASLEGKKIKDSTAASRATTLSNAVSSLASTGLSLTKVDEREKQAALEEEQARLKALKEQRLKELAKKPHTSLTTAASPVSTSAGGIMTAPAIDIFSTPSSSNSTSKLPNDLLDLQQPTFHPSVHPMSTASQVASTWGDPFSATVDAVDDAIPSLNPFLTKSSGDVHLSISSDVSTFTTRTPTHEMFVGFTPSPVAQPHPSAGLNVDFESVFGNKSTNVIVDSGGFDELGGLLKPTVASQNQNLPVAKLPPSKLVSDDLDSSLANLVGNLGIGNGTTKNDVNWSQPGEKKLTGGSNWQPKVAPTTAWNAATMAPPVMAYPATTPTGMIGYGIPPQMGSVPVMTQPTLIYSQPVMRPPNPFGPVSGAQIQFM

SEQ ID NO: 57589 - protein, 652 aa, Homo sapiens; identical to SEQ ID NO: 57588

SEQ ID NO: 57590 - protein, 645 aa, Homo sapiens
MSGQSLTDRITAAQHSVTGSAVSKTVCKATTHEIMGPKKKHLDYLIQCTNEMNVNIPQLADSLFERTTNSSWVVVFKSLITTHHLMVYGNERFIQYLASRNTLFNLSNFLDKSGLQGYDMSTFIRRYSRYLNEKAVSYRQVAFDFTKVKRGADGVMRTMNTEKLLKTVPIIQNQMDALLDFNVNSNELTNGVINAAFMLLFKDAIRLFAAYNEGIINLLEKYFDMKKNQCKEGLDIYKKFLTRMTRISEFLKVAEQVGIDRGDIPDLSQAPSSLLDALEQHLASLEGKKIKDSTAASRATTLSNAVSSLASTGLSLTKVDEREKQAALEEEQARLKALKEQRLKELAKKPHTSLTTAASPVSTSAGGIMTAPAIDIFSTPSSSNSTSKLPNDLLDLQQPTFHPSVHPMSTASQVASTWGDAVDDAIPSLNPFLTKSSGDVHLSISSDVSTFTTRTPTHEMFVGFTPSPVAQPHPSAGLNVDFESVFGNKSTNVIVDSGGFDELGGLLKPTVASQNQNLPVAKLPPSKLVSDDLDSSLANLVGNLGIGNGTTKNDVNWSQPGEKKLTGGSNWQPKVAPTTAWNAATMAPPVMAYPATTPTGMIGYGIPPQMGSVPVMTQPTLIYSQPVMRPPNPFGPVSGAQIQFM

SEQ ID NO: 57591 - protein, 610 aa, Homo sapiens
MSGQSLTDRITAAQHSVTGSAVSKTVCKATTHEIMGPKKKHLDYLIQCTNEMNVNIPQLADSLFERTTNSSWVVVFKSLITTHHLMVYGNERFIQYLASRNTLFNLSNFLDKSGLQGYDMSTFIRRYSRYLNEKAVSYRQVAFDFTKVKRGADGVMRTMNTEKLLKTVPIIQNQMDALLDFNVNSNELTNGVINAAFMLLFKDAIRLFAAYNEGIINLLEKYFDMKKNQCKEGLDIYKKFLTRMTRISEFLKVAEQVGIDRGDIPDLSQAPSSLLDALEQHLASLEGKKIKDSTAASRATTLSNAVSSLASTGLSLTKVDEREKQAALEEEQARLKALKEQRLKELAKKPHTSLTTAASPVSTSAGGIMTAPAIDIFSTPSSSNSTSKLPNDLLDLQQPTFHPSVHPMSTASQVASTWGGFTPSPVAQPHPSAGLNVDFESVFGNKSTNVIVDSGGFDELGGLLKPTVASQNQNLPVAKLPPSKLVSDDLDSSLANLVGNLGIGNGTTKNDVNWSQPGEKKLTGGSNWQPKVAPTTAWNAATMNGMHFPQYAPPVMAYPATTPTGMIGYGIPPQMGSVPVMTQPTLIYSQPVMRPPNPFGPVSGAQIQFM

SEQ ID NO: 57592 - protein, 551 aa, Homo sapiens
MNVNIPQLADSLFERTTNSSWVVVFKSLITTHHLMVYGNERFIQYLASRNTLFNLSNFLDKSGLQGYDMSTFIRRYSRYLNEKAVSYRQVAFDFTKVKRGADGVMRTMNTEKLLKTVPIIQNQMDALLDFNVNSNELTNGVINAAFMLLFKDAIRLFAAYNEGIINLLEKYFDMKKNQCKEGLDIYKKFLTRMTRISEFLKVAEQVGIDRGDIPDLSQAPSSLLDALEQHLASLEGKKIKDSTAASRATTLSNAVSSLASTGLSLTKVDEREKQAALEEEQARLKALKEQRLKELAKKPHTSLTTAASPVSTSAGGIMTAPAIDIFSTPSSSNSTSKLPNDLLDLQQPTFHPSVHPMSTASQVASTWGGFTPSPVAQPHPSAGLNVDFESVFGNKSTNVIVDSGGFDELGGLLKPTVASQNQNLPVAKLPPSKLVSDDLDSSLANLVGNLGIGNGTTKNDVNWSQPGEKKLTGGSNWQPKVAPTTAWNAATMAPPVMAYPATTPTGMIGYGIPPQMGSVPVMTQPTLIYSQPVMRPPNPFGPVSGAQIQFM

SEQ ID NO: 57593 - protein, 484 aa, Homo sapiens
MACRGGAGNGHRASATLSRVSPGSLYTCRTRTHNICMVSDFFYPNMGGVESHIYQLSQCLIERGHKVIIVTHAYGNRKGIRYLTSGLKVYYLPLKVMYNQSTATTLFHSLPLLRYIFVRERVTIIHSHSSFSAMAHDALFHAKTMGLQTVFTDHSLFGFADVSSVLTNKLLTVSLCDTNHIICVSYTSKENTVLRAALNPEIVSVIPNAVDPTDFTPDPFRRHDSITIVVVSRLVYRKGIDLLSGIIPELCQKYPDLNFIIGGEGPKRIILEEVRERYQLHDRVRLLGALEHKDVRNVLVQGHIFLNTSLTEAFCMAIVEAASCGLQVVSTRVGGIPEVLPENLIILCEPSVKSLCEGLEKAIFQLKSGTLPAPENIHNIVKTFYTWRNVAERTEKVYDRVSVEAVLPMDKRLDRLISHCGPVTGYIFALLAVFNFLFLIFLRWMTPDSIIDVAIDATGPRGAWTNNYSHSKRGGENNEISETR

SEQ ID NO: 57594 - protein, 169 aa, Homo sapiens
MAIVEAASCGLQVVSTRVGGIPEVLPENLIILCEPSVKSLCEGLEKAIFQLKSGTLPAPENIHNIVKTFYTWRNVAERTEKVYDRVSVEAVLPMDKRLDRLISHCGPVTGYIFALLAVFNFLFLIFLRWMTPDSIIDVAIDATGPRGAWTNNYSHSKRGGENNEISETR

SEQ ID NO: 57595 - protein, 250 aa, Homo sapiens
MELTGIDLLSGIIPELCQKYPDLNFIIGGEGPKRIILEEVRERYQLHDRVRLLGALEHKDVRNVLVQGHIFLNTSLTEAFCMAIVEAASCGLQVVSTRVGGIPEVLPENLIILCEPSVKSLCEGLEKAIFQLKSGTLPAPENIHNIVKTFYTWRNVAERTEKVYDRVSVEAVLPMDKRLDRLISHCGPVTGYIFALLAVFNFLFLIFLRWMTPDSIIDVAIDATGPRGAWTNNYSHSKRGGENNEISETR

SEQ ID NO: 57596 - protein, 554 aa, Homo sapiens
MRRPLSKCGMEPGGGDASLTLHGLQNRSHGKIKLRKRKSTLYFNTQEKSARRRGDLLGENIYLLLFTIALRILNCFLVQTSFVPDEYWQSLEVSHHMVFNYGYLTWEWTERLRSYTYPLIFASIYKILHLLGKDSVQLLIWIPRLAQALLSAVADVRLYSLMKQLENQEVARWVFFCQLCSWFTWYCCTRTLTNTMETVLTIIALFYYPLEGSKSMNSVKYSSLVALAFIIRPTAVILWTPLLFRHFCQEPRKLDLILHHFLPVGFVTLSLSLMIDRIFFGQWTLVQFNFLKFNVLQNWGTFYGSHPWHWYFSQGFPVILGTHLPFFIHGCYLAPKRYRILLVTVLWTLLVYSMLSHKEFRFIYPVLPFCMVFCGYSLTHLKTWKKPALSFLFLSNLFLALYTGLVHQRGTLDVMSHIQKVCYNNPNKSSASIFIMMPCHSTPYYSHVHCPLPMRFLQCPPDLTGKSHYLDEADVFYLNPLNWLHREFHDDASLPTHLITFSILEEEISAFLISSNYKRTAVFFHTHLPEGRIGSHIYVYERKLKGKFNMKMKF

SEQ ID NO: 57597 - protein, 359 aa, Homo sapiens
METVLTIIALFYYPLEGSKSMNSVKYSSLVALAFIIRPTAVILWTPLLFRHFCQEPRKLDLILHHFLPVGFVTLSLSLMIDRIFFGQWTLVQFNFLKFNVLQNWGTFYGSHPWHWYFSQGFPVILGTHLPFFIHGCYLAPKRYRILLVTVLWTLLVYSMLSHKEFRFIYPVLPFCMVFCGYSLTHLKTWKKPALSFLFLSNLFLALYTGLVHQRGTLDVMSHIQKVCYNNPNKSSASIFIMMPCHSTPYYSHVHCPLPMRFLQCPPDLTGKSHYLDEADVFYLNPLNWLHREFHDDASLPTHLITFSILEEEISAFLISSNYKRTAVFFHTHLPEGRIGSHIYVYERKLKGKFNMKMKF

SEQ ID NO: 57598 - protein, 297 aa, Homo sapiens
MYAQPVTNTKEVKWQKVLYERQPFPDNYVDRRFLEELRKNIHARKYQYWAVVFESSVVIQQLCSVCVFVVIWWYMDEGLLAPHWLLGTGLASSLIGYVLFDLIDGGEGRKKSGQTRWADLKSALVFITFTYGFSPVLKTLTESVSTDTIYAMSVFMLLGHLIFFDYGANAAIVSSTLSLNMAIFASVCLASRLPRSLHAFIMVTFAIQIFALWPMLQKKLKACTPRSYVGVTLLFAFSAVGGLLSISAVGAVLFALLLMSISCLCPFYLIRLQLFKENIHGPWDEAEIKEDLSRFLS

SEQ ID NO: 57599 - protein, 297 aa, Homo sapiens; identical to SEQ ID NO: 57598

SEQ ID NO: 57600 - protein, 297 aa, Homo sapiens; identical to SEQ ID NO: 57598

SEQ ID NO: 57601 - protein, 219 aa, Homo sapiens
MKDNDIKRLLYTHLLCIFSIILSVFIPSLFLENFSILETHLTWLCICSGFVTAVNLVLYLVVKPNTSSKRSSLSHKVTGFLKCCIYFLMSCFSFHVIFVLYGAPLIELALETFLFAVILSTFTTVPCLCLLGPNLKAWLRVFSRNGVTSIWENSLQITTISSFVGAWLGALPIPLDWERPWQVWPISCTLGATFGYVAGLVISPLWIYWNRKQLTYKNN

SEQ ID NO: 57602 - protein, 206 aa, Homo sapiens
MKDNDIKRLLYTHLLCIFSIILSVFIPSLFLENFSILETHLTWLCICSGFVTAVNLVLYLVVKPNTSSKRSSLSHKVTGFLKCCIYFLMSCFSFHVIFVLYGAPLIELALETFLFAVILSTFTTVPCLCLLGPNLKAWLRVFSRNGVTSIWENSLQITTISSFVGAWLGALPIPLDWERPWQMTVERKRSTYRSLHVPCRGLGTVK

SEQ ID NO: 57603 - protein, 49 aa, Homo sapiens
MKDNDIKRLLYTHLLCIFSIILSVFIPSLFLENFSILETHLTWLCICSG

SEQ ID NO: 57604 - protein, 332 aa, Homo sapiens
MAVTDSLSRAATVLATVLLLSFGSVAASHIEDQAEQFFRSGHTNNWAVLVCTSRFWFNYRHVANTLSVYRSVKRLGIPDSHIVLMLADDMACNPRNPKPATVFSHKNMELNVYGDDVEVDYRSYEVTVENFLRVLTGRIPPSTPRSKRLLSDDRSNILIYMTGHGGNGFLKFQDSEEITNIELADAFEQMWQKRRYNELLFIIDTCQGASMYERFYSPNIMALASSQVGEDSLSHQPDPAIGVHLMDRYTFYVLEFLEEINPASQTNMNDLFQVCPKSLCVSTPGHRTDLFQRDPKNVLITDFFGSVRKVEITTETIKLQQDSEIMESRYSS

SEQ ID NO: 57605 - protein, 395 aa, Homo sapiens
MAVTDSLSRAATVLATVLLLSFGSVAASHIEDQAEQFFRSGHTNNWAVLVCTSRFWFNYRHVANTLSVYRSVKRLGIPDSHIVLMLADDMACNPRNPKPATVFSHKNMELNVYGDDVEVDYRSYEVTVENFLRVLTGRIPPSTPRSKRLLSDDRSNILIYMTGHGGNGFLKFQDSEEITNIELADAFEQMWQKRRYNELLFIIDTCQGASMYERFYSPNIMALASSQVGEDSLSHQPDPAIGVHLMDRYTFYVLEFLEEINPASQTNMNDLFQVCPKSLCVSTPGHRTDLFQRDPKNVLITDFFGSVRKVEITTETIKLQQDSEIMESSYKEDQMDEKLMEPLKYAEQLPVAQIIHQKPKLKDWHPPGGFILGLWALIIMVFFKTYGIKHMKFIF

SEQ ID NO: 57606 - protein, 319 aa, Homo sapiens
MAVTDSLSRAATVLATVLLLSFGSVAASHIEDQAEQFFRSGHTNNWAVLVTVENFLRVLTGRIPPSTPRSKRLLSDDRSNILIYMTGHGGNGFLKFQDSEEITNIELADAFEQMWQKRRYNELLFIIDTCQGASMYERFYSPNIMALASSQVGEDSLSHQPDPAIGVHLMDRYTFYVLEFLEEINPASQTNMNDLFQVCPKSLCVSTPGHRTDLFQRDPKNVLITDFFGSVRKVEITTETIKLQQDSEIMESSYKEDQMDEKLMEPLKYAEQLPVAQIIHQKPKLKDWHPPGGFILGLWALIIMVFFKTYGIKHMKFIF

SEQ ID NO: 57607 - protein, 301 aa, Homo sapiens
MAVTDSLSRAATVLATVLLLSFGSVAASHIEVTVENFLRVLTGRIPPSTPRSKRLLSDDRSNILIYMTGHGGNGFLKFQDSEEITNIELADAFEQMWQKRRYNELLFIIDTCQGASMYERFYSPNIMALASSQVGEDSLSHQPDPAIGVHLMDRYTFYVLEFLEEINPASQTNMNDLFQVCPKSLCVSTPGHRTDLFQRDPKNVLITDFFGSVRKVEITTETIKLQQDSEIMESSYKEDQMDEKLMEPLKYAEQLPVAQIIHQKPKLKDWHPPGGFILGLWALIIMVFFKTYGIKHMKFIF

SEQ ID NO: 57608 - protein, 252 aa, Homo sapiens
MEAMWLLCVALAVLAWGFLWVWDSSERMKSREQGGRLGAESRTLLVIAHPDDEAMFFAPTVLGLARLRHWVYLLCFSAGNYYNQGETRKKELLQSCDVLGIPLSSVMIIDNRDFPDDPGMQWDTEHVARVLLQHIEVNGINLVVTFDAGGVSGHSNHIALYAAVRALHSEGKLPKGCSVLTLQSVNVLRKYISLLDLPLSLLHTQDVLFVLNSKEVAQAKKAMSCHRSQLLWFRRLYIIFSRYMRINSLSFL

SEQ ID NO: 57609 - protein, 244 aa, Homo sapiens
MEAMWLLCVALAVLAWGFLWVWDSSERMKSREQGGRLGAESRTLLVIAHPDDEAMFFAPTVLGLARLRHWVYLLCFSAGNYYNQGETRKKELLQSCDVLGIPLSSVMIIDNRDFPDDPGMQWDTEHVARVLLQHIEVNGINLVVTFDAGGVSGHSNHIALYAAVRVLCAHASVCECAAQVHLPSGSALVSASYAGCPLRAQQQRSGTGQESHVLPPQPAPLVPPPLHYLLPVHENQLTELPLKP

SEQ ID NO: 57610 - protein, 423 aa, Homo sapiens [sequence omitted]

SEQ ID NO: 57611 - protein, 931 aa, Homo sapiens
MLLFFTLGLLIHFVFFASIFDIYFTSPLVHGMTPQFTPLPPPARRLVLFVADGLRADALYELDENGNSRAPFIRNIIMHEGSWGISHTRVPTESRPGHVALIAGFYEDVSAVAKGWKENPVEFDSLFNESKYTWSWGSPDILPMFAKGASGDHVYTYSYDAKREDFGAQDATKLDTWVFDNVKDFFHHARNNQSLFSKINEEKIVFFLHLLGIDTNGHAHRPSSRDYKHNIKKVDDGVKEIVSMFNHFYGNDGKTTFIFTSDHGMTDWGSHGAGHPSETLTPLVTWGAGIKYPQRVSAQQFDDAFLKEWRLENWKRLDVNQADIAPLMTSLIGVPFPLNSVGILPVDYLNNTDLFKAESMFTNAVQILEQFKVKMTQKKEVTLPFLFTPFKLLSDSKQFNILRKARSYIKHRKFDEVVSLCKELIHLALKGLSYYHTYDRFFLGVNVVIGFVGWISYASLLIIKSHSNLIKGVSKEVKKPSHLLPCSFVAIGILVAFFLLIQACPWTYYVYGLLPLPIWYAVLREFQVIQDLVVSVLTYPLSHFVGYLLAFTLGIEVLVLSFFYRYMLTAGLTAFAAWPFLTRLWTRAKMTSLSWTFFSLLLAVFPLMPVVGRKPDISLVMGAGLLVLLLSLCVVTSLMKRKDSFIKEELLVHLLQVLSTVLSMYVVYSTQSSLLRKQGLPLMNQIISWATLASSLVVPLLSSPVLFQRLFSILLSLMSTYLLLSTGYEALFPLVLSCLMFVWINIEQETLQQSGVCCKQKLTSIQFSYNTDITQFRQLYLDDIRRAFFLVFFLVTAFFGTGNIASINSFDLASVYCFLTVFSPFMMGALMMWKILIPFVLVMCAFEAVQLTTQLSSKSLFLIVLVISDIMALHFFFLVKDYGSWLDIGTSISHYVIVMSMTIFLVFLNGLAQLLTTKKLRLCGKPKSHFM

SEQ ID NO: 57612 - protein, 931 aa, Homo sapiens; identical to SEQ ID NO: 57611

SEQ ID NO: 57613 - protein, 134 aa, Homo sapiens
MVENSPSPLPERAIYGFVLFLSSQFGFILYLVWAFIPESWLNSLGLTYWPQKYWAVALPVYLLIAIVIGYVLLFGINMMSTSPLDSIHTITDNYAKNQQQKKYQEEAIPALRDISISEVNQMFFLAAKELYTKN

SEQ ID NO: 57614 - protein, 108 aa, Homo sapiens
MVLYLVWAFIPESWLNSLGLTYWPQKYWAVALPVYLLIAIVIGYVLLFGINMMSTSPLDSIHTITDNYAKNQQQKKYQEEAIPALRDISISEVNQMFFLAAKELYTKN

SEQ ID NO: 57615 - protein, 134 aa, Homo sapiens; identical to SEQ ID NO: 57613

SEQ ID NO: 57616 - protein, 134 aa, Homo sapiens; identical to SEQ ID NO: 57613

SEQ ID NO: 57617 - protein, 25 aa, Homo sapiens
MVLYLVWAFIPESWLNSLGLTYWPQ

SEQ ID NO: 57618 - protein, 158 aa, Homo sapiens
MVPRSTSLALIVFLFHRLSKAPGKMVENSPSPLPERAIYGFVLFLSSQFGFILYLVWAFIPESWLNSLGLTYWPQKYWAVALPVYLLIAIVIGYVLLFGINMMSTSPLDSIHTITDNYAKNQQQKKYQEEAIPALRDISISEVNQMFFLAAKELYTKN

SEQ ID NO: 57619 - protein, 435 aa, Homo sapiens
MAAPLVLVLVVAVTVRAALFRSSLAEFISERVEVVSPLSSWKRVVEGLSLLDLGVSPYSGAVFHETPLIIYLFHFLIDYAELVFMITDALTAIALYFAIQDFNKVVFKKQKLLLELDQYAPDVAELIRTPMEMRYIPLKVALFYLLNPYTILSCVAKSTCAINNTLIAFFILTTIKGSAFLSAIFLALATYQSLYPLTLFVPGLLYLLQRQYIPVKMKSKAFWIFSWEYAMMYVGSLVVIICLSFFLLSSWDFIPAVYGFILSVPDLTPNIGLFWYFFAEMFEHFSLFFVCVFQINVFFYTIPLAIKLKEHPIFFMFIQIAVIAIFKSYPTVGDVALYMAFFPVWNHLYRFLRNIFVLTCIIIVCSLLFPVLWHLWIYAGSANSNFFYAITLTFNVGQILLISDYFYAFLRREYYLTHGLYLTAKDGTEAMLVLK

SEQ ID NO: 57620 - protein, 415 aa, Homo sapiens
MAAPLVLVLVVAVTVRAALFRSSLAEFISERVEVVSPLSSWKRVVEGLSLLDLGVSPYSGAVFHEITDALTAIALYFAIQDFNKVVFKKQKLLLELDQYAPDVAELIRTPMEMRYIPLKVALFYLLNPYTILSCVAKSTCAINNTLIAFFILTTIKGSAFLSAIFLALATYQSLYPLTLFVPGLLYLLQRQYIPVKMKSKAFWIFSWEYAMMYVGSLVVIICLSFFLLSSWDFIPAVYGFILSVPDLTPNIGLFWYFFAEMFEHFSLFFVCVFQINVFFYTIPLAIKLKEHPIFFMFIQIAVIAIFKSYPTVGDVALYMAFFPVWNHLYRFLRNIFVLTCIIIVCSLLFPVLWHLWIYAGSANSNFFYAITLTFNVGQILLISDYFYAFLRREYYLTHGLYLTAKDGTEAMLVLK

SEQ ID NO: 57621 - protein, 170 aa, Homo sapiens [sequence omitted]

SEQ ID NO: 57622 - protein, 423 aa, Homo sapiens
MAAPLVLVLVVAVTVRAALFRSSLAEFISERVEVVSPLSSWKRVVEGLSLLDLGVSPYSGAVFHETPLIIYLFHFLIDYAELVFMITDALTAIALYFAIQDFNKVVFKKQKLLLELDQYAPDVAELIRTPMEMRYIPLKVALFYLLNPYTILSCVAKSTCAINNTLIAFFILTTIKGSAFLSAIFLALATYQSLYPLTLFVPGLLYLLQRQYIPVKMKSKAFWIFSWEYAMMYVGSLVVIICLSFFLLSSWDFIPAVYGFILSVPDLTPNIGLFWYFFAEMFEHFSLFFVCVFQINVFFYTIPLAIKLKEHPIFFMFIQIAVIAIFKSYPTVGDVALYMAFFPVWNHLYRFLRNIFVLTCIIIVCSLLFPVLWHLWIYAGSANSNFFYAITLTFNVGQMGFCGDRMAGTCPEAIRAAGDRTPS

SEQ ID NO: 57623 - protein, 493 aa, Homo sapiens
MWPQDPSRKEVLRFAVSCRILTLMLQALFNAIIPDHHAEAFSPPRLAPSGFVDQLVEGLLGGLSHWDAEHFLFIAEHGYLYEHNFAFFPGFPLALLVGTELLRPLRGLLSLRSCLLISVASLNFLFFMLAAVALHDLGCLVLHCPHQSFYAALLFCLSPANVFLAAGYSEALFALLTFSAMGQLERGRVWTSVLLFAFATGVRSNGLVSVGFLMHSQCQGFFSSLTMLNPLRQLFKLMASLFLSVFTLGLPFALFQYYAYTQFCLPGSARPIPEPLVQLAVDKGYRIAEGNEPPWCFWDVPLIYSYIQDVYWNVGFLKYYELKQVPNFLLAAPVAILVAWATWTYVTTHPWLCLTLGLQRSKNNKTLEKPDLGFLSPQVFVYVVHAAVLLLFGGLCMHVQVLTRFLGSSTPIMYWFPAHLLQDQEPLLRSLKTVPWKPLAEDSPPGQKVPRNPIMGLLYHWKTCSPVTRYILGYFLTYWLLGLLLHCNFLPWT

SEQ ID NO: 57624 - protein, 493 aa, Homo sapiens; identical to SEQ ID NO: 57623

SEQ ID NO: 57625 - protein, 72 aa, Homo sapiens
MWPQDPSRKEVLRFAVSCRILTLMLQALFNAIIPDHHAEAFSPPRLAPSGFVDQLVEGLLGGLSHWDAEHFL

SEQ ID NO: 57626 - protein, 121 aa, Homo sapiens
MWPQDPSRKEVLRFAVSCRILTLMLQALFNAIIPDHHAEAFSPPRLAPSGFVDQLVEGLLGGLSHWDAEHFLFIAEHGYLYEHNFAFFPGFPLALLVGTELLRPLRGLLSLRSCLLISVAS

SEQ ID NO: 57627 - protein, 265 aa, Homo sapiens
MPSSQITMQKPSLLLAWPPQALWTNSWKYYAYTQFCLPGSARPIPEPLVQLAVDKGYRIAEGNEPPWCFWDVPLIYSYIQDVYWNVGFLKYYELKQVPNFLLAAPVAILVAWATWTYVTTHPWLCLTLGLQRSKNNKTLEKPDLGFLSPQVFVYVVHAAVLLLFGGLCMHVQVLTRFLGSSTPIMYWFPAHLLQDQEPLLRSLKTVPWKPLAEDSPPGQKVPRNPIMGLLYHWKTCSPVTRYILGYFLTYWLLGLLLHCNFLPWT

SEQ ID NO: 57628 - protein, 182 aa, Homo sapiens
MWPQDPSRKEVLRFAVSCRILTLMLQALFNAIIPDHHAEAFSPPRLAPSGFVDQLVEGLLGGLSHWDAEHFLFIAEHGYLYEHNFAFFPGFPLALLVGTELLRPLRGLLSLRSCLLISVASLNFLFFMLAAVALHDLGCLVLHCPHQSFYAALLFCLSPANVFLAAGYSEALFALLTFSAMG

SEQ ID NO: 57629 - protein, 504 aa, Homo sapiens
MSEKQMKEAFVSNLNGTTVLEITQGLCFPAFCILCRGFLIIFSQYLCSFSPTWKTRFLTDFVVLIVPMVATLTIWASFILLELLGVIIFGAGLLYQIYRRRTCYARLPFLKILEKFLNISLESEYNPAISCFRVITSAFTAIAILAVDFPLFPRRFAKTELYGTGAMDFGVGGFVFGSAMVCLEVRRRKYMEGSKLHYFTNSLYSVWPLVFLGIGRLAIIKSIGYQEHLTEYGVHWNFFFTIIVVKLITPLLLIIFPLNKSWIIALGITVLYQLALDFTSLKRLILYGTDGSGTRVGLLNANREGIISTLGYVAIHMAGVQTGLYMHKNRSHIKDLIKVACFLLLAAISLFISLYVVQVNVEAVSRRMANLAFCIWIVASSLILLSSLLLGDIILSFAKFLIKGALVPCSWKLIQSPVTNKKHSESLVPEAERMEPSLCLITALNRKQLIFFLLSNITTGLINLMVDTLHSSTLWALFVVNLYMFSNCLIVYVLYLQDKTVQFW

SEQ ID NO: 57630 - protein, 105 aa, Homo sapiens
MSEKQMKEAFVSNLNGTTVLEITQGLCFPAFCILCRGFLIIFSQYLCSFSPTWKTRFLTDFVVLIVPMVATLTIWASFILLELLGVIIFGAGLLYQIYRRRTCYA

SEQ ID NO: 57631 - protein, 276 aa, Homo sapiens
LAARVAAVRAAAWLLLGAATGLTRGPAAAFTAARSDAGIRAMCSEIILRQEVLKDGFHRDLLIKVKFGESIEDLHTCRLLIKQDIPAGLYVDPYELASLRERNITEAVMVSENFDIEAPNYLSKESEVLIYARRDSQCIDCFQAFLPVHCRYHRPHSEDGEASIVVNNPDLLMFCDQAGSRRMIRFRFDSFDKTIEFPILKCWAHSEVAAPCALENEDICQWNKMKYKSVYKNVILQVPVGLTVHTSLVCSVTLLITILCSTLILVAVFKYGHFSL

SEQ ID NO: 57632 - protein, 217 aa, Homo sapiens
MCSEIILRQEVLKDGFHRDLLIKVKFGESIEDLHTCRLLIKQDIPAGLYVDPYELASLRERNITEAVMVSENFDIEAPNYLSKESEVLIYARRDSQCIDCFQAFLPVHCRYHRPHSEDGEASIVVNNPDLLMFCDQEFPILKCWAHSEVAAPCALENEDICQWNKMKYKSVYKNVILQVPVGLTVHTSLVCSVTLLITILCSTLILVAVFKYGHFSL

SEQ ID NO: 57633 - protein, 258 aa, Homo sapiens
LAARVAAVRAAAWLLLGAATGLTRGPAAAFTAARSDAGIRAMCSEIILRQEVLKDGFHRDLLIKVKFGESIEDLHTCRLLIKQDIPAGLYVDPYELASLRERNITEAVMVSENFDIEAPNYLSKESEVLIYARRDSQCIDCFQAFLPVHCRYHRPHSEDGEASIVVNNPDLLMFCDQEFPILKCWAHSEVAAPCALENEDICQWNKMKYKSVYKNVILQVPVGLTVHTSLVCSVTLLITILCSTLILVAVFKYGHFSL

SEQ ID NO: 57634 - protein, 168 aa, Homo sapiens
MVSENFDIEAPNYLSKESEVLIYARRDSQCIDCFQAFLPVHCRYHRPHSEDGEASIVVNNPDLLMFCDQAGSRRMIRFRFDSFDKTIEFPILKCWAHSEVAAPCALENEDICQWNKMKYKSVYKNVILQVPVGLTVHTSLVCSVTLLITILCSTLILVAVFKYGHFSL

SEQ ID NO: 57635 - protein, 579 aa, Homo sapiens
MQICGSSVASVAAGTSFQVLGPVCWQQLDLKMAVRVLWGGLSLLRVLWCLLPQTGYVHPDEFFQSPEVMAEDILGVQAARPWEFYPSSSCRSVLFPLLISGSTFWLLRLWEELGPWPGLVSGYALLVGPRLLLTALSFALDGAVYHLAPPMGADRWNALALLSGSYVTLVFYTRTFSNTIEGLLFTWLLVLVSSHVTWGPTRKEPAPGPRWRSWLLGGIVAAGFFNRPTFLAFAVVPLYLWGTRGATNPGLKSLTREALVLLPGAALTAAVFVATDSWYFSSPATSRNLVLTPVNFLHYNLNPQNLARHGTHARLTHLAVNGFLLFGVLHAQALQAAWQRLQVGLQASAQMGLLRALGARSLLSSPRSYLLLLYFMPLALLSAFSHQEARFLIPLLVPLVLLCSPQTQPVPWKGTVVLFNALGALLFGCLHQGGLVPGLEYLEQVVHAPVLPSTPTHYTLLFTHTYMPPRHLLHLPGLGAPVEVVDMGGTEDWALCQTLKSFTRQPACQVAGGPWLCRLFVVTPGTTRRAVEKCSFPFKNETLLFPHLTLEDPPALSSLLSGAWRDHLSLHIVELGEET

SEQ ID NO: 57636 - protein, 270 aa, Homo sapiens
MVLLKEYRVILPVSVDEYQVGQLYSVAEASKNETGGGEGVEVLVNEPYEKDGEKGQYTHKIYHLQSKVPTFVRMLAPEGALNIHEKAWNAYPYCRTVITNEYMKEDFLIKIETWHKPDLGTQENVHKLEPEAWKHVEAVYIDIADRSQVLSKDYKAEEDPAKFKSIKTGRGPLGPNWKQELVNQKDCPYMCAYKLVTVKFKWWGLQNKVENFIHKQERRLFTNFHRQLFCWLDKWVDLTMDDIRRMEEETKRQLDEMRQKDPVKGMTADD

SEQ ID NO: 57637 - protein, 270 aa, Homo sapiens [sequence omitted]

SEQ ID NO: 57638 - protein, 197 aa, Homo sapiens
MLAPEGALNIHEKAWNAYPYCRTVLPNEYMKEDFLIKIETWHKPDLGTQENVHKLEPEAWKHVEAVYIDIADRSQVLSKDYKAEEDPAKFKSIKTGRGPLGPNWKQELVNQKDCPYMCAYKLVTVKFKWWGLQNKVENFIHKQERRLFTNFHRQLFCWLDKWVDLTMDDIRRMEEETKRQLDEMRQKDPVKGMTADD

SEQ ID NO: 57639 - protein, 272 aa, Homo sapiens
MVLIKEFRVVLPCSVQEYQVGQLYSVAEASKNETGGGEGIEVLKNEPYEKDGEKGQYTHKIYHLKSKVPAFVRMIAPEGSLVFHEKAWNAYPYCRTIVTNEYMKDDFFIKIETWHKPDLGTLENVHGLDPNTWKTVEIVHIDIADRSQVEPADYKADEDPALFQSVKTKRGPLGPNWKKELANSPDCPQMCAYKLVTIKFKWWGLQSKVENFIQKQEKRIFTNFHRQLFCWIDKWIDLTMEDIRRMEDETQKELETLRNQGQVRGTSAASDE

SEQ ID NO: 57640 - protein, 271 aa, Homo sapiens
MVLIKEFRVVLPCSVQEYQVGQLYSVAEASKNETGGGEGIEVLKNEPYEKDGEKGQYTHKIYHLKSKVPAFVRMIAPEGSLVFHEKAWNAYPYCRTIVTNEYMKDDFFIKIETWHKPDLGTLENVHGLDPNTWKTVEIVHIDIADRSQVEPADYKADEDPALFQSVKTKRGPLGPNWKKELANSPDCPQMCAYKLVTIKFKWWGLQSKVENFIQKQEKRIFTNFHRQLFCWIDKWIDLTMEDIRRMEDETQKELETMRKRGSVRGTSAADV

SEQ ID NO: 57641 - protein, 120 aa, Homo sapiens
MIAPEGSLVFHEKAWNAYPYCRTIVTNEYMKDDFFIKIETWHKPDLGTLENVHGLDPNTWKTVEIVHIDIADRSQVEPADYKADEDPALFQSVKTKRGPLGPNWKKELANSPDCPQMCAY

SEQ ID NO: 57642 - protein, 168 aa, Homo sapiens
MGDLLMEKCRVVLPCSVQEYQVGQLYSVAEASKNETGGGEGIEVLKNEPYEKDGEKGQYTHKIYHLKSKVPAFVRMIAPEGSLVFHEKAWNAYPYCRTIVTNEYMKDDFFIKIETWHKPDLGTLENVHGLDPNTWKTVEIVHIDIADRSQVEPADYKADEDPALFQSV

SEQ ID NO: 57643 - protein, 273 aa, Homo sapiens
MGDLLMEKCRVVLPCSVQEYQVGQLYSVAEASKNETGGGEGIEVLKNEPYEKDGEKGQYTHKIYHLKSKVPAFVRMIAPEGSLVFHEKAWNAYPYCRTIVTNEYMKDDFFIKIETWHKPDLGTLENVHGLDPNTWKTVEIVHIDIADRSQVEPADYKADEDPALFQSVKTKRGPLGPNWKKELANSPDCPQMCAYKLVTIKFKWWGLQSKVENFIQKQEKRIFTNFHRQLFCWIDKWIDLTMEDIRRMEDETQKELETMRKRGSVRGTSAADV

SEQ ID NO: 57644 - protein, 1659 aa, Homo sapiens
MEAPSGSEPGGDGAGDCAHPDPRAPGAAAPSSGPGPCAAARESERQLRLRLCVLNEILGTERDYVGTLRFLQSAFLHRIRQNVADSVEKGLTEENVKVLFSNIEDILEVHKDFLAALEYCLHPEPQSQHELGNVFLKFKDKFCVYEEYCSNHEKALRLLVELNKIPTVRAFLLSCMLLGGRKTTDIPLEGYLLSPIQRICKYPLLLKELAKRTPGKHPDHPAVQSALQAMKTVCSNINETKRQMEKLEALEQLQSHIEGWEGSNLTDICTQLLLQGTLLKISAGNIQERAFFLFDNLLVYCKRKSRVTGSKKSTKRTKSINGSLYIFRGRINTEVMEVENVEDGTADYHSNGYTVTNGWKIHNTAKNKWFVCMAKTAEEKQKWLDAIIREREQRESLKLGMERDAYVMIAEKGEKLYHMMMNKKVNLIKDRRRKLSTVPKCFLGNEFVAWLLEIGEISKTEEGVNLGQALLENGIIHHVSDKHQFKNEQVMYRFRYDDGTYKARSELEDIMSKGVRLYCRLHSLYTPVIKDRDYHLKTYKSVLPGSKLVDWLLAQGDCQTREEAVALGVGLCNNGFMHHVLEKSEFRDESQYFRFHADEEMEGTSSKNKQLRNDFKLVENILAKRLLILPQEEDYGFDIEEKNKAVVVKSVQRGSLAEVAGLQVGRKIYSINEDLVFLRPFSEVESILNQSFCSRRPLRLLVATKAKEIIKIPDQPDTLCFQIRGAAPPYVYAVGRGSEAMAAGLCAGQCILKVNGSNVMNDGAPEVLEHFQAFRSRREEALGLYQWIYHTHEDAQEARASQEASTEDPSGEQAQEEDQADSAFPLLSLGPRLSLCEDSPMVTLTVDNVHLEHGVVYEYVSTAGVRCHVLEKIVEPRGCFGLTAKILEAFAANDSVFVENCRRLMALSSAIVTMPHFEFRNICDTKLESIGQRIACYQEFAAQLKSRVSPPFKQAPLEPHPLCGLDFCPTNCHINLMEVSYPKTTPSVGRSFSIRFGRKPSLIGLDPEQGHLNPMSYTQHCITTMAAPSWKCLPAAEGDPQGQGLHDGSFGPASGTLGQEDRGLSFLLKQEDREIQDAYLQLFTKLDVALKEMKQYVTQINRLLSTITEPTSGGSCDASLAEEASSLPLVSEESEMDRSDHGGIKKVCFKVAEEDQEDSGHDTMSYRDSYSECNSNRDSVLSYTSVRSNSSYLGSDEMGSGDELPCDMRIPSDKQDKLHGCLEHLFNQVDSINALLKGPVMSRAFEETKHFPMNHSLQEFKQKEECTIRGRSLIQISIQEDPWNLPNSIKTLVDNIQRYVEDGKNQLLLALLKCTDTELQLRRDAIFCQALVAAVCTFSKQLLAALGYRYNNNGEYEESSRDASRKWLEQVAATGVLLHCQSLLSPATVKEERTMLEDIWVTLSELDNVTFSFKQLDENYVANTNVFYHIEGSRQALKVIFYLDSYHFSKLPSRLEGGASLRLHTALFTKVLENVEGLPSPGSQAAEDLQQDINAQSLEKVQQYYRKLRAFYLERSNLPTDASTTAVKIDQLIRPINALDELCRLMKSFVHPKPGAAGSVGAGLIPISSELCYRLGACQMVMCGTGMQRSTLSVSLEQAAILARSHGLLPKCIMQATDIMRKQGPRVEILAKNLRVKDQMPQGAPRLYRLCQPPVDGDL

SEQ ID NO: 57645 - protein, 1561 aa, Homo sapiens
MEAPSGSEPGGDGAGDCAHPDPRAPGAAAPSSGPGPCAAARESERQLRLRLCVLNEILGTERDYVGTLRFLQSAFLHRIRQNVADSVEKGLTEENVKVLFSNIEDILEVHKDFLAALEYCLHPEPQSQHELGNVFLKFKDKFCVYEEYCSNHEKALRLLVELNKIPTVRAFLLSCMLLGGRKTTDIPLEGYLLSPIQRICKYPLLLKELAKRTPGKHPDHPAVQSALQAMKTVCSNINETKRQMEKLEALEQLQSHIEGWEGSNLTDICTQLLLQGTLLKISAGNIQERAFFLFDNLLVYCKRKSRVTGSKKSTKRTKSINGSLYIFRGRINTEVMEVENVEDGTADYHSNGYTVTNGWKIHNTAKNKWFVCMAKTAEEKQKWLDAIIREREQRESLKLGMERDAYVMIAEKGEKLYHMMMNKKVNLIKDRRRKLSTVPKCFLGNEFVAWLLEIGEISKTEEGVNLGQALLENGIIHHVSDKHQFKNEQVMYRFRYDDGTYKARSELEDIMSKGVRLYCRLHSLYTPVIKDRDYHLKTYKSVLPGSKLVDWLLAQGDCQTREEAVALGVGLCNNGFMHHVLEKSEFRDESQYFRFHADEEMEGTSSKNKQLRNDFKLVENILAKRLLILPQEEDYGFDIEEKNKAVVVKSVQRGSLAEVAGLQVGRKIYSINEDLVFLRPFSEVESILNQSFCSRRPLRLLVATKAKEIIKIPDQPDTLCFQIRGAAPPYVYAVGRGSEAMAAGLCAGQCILKVNGSNVMNDGAPEVLEHFQAFRSRREEALGLYQWIYHTHEDAQEARASQEASTEDPSGEQAQEEDQADSAFPLLSLGPRLSLCEDSPMVTLTVDNVHLEHGVVYEYVSTAGVRCHVLEKIVEPRGCFGLTAKILEAFAANDSVFVENCRRLMALSSAIVTMPHFEFRNICDTKLESIGQRIACYQEFAAQLKSRVSPPFKQAPLEPHPLCGLDFCPTNCHINLMEVSYPKTTPSVGRSFSIRFGRKPSLIGLDPEQGHLNPMSYTQHCITTMAAPSWKCLPAAEGDPQGQGLHDGSFGPASGTLGQEDRGLSFLLKQEDREIQDAYLQLFTKLDVALKEMKQYVTQINRLLSTITEPTSGGSCDASLAEEASSLPLVSEESEMDRSDHGGIKKVCFKVAEEDQEDSGHDTMSYRDSYSECNSNRDSVLSYTSVRSNSSYLGSDEMGSGDELPCDMRIPSDKQDKLHGCLEHLFNQVDSINALLKGPVMSRAFEETKHFPMNHSLQEFKQKEECTIRGRSLIQISIQEDPWNLPNSIKTLVDNIQRYVEDGKNQLLLALLKCTDTELQLRRDAIFCQALVAAVCTFSKQLLAALGYRYNNNGEYEESSRDASRKWLEQVAATGVLLHCQSLLSPATVKEERTMLEDIWVTLSELDNVTFSFKQLDENYVANTNVFYHIEGSRQALKVIFYLDSYHFSKLPSRLEGGASLRLHTALFTKGELQAWGREDHGGRAKATKHTGSQPPARPRHLPSQCWRTWRGCLLQAARPRRICSRTSTRSPWRKFSSITANSGHFTWSGLTCPRMPAPRR

SEQ ID NO: 57646 - protein, 1606 aa, Homo sapiens
MSEDSRGDSRAESAKDLEKQLRLRVCVLSELQKTERDYVGTLEFLVSAFLHRMNQCAASKVDKNVTEETVKMLFSNIEDILAVHKEFLKVVEECLHPEPNAQQEVGTCFLHFKDKFRIYDEYCSNHEKAQKLLLELNKIRTIRTFLLNCMLLGGRKNTDVPLEGYLVTPIQRICKYPLILKELLKRTPRKHSDYAAVMEALQAMKAVCSNINEAKRQMEKLEVLEEWQSHIEGWEGSNITDTCTEMLMCGVLLKISSGNIQERVFFLFDNLLVYCKRKHRRLKNSKASTDGHRYLFRGRINTEVMEVENVDDGTADFHSSGHIVVNGWKIHNTAKNKWFVCMAKTPEEKHEWFEAILKERERRKGLKLGMEQDTWVMISEQGEKLYKMMCRQGNLIKDRKRKLTTFPKCFLGSEFVSWLLEIGEIHRPEEGVHLGQALLENGIIHHVTDKHQFKPEQMLYRFRYDDGTFYPRNEMQDVISKGVRLYCRLHSLFTPVIRDKDYHLRTYKSVVMANKLIDWLIAQGDCRTREEAMIFGVGLCDNGFMHHVLEKSEFKDEPLLFRFFSDEEMEGSNMKHRLMKHDLKVVENVIAKSLLIKSNEGSYGFGLEDKNKVPIIKLVEKGSNAEMAGMEVGKKIFAINGDLVFMRPFNEVDCFLKSCLNSRKPLRVLVSTKPRETVKIPDSADGLGFQIRGFGPSVVHAVGRGTVAAAAGLHPGQCIIKVNGINVSKETHASVIAHVTACRKYRRPTKQDSIQWVYNSIESAQEDLQKSHSKPPGDEAGDAFDCKVEEVIDKFNTMAIIDGKKEHVSLTVDNVHLEYGVVYEYDSTAGIKCNVVEKMIEPKGFFSLTAKILEALAKSDEHFVQNCTSLNSLNEVIPTDLQSKFSALCSERIEHLCQRISSYKKFSRVLKNRAWPTFKQAKSKISPLHSSDFCPTNCHVNVMEVSYPKTSTSLGSAFGVQLDSRKHNSHDKENKSSEQGKLSPMVYIQHTITTMAAPSGLSLGQQDGHGLRYLLKEEDLETQDIYQKLLGKLQTALKEVEMCVCQIDDLLSSITYSPKLERKTSEGIIPTDSDNEKGERNSKRVCFNVAGDEQEDSGHDTISNRDSYSDCNSNRNSIASFTSICSSQCSSYFHSDEMDSGDELPLSVRISHDKQDKIHSCLEHLFSQVDSITNLLKGQAVVRAFDQTKYLTPGRGLQEFQQEMEPKLSCPKRLRLHIKQDPWNLPSSVRTLAQNIRKFVEEVKCRLLLALLEYSDSETQLRRDMVFCQTLVATVCAFSEQLMAALNQMFDNSKENEMETWEASRRWLDQIANAGVLFHFQSLLSPNLTDEQAMLEDTLVALFDLEKVSFYFKPSEEEPLVANVPLTYQAEGSRQALKVYFYIDSYHFEQLPQRLKNGGGFKIHPVLFAQALESMEGYYYRDNVSVEEFQAQINAASLEKVKQYNQKLRAFYLDKSNSPPNSTSKAAYVDKLMRPLNALDELYRLVASFIRSKRTAACANTACSASGVGLLSVSSELCNRLGACHIIMCSSGVHRCTLSVTLEQAIILARSHGLPPRYIMQATDVMRKQGARVQNTAKNLGVRDRTPQSAPRLYKLCEPPPPAGEE

SEQ ID NO: 57647 - protein, 1174 aa, Homo sapiens
MSEDSRGDSRAESAKDLEKQLRLRVCVLSELQKTERDYVGTLEFLVSAFLHRMNQCAASKVDKNVTEETVKMLFSNIEDILAVHKEFLKVVEECLHPEPNAQQEVGTCFLHFKDKFRIYDEYCSNHEKAQKLLLELNKIRTIRTFLLNCMLLGGRKNTDVPLEGYLVTPIQRICKYPLILKELLKRTPRKHSDYAAVMEALQAMKAVCSNINEAKRQMEKLEVLEEWQSHIEGWEGSNITDTCTEMLMCGVLLKISSGNIQERVFFLFDNLLVYCKRKHRRLKNSKASTDGHRYLFRGRINTEVMEVENVDDGTADFHSSGHIVVNGWKIHNTAKNKWFVCMAKTPEEKHEWFEAILKERERRKGLKLGMEQDTWVMISEQGEKLYKMMCRQGNLIKDRKRKLTTFPKCFLGSEFVSWLLEIGEIHRPEEGVHLGQALLENGIIHHVTDKHQFKPEQMLYRFRYDDGTFYPRNEMQDVISKGVRLYCRLHSLFTPVIRDKDYHLRTYKSVVMANKLIDWLIAQGDCRTREEAMIFGVGLCDNGFMHHVLEKSEFKDEPLLFRFFSDEEMEGSNMKHRLMKHDLKVVENVIAKSLLIKSNEGSYGFGLEDKNKVPIIKLVEKGSNAEMAGMEVGKKIFAINGDLVFMRPFNEVDCFLKSCLNSRKPLRVLVSTKPRETVKIPDSADGLGFQIRGFGPSVVHAVGRGTVAAAAGLHPGQCIIKVNGINVSKETHASVIAHVTACRKYRRPTKQDSIQWVYNSIESAQEDLQKSHSKPPGDEAGDAFDCKVEEVIDKFNTMAIIDGKKEHVSLTVDNVHLEYGVVYEYDSTAGIKCNVVEKMIEPKGFFSLTAKILEALAKSDEHFVQNCTSLNSLNEVIPTDLQSKFSALCSERIEHLCQRISSYKKVSVLLILYTIIVEMYHFTEMITLYNILELVRPPNSEFFFSFLPTKRMKTLNQKKVTHMKKTNIQLQFSRVLKNRAWPTFKQAKSKISPLHSSDFCPTNCHVNVMEVSYPKTSTSLGSAFGVQWKLSPMVYIQHTITTMAAPSGLSLGQQDGHGLRYLLERKTSEGIIPTDSDNEKGERNSKRVCFNVAGDEQEDSGHDTISNRDSYSFSDCNSNRNSIASFTSICSSQCSSYFHSDEMDSGSDELPLSVRISHDKQDKIHSCLEHLFSQ

SEQ ID NO: 57648 - protein, 549 aa, Homo sapiens
MASASSGPSSSVGFSSFDPAVPSCTLSSASGIKRPMASEVPYASGMPIKKIGHRSVDSSGETTYKKTTSSALKGAIQLGITHTVGSLSTKPERDVLMQDFYVVESIFFPSEGSNLTPAHHYNDFRFKTYAPVAFRYFRELFGIRPDDYLYSLCSEPLIELCSSGASGSLFYVSSDDEFIIKTVQHKEAEFLQKLLPGYYMNLNQNPRTLLPKFYGLYCVQAGGKNIRIVVMNNLLPRSVKMHIKYDLKGSTYKRRASQKEREKPLPTFKDLDFLQDIPDGLFLDADMYNALCKTLQRDCLVLQSFKIMDYSLLMSIHNIDHAQREPLSSETQYSVDTRRPAPQKALYSTAMESIQGEARRGGTMETDDHMGGIPARNSKGERLLLYIGIIDILQSYRFVKKLEHSWKALVHDGDTVSVHRPGFYAERFQRFMCNTVFKKIPLKPSPSKKFRSGSSFSRRAGSSGNSCITYQPSVSGEHKAQVTTKAEVEPGVHLGRPDVLPQTPPLEEISEGSPIPDPSFSPLVGETLQMLTTSTTLEKLEVAESEFTH

SEQ ID NO: 57649 - protein, 562 aa, Homo sapiens
MASASSGPSSSVGFSSFDPAVPSCTLSSAASGIKRPMASEVLEARQDSYISLVPYASGMPIKKIGHRSVDSSGETTYKKTTSSALKGAIQLGITHTVGSLSTKPERDVLMQDFYVVESIFFPSEGSNLTPAHHYNDFRFKTYAPVAFRYFRELFGIRPDDYLYSLCSEPLIELCSSGASGSLFYVSSDDEFIIKTVQHKEAEFLQKLLPGYYMNLNQNPRTLLPKFYGLYCVQAGGKNIRIVVMNNLLPRSVKMHIKYDLKGSTYKRRASQKEREKPLPTFKDLDFLQDIPDGLFLDADMYNALCKTLQRDCLVLQSFKIMDYSLLMSIHNIDHAQREPLSSETQYSVDTRRPAPQKALYSTAMESIQGEARRGGTMETDDHMGGIPARNSKGERLLLYIGIIDILQSYRFVKKLEHSWKALVHDGDTVSVHRPGFYAERFQRFMCNTVFKKIPLKPSPSKKFRSGSSFSRRAGSSGNSCITYQPSVSGEHKAQVTTKAEVEPGVHLGRPDVLPQTPPLEEISEGSPIPDPSFSPLVGETLQMLTTSTTLEKLEVAESEFTH

SEQ ID NO: 57650 - protein, 500 aa, Homo sapiens
MASASSGPSSSVGFSSFDPAVPSCTLSSASGIKRPMASEVPYASGMPIKKIGHRSVDSSGETTYKKTTSSALKGAIQLGITHTVGSLSTKPERDVLMQDFYVVESIFFPSEGSNLTPAHHYNDFRFKTYAPVAFRYFRELFGIRPDDYLYSLCSEPLIELCSSGASGSLFYVSSDDEFIIKTVQHKEAEFLQKLLPGYYMNLNQNPRTLLPKFYGLYCVQAGGKNIRIVVMNNLLPRSVKMHIKYDLKGSTYKRRASQKEREKPLPTFKDLDFLQDIPDGLFLDADMYNALCKTLQRDCLVLQSFKIMDYSLLMSIHNIDHAQREPLSSETQYSVDTRRPAPQKALYSTAMESIQGEARRGGTMETDDHMGGIPARNSKGERLLLYIGIIDILQSYRFVKKLEHSWKALVHDGDTVSVHRPGFYAERFQRFMCNTVFKKIPCVHLGRPDVLPQTPPLEEISEGSPIPDPSFSPLVGETLQMLTTSTTLEKLEVAESEFTH

SEQ ID NO: 57651 - protein, 550 aa, Homo sapiens
MASASSGPSSSVGFSSFDPAVPSCTLSSAASGIKRPMASEVPYASGMPIKKIGHRSVDSSGETTYKKTTSSALKGAIQLGITHTVGSLSTKPERDVLMQDFYVVESIFFPSEGSNLTPAHHYNDFRFKTYAPVAFRYFRELFGIRPDDYLYSLCSEPLIELCSSGASGSLFYVSSDDEFIIKTVQHKEAEFLQKLLPGYYMNLNQNPRTLLPKFYGLYCVQAGGKNIRIVVMNNLLPRSVKMHIKYDLKGSTYKRRASQKEREKPLPTFKDLDFLQDIPDGLFLDADMYNALCKTLQRDCLVLQSFKIMDYSLLMSIHNIDHAQREPLSSETQYSVDTRRPAPQKALYSTAMESIQGEARRGGTMETDDHMGGIPARNSKGERLLLYIGIIDILQSYRFVKKLEHSWKALVHDGDTVSVHRPGFYAERFQRFMCNTVFKKIPLKPSPSKKFRSGSSFSRRAGSSGNSCITYQPSVSGEHKAQVTTKAEVEPGVHLGRPDVLPQTPPLEEISEGSPIPDPSFSPLVGETLQMLTTSTTLEKLEVAESEFTH

SEQ ID NO: 57652 - protein, 198 aa, Homo sapiens
MYNALCKTLQRDCLVLQSFKIMDYSLLMSIHNIDHAQREPLSSETQYSVDTRRPAPQKALYSTAMESIQGEARRGGTMETDDHMGGIPARNSKGERLLLYIGIIDILQSYRFVKKLEHSWKALVHDGDTVSVHRPGFYAERFQRFMCNTVFKKIPLQPWKSLKLQSQSSPIKRKASEDLEQDSAISVIPRCQPLPQQC

SEQ ID NO: 57653 - protein, 86 aa, Homo sapiens
MASEVLEARQDSYISLVPYASGMPIKKIGHRSVDSSGETTYKKTTSSALKGAIQLGITHTVGSLSTKPERDVLMQDFYVVESIFFP

SEQ ID NO: 57654 - protein, 522 aa, Homo sapiens
MASASSGPSSSVGFSSFDPAVPSCTLSSAASGIKRPMASEVPYASGMPIKKIGHRSVDSSGETTYKKTTSSALKGAIQLGITHTVGSLSTKPERDVLMQDFYVVESIFFPSEGSNLTPAHHYNDFRFKTYAPVAFRYFRELFGIRPDDYLYSLCSEPLIELCSSGASGSLFYVSSDDEFIIKTVQHKEAEFLQKLLPGYYMNLNQNPRTLLPKFYGLYCVQAGGKNIRIVVMNNLLPRSVKMHIKYDLKGSTYKRRASQKEREKPLPTFKDLDFLQDIPDGLFLDADMYNALCKTLQRDCLVLQSFKIMDYSLLMSIHNIDHAQREPLSSETQYSVDTRRPAPQKALYSTAMESIQGEARRGGTMETDDQFVKKLEHSWKALVHDGDTVSVHRPGFYAERFQRFMCNTVFKKIPLKPSPSKKFRSGSSFSRRAGSSGNSCITYQPSVSGEHKAQVTTKAEVEPGVHLGRPDVLPQTPPLEEISEGSPIPDPSFSPLVGETLQMLTTSTTLEKLEVAESEFTH

SEQ ID NO: 57655 - protein, 540 aa, Homo sapiens
MSSAAENGEAAPGKQNEEKTYKKTASSAIKGAIQLGIGYTVGNLTSKPERDVLMQDFYVVESVFLPSEGSNLTPAHHYPDFRFKTYAPLAFRYFRELFGIKPDDYLYSICSEPLIELSNPGASGSLFFVTSDDEFIIKTVQHKEAEFLQKLLPGYYMNLNQNPRTLLPKFYGLYCMQSGGINIRIVVMNNVLPRSMRMHFTYDLKGSTYKRRASRKEREKSNPTFKDLDFLQDMHEGLYFDTETYNALMKTLQRDCRVLESFKIMDYSLLLGIHFLDHSLKEKEEETPQNVPDAKRTGMQKVLYSTAMESIQGPGKSGDGIITENPDTMGGIPAKSHRGEKLLLFMGIIDILQSYRLMKKLEHSWKALVYDGDTVSVHRPSFYADRFLKFMNSRVFKKIQALKASPSKKRCNSIAALKATSQEIVSSISQEWKDEKRDLLTEGQSFSSLDEEALGSRHRPDLVPSTPSLFEAASLATTISSSSLYVNEHYPHDRPTLYSNSKGLPSSSTFTLEEGTIYLTAEPNTLEVQDDNASVLDVYL

SEQ ID NO: 57656 - protein, 103 aa, Homo sapiens
MSSAAENGEAAPGKQNEEKTYKKTASSAIKGAIQLGIGYTVGNLTSKPERDVLMQDFYVVESVFLPSEGSNLTPAHHYPDFRFKTYAPLAFRYFRELFGIKPD

SEQ ID NO: 57657 - protein, 540 aa, Homo sapiens; identical to SEQ ID NO: 57655

SEQ ID NO: 57658 - protein, 449 aa, Homo sapiens
MQDFYVVESVFLPSEGSNLTPAHHYPDFRFKTYAPLAFRYFRELFGIKPDDYLYSICSEPLIELSNPGASGSLFFVTSDDEFIIKTVQHKEAEFLQKLLPGYYMNLNQNPRTLLPKFYGLYCMQSGGINIRIVVMNNVLPRSMRMHFTYDLKGSTYKRRASRKEREKSNPTFKDLDFLQDMHEGLYFDTETYNALMKTLQRDCRVLESFKIMDYSLLLGIHFLDHSLKEKEEETPQNVPDAKRTGMQKVLYSTAMESIQGPGKSGDGIITENPDTMGGIPAKSHRGEKLLLFMGIIDILQSYRLMKKLEHSWKALVYDGDTVSVHRPSFYADRFLKFMNSRVFKKIQALKASPSKKRCNSIAALKATSQEIVSSISQEWKDEKRDLLTEGQSFSSLDEEALGSRHRPDLVPSTPSLFEAASLATTISSSSLYVNEHYPHDRPTLYSNSK

SEQ ID NO: 57659 - protein, 162 aa, Homo sapiens
MSSAAENGEAAPGKQNEEKTYKKTASSAIKGAIQLGIGYTVGNLTSKPERDVLMQDFYVVESVFLPSEGSNLTPAHHYPDFRFKTYAPLAFRYFRELFGIKPDDYLYSICSEPLIELSNPGASGSLFFVTSDDEFIIKTVQHKEAEFLQKLLPGYYMNLNQN

SEQ ID NO: 57660 - protein, 157 aa, Homo sapiens
MSSAAENGEAAPGKQNEEKTYKKTASSAIKGAIQLGIGYTVGNLTSKPERDVLMQDFYVVESVFLPSEGSNLTPAHHYPDFRFKTYAPLAFRYFRELFGIKPDDYLYSICSEPLIELSNPGASGSLFFVTSDDEFIIKTVQHKEAEFLQKLLPGYYM

SEQ ID NO: 57661 - protein, 502 aa, Homo sapiens
MSSAAENGEAAPGKQNEEKTYKKTASSAIKGAIQLGIGYTVGNLTSKPERDVLMQDFYVVESVFLPSEGSNLTPAHHYPDFRFKTYAPLAFRYFRELFGIKPDDYLYSICSEPLIELSNPGASGSLFFVTSDDEFIIKTVQHKEAEFLQKLLPGYYMNLNQNPRTLLPKFYGLYCMQSGGINIRIVVMNNVLPRSMRMHFTYDLKGSTYKRRASRKEREKSNPTFKDLDFLQDMHEGLYFDTETYNALMKTLQRDCRVLESFKIMDYSLLLGIHFLDHSLKEKEEETPQNVPDAKRTGMQKVLYSTAMESIQGPGKSGDGIITENPDTMGGIPAKSHRGEKLLLFMGIIDILQSYRLMKKLEHSWKALVYDGDTVSVHRPSFYADRFLKFMNSRVFKKIQALKASPSKKRCNSIAALKATSQEIVSSISQEWKDEKRDLLTEGQSFSSLDEEALGSRHRPDLVPSTPSLFEAASLATTISSSSLYVNEHYPHDRPTLYSNSK

SEQ ID NO: 57662 - protein, 668 aa, Homo sapiens
MELEVPDEAESAEAGAVPSEAAWAAESGAAAGLAQKKAAPTEVLSMTAQPGPGHGKKLGHRGVDASGETTYKKTTSSTLKGAIQLGIGYTVGHLSSKPERDVLMQDFYVVESIFFPSEGSNLTPAHHFQDFRFKTYAPVAFRYFRELFGIRPDDYLYSLCNEPLIELSNPGASGSLFYVTSDDEFIIKTVMHKEAEFLQKLLPGYYMNLNQNPRTLLPKFYGLYCVQSGGKNIRVVVMNNILPRVVKMHLKFDLKGSTYKRRASKKEKEKSFPTYKDLDFMQDMPEGLLLDADTFSALVKTLQRDCLVLESFKIMDYSLLLGVHNIDQHERERQAQGAQSTSDEKRPVGQKALYSTAMESIQGGAARGEAIESDDTMGGIPAVNGRGERLLLHIGIIDILQSYRFIKKLEHTWKALVHDGDTVSVHRPSFYAERFFKFMSNTVFRKNSSLKSSPSKKGRGGALLAVKPLGPTAAFSASQIPSEREEAQYDLRGARSYPTLEDEGRPDLLPCTPPSFEEATTASIATTLSSTSLSIPERSPSETSEQPRYRRRTQSSGQDGRPQEEPPAEEDLQQITVQVEPACSVEIVVPKEEDAGVEASPAGASAAVEVETASQASDEEGAPASQASDEEDAPATDIYFPTDERSWVYSPLHYSAQAPPASDGESDT

SEQ ID NO: 57663 - protein, 700 aa, Homo sapiens
MELEVPDEAESAEAGAVPSEAAWAAESGAAAGLAQKKAAPTEVLSMTAQPGPGHGKKLGHRGVDASGETTYKKTTSSTLKGAIQLGIGYTVGHLSSKPERDVLMQDFYVVESIFFPSEGSNLTPAHHFQDFRFKTYAPVAFRYFRELFGIRPDDYLYSLCNEPLIELSNPGASGSLFYVTSDDEFIIKTVMHKEAEFLQKLLPGYYMNLNQNPRTLLPKFYGLYCVQSGGKNIRVVVMNNILPRVVKMHLKFDLKGSTYKRRASKKEKEKSFPTYKDLDFMQDMPEGLLLDADTFSALVKTLQRDCLVLESFKIMDYSLLLGVHNIDQHERERQAQGAQSTSDEKRPVGQKALYSTAMESIQGGAARGEAIESDDTMGGIPAVNGRGERLLLHIGIIDILQSYRFIKKLEHTWKALVHDGDTVSVHRPSFYAERFFKFMSNTVFRKNSSLKSSPSKKGRGGALLAVKPLGPTAAFSASQIPSEREEAQYDLRGARSYPTLEDEGRPDLLPCTPPSFEEATTASIATTLSSTSLSIPERSPSETSEQPRYRRRTQSSGQDGRPQEEPPAEEDLQQITVQVEPACSVEIVVPKEEDAGVEASPAGASAAVEVETASQASDEEGAPASQASDEEDAPATDIYFWRLWGPHAPTWPWRREGRAACLCPYPPHVVTPFPGTGLCASWSPDGTGGLGAMSCCVSVS

SEQ ID NO: 57664 - protein, 640 aa, Homo sapiens
MELEVPDEAESAEAGAVPSEAAWAAESGAAAGLAQKKAAPTEVLSMTAQPGPGHGKKLGHRGVDASGETTYKKTTSSTLKGAIQLGIGYTVGHLSSKPERDVLMQDFYVVESIFFPSEGSNLTPAHHFQDFRFKTYAPVAFRYFRELFGIRPDDYLYSLCNEPLIELSNPGASGSLFYVTSDDEFIIKTVMHKEAEFLQKLLPGYYMNLNQNPRTLLPKFYGLYCVQSGGKNIRVVVMNNILPRVVKMHLKFDLKGSTYKRRASKKEKEKSFPTYKDLDFMQDMPEGLLLDADTFSALVKTLQRDCLVLESFKIMDYSLLLGVHNIDQHERERQAQGAQSTSDEKRPVGQKALYSTAMESIQGGAARGEAIESDDTMGGIPAVNGRGERLLLHIGIIDILQSYRFIKKLEHTWKALVHDGDTVSVHRPSFYAERFFKFMSNTVFRKNSSLKSSPSKKGRGGALLAVKPLGPTAAFSASQIPSEREEAQYDLRGARSYPTLEDEGRPDLLPCTPPSFEEATTASIATTLSSTSLSIPERSPSETSEQPRYRRRTQSSGQDGRPQEEPPAEEDLQQITVQVEPACSVEIVVPKEEDAGVEASPAGASAAVEVETASQASDEEGAPASQASDEEDAPATDIYF

SEQ ID NO: 57665 - protein, 191 aa, Homo sapiens
MQSVFYPAGRISERYDIKGCEVSRWVDPAPEGSPLVLVLKDLNFQGKTINLGPQRSWFLRQMELDTTFLRELNVLDYSLLIAFQRLHEDERGPGSSLIFRTARSVQGAQSPEESRAQNRRLLPDAPNALHILDGPEQRYFLGVVDLATVYGLRKRLEHLWKTLRYPGRTFSTVSPARYARRLCQWVEAHTE

SEQ ID NO: 57666 - protein, 394 aa, Homo sapiens
MAAPSPGPREVLAPSPEAGCRAVTSSRRGLLWRLRDKQSRLGLFEISPGHELHGMTCMMQAGLWAATQVSMDHPPTGPPSRDDFSEVLTQVHEGFELGTLAGPAFAWLRRSLGLAEEDYQAALGPGGPYLQFLSTSKSKASFFLSHDQRFFLKTQGRREVQALLAHLPRYVQHLQRHPHSLLARLLGVHSLRVDRGKKTYFIVMQSVFYPAGRISERYDIKGCEVSRWVDPAPEGSPLVLVLKDLNFQGKTINLGPQRSWFLRQMELDTTFLRELNVLDYSLLIAFQRLHEDERGPGSSLIFRTARSVQGAQSPEESRAQNRRLLPDAPNALHILDGPEQRYFLGVVDLATVYGLRKRLEHLWKTLRYPGRTFSTVSPARYARRLCQWVEAHTE

SEQ ID NO: 57667 - protein, 375 aa, Homo sapiens
MMCQSEARQGPELRAAKWLHFPQLALRRRLGQLSCMSRPALKLRSWPLTVLYYLLPFGALRPLSRVGWRPVSRVALYKSVPTRLLSRAWGRLNQVELPHWLRRPVYSLYIWTFGVNMKEAAVEDLHHYRNLSEFFRRKLKPQARPVCGLHSVISPSDGRILNFGQVKNCEVEQVKGVTYSLESFLGPRMCTEDLPFPPAASCDSFKNQLVTREGNELYHCVIYLAPGDYHCFHSPTDWTVSHRRHFPGSLMSVNPGMARWIKELFCHNERVVLTGDWKHGFFSLTAVGATNVGSIRIYFDRDLHTNSPRHSKGSYNDFSFVTHTNREGVPMRKGEHLGEFNLGSTIVLIFEAPKDFNFQLKTGQKIRFGEALGSL

SEQ ID NO: 57668 - protein, 408 aa, Homo sapiens
MATSVGHRCLGLLHGVAPWRSSLHPCEITALSQSLQPLRKLPFRAFRTDARKIHTAPARTMFLLRPLPILLVTGGGYAGYRQYEKYRERELEKLGLEIPPKLAGHWEVALYKSVPTRLLSRAWGRLNQVELPHWLRRPVYSLYIWTFGVNMKEAAVEDLHHYRNLSEFFRRKLKPQARPVCGLHSISPSDGRILNFGQVKNCEVEQVKGVTYSLESFLGPRMCTEDLPFPPAASCDSFKNQLVTREGNELYHCVIYLAPGDYHCFHSPTDWTVSHRRHFPGSLMSVNPGMARWIKELFCHNERVVLTGDWKHGFFSLTAVGATNVGSIRIYFDRDLHTNSPRHSKGSYNDFSFVTHTNREGVPMRKGEHLGEFNLGSTIVLIFEAPKDFNFQLKTGQKIRFGEALGSL

SEQ ID NO: 57669 - protein, 375 aa, Homo sapiens; identical to SEQ ID NO: 57667

SEQ ID NO: 57670 - protein, 262 aa, Homo sapiens
MMCQSEARQGPELRAAKWLHFPQLALRRRLGQLSCMSRPALKLRSWPLTVLYYLLPFGALRPLSRVGWRPVSRVALYKSVPTRLLSRAWGRLNQVELPHWLRRPVYSLYIWTFGVNMKEAAVEDLHHYRNLSEFFRRKLKPQARPVCGLHSVISPSDGRILNFGQVKNCEVEQVKGVTYSLESFLGPRMCTEDLPFPPAASCDSFKNQLVTREGNELYHCVIYLAPGDYHCFHSPTDWTVSHRRHFPGPAHKQPKAQQGLLQ

SEQ ID NO: 57671 - protein, 228 aa, Homo sapiens
MMCQSEARQGPELRAAKWLHFPQLALRRRLGQLSCMSRPALKLRSWPLTVLYYLLPFGALRPLSRVGWRPVSRVALYKSVPTRLLSRAWGRLNQVELPHWLRRPVYSLYIWTFGVNMKEAAVEDLHHYRNLSEFFRRKLKPQARPVCGLHSVISPSDGRILNFGQVKNCEVEQVKGVTYSLESFLGPRMCTEDLPFPPAASCDSFKNQLVTREGNELYHCVIYLAPGD

SEQ ID NO: 57672 - protein, 73 aa, Homo sapiens
MMCQSEARQGPELRAAKWLHFPQLALRRRLGQLSCMSRPALKLRSWPLTVLYYLLPFGALRPLSRVGWRPVSR

SEQ ID NO: 57673 - protein, 73 aa, Homo sapiens; identical to SEQ ID NO: 57672

SEQ ID NO: 57674 - protein, 409 aa, Homo sapiens
MATSVGHRCLGLLHGVAPWRSSLHPCEITALSQSLQPLRKLPFRAFRTDARKIHTAPARTMFLLRPLPILLVTGGGYAGYRQYEKYRERELEKLGLEIPPKLAGHWEVALYKSVPTRLLSRAWGRLNQVELPHWLRRPVYSLYIWTFGVNMKEAAVEDLHHYRNLSEFFRRKLKPQARPVCGLHSVISPSDGRILNFGQVKNCEVEQVKGVTYSLESFLGPRMCTEDLPFPPAASCDSFKNQLVTREGNELYHCVIYLAPGDYHCFHSPTDWTVSHRRHFPGSLMSVNPGMARWIKELFCHNERVVLTGDWKHGFFSLTAVGATNVGSIRIYFDRDLHTNSPRHSKGSYNDFSFVTHTNREGVPMRKGEHLGEFNLGSTIVLIFEAPKDFNFQLKTGQKIRFGEALGSL

SEQ ID NO: 57675 - protein, 81 aa, Homo sapiens
MMCQSEARQGPELRAAKWLHFPQLALRRRLGQLSCMSRPALKLRSWPLTVLYYLLPFGALRPLSRVGWRPVSRVALYKSVP

SEQ ID NO: 57676 - protein, 326 aa, Homo sapiens
MMCQSEARQGPELRAAKWLHFPQLALRRRLGQLSCMSRPALKLRSWPLTVLYYLLPFGALRPLSRVGWRPVSRVALYKSVPTRLLSRAWGRLNQVELPHWLRRPVYSLYIWTFGVNMKEAAVEDLHHYRNLSEFFRRKLKPQARPVCGLHSVISPSDGRILNFGQVKNCEVEQVKGVTYSLESFLGPRMCTEDLPFPPAASCDSFKNQLVTREGNELYHCVIYLAPGDYHCFHSPTDWTVSHRRHFPGSLMSVNPGMARWIKELFCHNERVVLTGDWKHGFFSLTAVGATNVGSIRIYFDRDLHTNSPRHSKGSYNDFSVVGSLTR

SEQ ID NO: 57677 - protein, 327 aa, Homo sapiens
MEYAVNCHVITWERIISHFDIFAFGHFWGWAMKALLIRSYGLCWTISITWELTELFFMHLLPNFAECWWDQVILDILLCNGGGIWLGMVVCRFLEMRTYHWASFKDIHTTTGKIKRAVLQFTPASWTYVRWFDPKSSFQRVAGVYLFMIIWQLTELNTFFLKHIFVFQASHPLSWGRILFIGGITAPTVRQYYAYLTDTQCKRVGTQCWVFGVIGFLEAIVCIKFGQDLFSKTQILYVVLWLLCVAFTTFLCLYGMIWYAEHYGHREKTYSECEDGTYSPEISWHHRKGTKGSEDSPPKHAGNNESHSSRRRNRHSKSKVTNGVGKK

SEQ ID NO: 57678 - protein, 473 aa, Homo sapiens
MASCVGSRTLSKDDVNYKMHFRMINEQQVEDITIDFFYRPHTITLLSFTIVSLMYFAFTRDDSVPEDNIWRGILSVIFFFLIISVLAFPNGPFTRPHPALWRMVFGLSVLYFLFLVFLLFLNFEQVKSLMYWLDPNLRYATREADVMEYAVNCHVITWERIISHFDIFAFGHFWGWAMKALLIRSYGLCWTISITWELTELFFMHLLPNFAECWWDQVILDILLCNGGGIWLGMVVCRFLEMRTYHWASFKDIHTTTGKIKRAVLQFTPASWTYVRWFDPKSSFQRVAGVYLFMIIWQLTELNTFFLKHIFVFQASHPLSWGRILFIGGITAPTVRQYYAYLTDTQCKRVGTQCWVFGVIGFLEAIVCIKFGQDLFSKTQILYVVLWLLCVAFTTFLCLYGMIWYAEHYGHREKTYSECEDGTYSPEISWHHRKGTKGSEDSPPKHAGNNESHSSRRRNRHSKSKVTNGVGKK

SEQ ID NO: 57679 - protein, 487 aa, Homo sapiens
MRRGERRDAGGPRPESPVPAGRASLEEPPDGPSAGQATGPGEGRRSTESEVYDDGTNTFFWRAHTLTVLFILTCTLGYVTLLEETPQDTAYNTKRGIVASILVFLCFGVTQAKDGPFSRPHPAYWRFWLCVSVVYELFLIFILFQTVQDGRQFLKYVDPKLGVPLPERDYGGNCLIYDPDNETDPFHNIWDKLDGFVPAHFLGWYLKTLMIRDWWMCMIISVMFEFLEYSLEHQLPNFSECWWDHWIMDVLVCNGLGIYCGMKTLEWLSLKTYKWQGLWNIPTYKGKMKRIAFQFTPYSWVRFEWKPASSLRRWLAVCGIILVFLLAELNTFYLKFVLWMPPEHYLVLLRLVFFVNVGGVAMREIYDFMDDPKPHKKLGPQAWLVAAITATELLIVVKYDPHTLTLSLPFYISQCWTLGSVLALTWTVWRFFLRDITLRYKETRWQKWQNKDDQGSTVGNGDQHPLGLDEDLLGPGVAEGEGAPTPN

SEQ ID NO: 57680 - protein, 933 aa, Homo sapiens
MAASRLDFGEVETFLDRHPELFEDYLMRKGKQEMVEKWLQRHSQGQGALGPRPSLAGTSSLAHSTCRGGSSVGGGTGPNGSAHSQPLPGGGDCGGVPLSPSWAGGSRGDGNLQRRASQKELRKSFARSKAIHVNRTYDEQVTSRAQEPLSSVRRRALLRKASSLPPTTAHILSALLESRVNLPRYPPTAIDYKCHLKKHNERQFFLELVKDISNDLDLTSLSYKILIFVCLMVDADRCSLFLVEGAAAGKKTLVSKFFDVHAGTPLLPCSSTENSNEVQVPWGKGIIGYVGEHGETVNIPDAYQDRRFNDEIDKLTGYKTKSLLCMPIRSSDGEIIGVAQAINKIPEGAPFTEDDEKVMQMYLPFCGIAISNAQLFAASRKEYERSRALLEVVNDLFEEQTDLEKIVKKIMHRAQTLLKCERCSVLLLEDIESPVVKFTKSFELMSPKCSADAENSFKESMEKSSYSDWLINNSIAELVASTGLPVNISDAYQDPRFDAEADQISGFHIRSVLCVPIWNSNHQIIGVAQVLNRLDGKPFDDADQRLFEAFVIFCGLGINNTIMYDQVKKSWAKQSVALDVLSYHATCSKAEVDKFKAANIPLVSELAIDDIHFDDFSLDVDAMITAALRMFMELGMVQKFKIDYETLCRWLLTVRKNYRMVLYHNWRHAFNVCQLMFAMLTTAGFQDILTEVEILAVIVGCLCHDLDHRGTNNAFQAKSGSALAQLYGTSATLEHHHFNHAVMILQSEGHNIFANLSSKEYSDLMQLLKQSILATDLTLYFERRTEFFELVSKGEYDWNIKNHRDIFRSMLMTACDLGAVTKPWEISRQVAELVTSEFFEQGDRERLELKLTPSAIFDRNRKDELPRLQLEWIDSICMPLYQALVKVNVKLKPMLDSVATNRSKWEELHQKRLLASTASSSPASVMVAKEDRN

SEQ ID NO: 57681 - protein, 683 aa, Homo sapiens
MLKQARRPLFRNVLSATQWKKVKITRLVQISGASLAEKQEKHQDFLIQRQTKTKDRRFNDEIDKLTGYKTKSLLCMPIRSSDGEIIGVAQAINKIPEGAPFTEDDEKVMQMYLPFCGIAISNAQLFAASRKEYERSRALLEVVNDLFEEQTDLEKIVKKIMHRAQTLLKCERCSVLLLEDIESPVVKFTKSFELMSPKCSADAENSFKESMEKSSYSDWLINNSIAELVASTGLPVNISDAYQDPRFDAEADQISGFHIRSVLCVPIWNSNHQIIGVAQVLNRLDGKPFDDADQRLFEAFVIFCGLGINNTIMYDQVKKSWAKQSVALDVLSYHATCSKAEVDKFKAANIPLVSELAIDDIHFDDFSLDVDAMITAALRMFMELGMVQKFKIDYETLCRWLLTVRKNYRMVLYHNWRHAFNVCQLMFAMLTTAGFQDILTEVEILAVIVGCLCHDLDHRGTNNAFQAKSGSALAQLYGTSATLEHHHFNHAVMILQSEGHNIFANLSSKEYSDLMQLLKQSILATDLTLYFERRTEFFELVSKGEYDWNIKNHRDIFRSMLMTACDLGAVTKPWEISRQVAELVTSEFFEQGDRERLELKLTPSAIFDRNRKDELPRLQLEWIDSICMPLYQALVKVNVKLKPMLDSVATNRSKWEELHQKRLLASTASSSPASVMVAKEDRN

SEQ ID NO: 57682 - protein, 489 aa, Homo sapiens
MSPKCSADAENSFKESMEKSSYSDWLINNSIAELVASTGLPVNISDAYQDPRFDAEADQISGFHIRSVLCVPIWNSNHQIIGVAQVLNRLDGKPFDDADQRLFEAFVIFCGLGINNTIMYDQVKKSWAKQSVALDVLSYHATCSKAEVDKFKAANIPLVSELAIDDIHFDDFSLDVDAMITAALRMFMELGMVQKFKIDYETLCRWLLTVRKNYRMVLYHNWRHAFNVCQLMFAMLTTAGFQDILTEVEILAVIVGCLCHDLDHRGTNNAFQAKSGSALAQLYGTSATLEHHHFNHAVMILQSEGHNIFANLSSKEYSDLMQLLKQSILATDLTLYFERRTEFFELVSKGEYDWNIKNHRDIFRSMLMTACDLGAVTKPWEISRQVAELVTSEFFEQGDRERLELKLTPSAIFDRNRKDELPRLQLEWIDSICMPLYQALVKVNVKLKPMLDSVATNRSKWEELHQKRLLASTASSSPASVMVAKEDRN

SEQ ID NO: 57683 - protein, 575 aa, Homo sapiens
MQMYLPFCGIAISNAQLFAASRKEYERSRALLEVVNDLFEEQTDLEKIVKKIMHRAQTLLKCERCSVLLLEDIESPVVKFTKSFELMSPKCSADAENSFKESMEKSSYSDWLINNSIAELVASTGLPVNISDAYQDPRFDAEADQISGFHIRSVLCVPIWNSNHQIIGVAQVLNRLDGKPFDDADQRLFEAFVIFCGLGINNTIMYDQVKKSWAKQSVALDVLSYHATCSKAEVDKFKAANIPLVSELAIDDIHFDDFSLDVDAMITAALRMFMELGMVQKFKIDYETLCRWLLTVRKNYRMVLYHNWRHAFNVCQLMFAMLTTAGFQDILTEVEILAVIVGCLCHDLDHRGTNNAFQAKSGSALAQLYGTSATLEHHHFNHAVMILQSEGHNIFANLSSKEYSDLMQLLKQSILATDLTLYFERRTEFFELVSKGEYDWNIKNHRDIFRSMLMTACDLGAVTKPWEISRQVAELVTSEFFEQGDRERLELKLTPSAIFDRNRKDELPRLQLEWIDSICMPLYQALVKVNVKLKPMLDSVATNRSKWEELHQKRLLASTASSSPASVMVAKEDRN

SEQ ID NO: 57684 - protein, 130 aa, Homo sapiens
MPIRSSDGEIIGVAQAINKIPEGAPFTEDDEKVMQMYLPFCGIAISNAQLFAASRKEYERSRALLEVVNDLFEEQTDLEKIVKKIMHRAQTLLKCERCSVLLLEDIESPVVKFTKSFELMSPKCSADAEN

SEQ ID NO: 57685 - protein, 575 aa, Homo sapiens; identical to SEQ ID NO: 57683

SEQ ID NO: 57686 - protein, 124 aa, Homo sapiens
MLMTACDLGAVTKPWEISRQVAELVTSEFFEQGDRERLELKLTPSAIFDRNRKDELPRLQLEWIDSICMPLYQALVKVNVKLKPMLDSVATNRSKWEELHQKRLLASTASSSPASVMVAKEDRN

SEQ ID NO: 57687 - protein, 545 aa, Homo sapiens
MGSSATEIEELENTTFKYLTGEQTEKMWQRLKGILRCLVKQLERGDVNVVDLKKNIEYAASVLEAVYIDETRRLLDTEDELSDIQTDSVPSEVRDWLASTFTRKMGMTKKKPEEKPKFRSIVHAVQAGIFVERMYRKTYHMVGLAYPAAVIVTLKDVDKWSFDVFALNEASGEHSLKFMIYELFTRYDLINRFKIPVSCLITFAEALEVGYSKYKNPYHNLIHAADVTQTVHYIMLHTGIMHWLTELEILAMVFAAAIHDYEHTGTTNNFHIQTRSDVAILYNDRSVLENHHVSAAYRLMQEEEMNILINLSKDDWRDLRNLVIEMVLSTDMSGHFQQIKNIRNSLQQPEGIDRAKTMSLILHAADISHPAKSWKLHYRWTMALMEEFFLQGDKEAELGLPFSPLCDRKSTMVAQSQIGFIDFIVEPTFSLLTDSTEKIVIPLIEEASKAETSSYVASSSTTIVGLHIADALRRSNTKGSMSDGSYSPDYSLAAVDLKSFKNNLVDIIQQNKERWKELAAQGESDLHKNSEDLVNAEEKHDETHS

SEQ ID NO: 57688 - protein, 511 aa, Homo sapiens
MGKKINKLFCFNFLVQCFRGKSKPSKCQIRKKVKNHIERLLDTEDELSDIQTDSVPSEVRDWLASTFTRKMGMTKKKPEEKPKFRSIVHAVQAGIFVERMYRKTYHMVGLAYPAAVIVTLKDVDKWSFDVFALNEASGEHSLKFMIYELFTRYDLINRFKIPVSCLITFAEALEVGYSKYKNPYHNLIHAADVTQTVHYIMLHTGIMHWLTELEILAMVFAAAIHDYEHTGTTNNFHIQTRSDVAILYNDRSVLENHHVSAAYRLMQEEEMNILINLSKDDWRDLRNLVIEMVLSTDMSGHFQQIKNIRNSLQQPEGIDRAKTMSLILHAADISHPAKSWKLHYRWTMALMEEFFLQGDKEAELGLPFSPLCDRKSTMVAQSQIGFIDFIVEPTFSLLTDSTEKIVIPLIEEASKAETSSYVASSSTTIVGLHIADALRRSNTKGSMSDGSYSPDYSLAAVDLKSFKNNLVDIIQQNKERWKELAAQGESDLHKNSEDLVNAEEKHDETHS

SEQ ID NO: 57689 - protein, 519 aa, Homo sapiens
MDDHVTIRKKHLQRPIFRLRCLVKQLERGDVNVVDLKKNIEYAASVLEAVYIDETRRLLDTEDELSDIQTDSVPSEVRDWLASTFTRKMGMTKKKPEEKPKFRSIVHAVQAGIFVERMYRKTYHMVGLAYPAAVIVTLKDVDKWSFDVFALNEASGEHSLKFMIYELFTRYDLINRFKIPVSCLITFAEALEVGYSKYKNPYHNLIHAADVTQTVHYIMLHTGIMHWLTELEILAMVFAAAIHDYEHTGTTNNFHIQTRSDVAILYNDRSVLENHHVSAAYRLMQEEEMNILINLSKDDWRDLRNLVIEMVLSTDMSGHFQQIKNIRNSLQQPEGIDRAKTMSLILHAADISHPAKSWKLHYRWTMALMEEFFLQGDKEAELGLPFSPLCDRKSTMVAQSQIGFIDFIVEPTFSLLTDSTEKIVIPLIEEASKAETSSYVASSSTTIVGLHIADALRRSNTKGSMSDGSYSPDYSLAAVDLKSFKNNLVDIIQQNKERWKELAAQEARTSSQKCEFIHQ

SEQ ID NO: 57690 - protein, 535 aa, Homo sapiens
MGSSATEIEELENTTFKYLTGEQTEKMWQRLKGILRCLVKQLERGDVNVVDLKKNIEYAASVLEAVYIDETRRLLDTEDELSDIQTDSVPSEVRDWLASTFTRKMGMTKKKPEEKPKFRSIVHAVQAGIFVERMYRKTYHMVGLAYPAAVIVTLKDVDKWSFDVFALNEASGEHSLKFMIYELFTRYDLINRFKIPVSCLITFAEALEVGYSKYKNPYHNLIHAADVTQTVHYIMLHTGIMHWLTELEILAMVFAAAIHDYEHTGTTNNFHIQTRSDVAILYNDRSVLENHHVSAAYRLMQEEEMNILINLSKDDWRDLRNLVIEMVLSTDMSGHFQQIKNIRNSLQQPEGIDRAKTMSLILHAADISHPAKSWKLHYRWTMALMEEFFLQGDKEAELGLPFSPLCDRKSTMVAQSQIGFIDFIVEPTFSLLTDSTEKIVIPLIEEASKAETSSYVASSSTTIVGLHIADALRRSNTKGSMSDGSYSPDYSLAAVDLKSFKNNLVDIIQQNKERWKELAAQEARTSSQKCEFIHQ

SEQ ID NO: 57691 - protein, 529 aa, Homo sapiens
MDDHVTIRKKHLQRPIFRLRCLVKQLERGDVNVVDLKKNIEYAASVLEAVYIDETRRLLDTEDELSDIQTDSVPSEVRDWLASTFTRKMGMTKKKPEEKPKFRSIVHAVQAGIFVERMYRKTYHMVGLAYPAAVIVTLKDVDKWSFDVFALNEASGEHSLKFMIYELFTRYDLINRFKIPVSCLITFAEALEVGYSKYKNPYHNLIHAADVTQTVHYIMLHTGIMHWLTELEILAMVFAAAIHDYEHTGTTNNFHIQTRSDVAILYNDRSVLENHHVSAAYRLMQEEEMNILINLSKDDWRDLRNLVIEMVLSTDMSGHFQQIKNIRNSLQQPEGIDRAKTMSLILHAADISHPAKSWKLHYRWTMALMEEFFLQGDKEAELGLPFSPLCDRKSTMVAQSQIGFIDFIVEPTFSLLTDSTEKIVIPLIEEASKAETSSYVASSSTTIVGLHIADALRRSNTKGSMSDGSYSPDYSLAAVDLKSFKNNLVDIIQQNKERWKELAAQGESDLHKNSEDLVNAEEKHDETHS

SEQ ID NO: 57692 - protein, 535 aa, Homo sapiens; identical to SEQ ID NO: 57690

SEQ ID NO: 57693 - protein, 545 aa, Homo sapiens; identical to SEQ ID NO: 57687

SEQ ID NO: 57694 - protein, 552 aa, Homo sapiens
MGSSATEIEELENTTFKYLTGEQTEKMWQRLKGILRCLVKQLERGDVNVVDLKKNIEYAASVLEAVYIDETRRLLDTEDELSDIQTDSVPSEVRDWLASTFTRKMGMTKKKPEEKPKFRSIVHAVQAGIFVERMYRKTYHMVGLAYPAAVIVTLKDVDKWSFDVFALNEASGEHSLKFMIYELFTRYDLINRFKIPVSCLITFAEALEVGYSKYKNPYHNLIHAADVTQTVHYIMLHTGIMHWLTELEILAMVFAAAIHDYEHTGTTNNFHIQTRSDVAILYNDRSVLENHHVSAAYRLMQEEEMNILINLSKDDWRDLRNLVIEMVLSTDMSGHFQQIKNIRNSLQQPEGIDRAKTMSLILHAADISHPAKSWKLHYRWTMALMEEFFLQGDKEAELGLPFSPLCDRKSTMVAQSQIGFIDFIVEPTFSLLTDSTEKIVIPLIEEASKAETSSYVASSSTTIVGLHIADALRRSNTKGSMSDGSYSPDYSLAAVDLKSFKNNLVDIIQQNKERWKELAAQGSVVYEALLPSLSVFTSPLRVWITSSRFLLL

SEQ ID NO: 57695 - protein, 441 aa, Homo sapiens
MGMTKKKPEEKPKFRSIVHAVQAGIFVERMYRKTYHMVGLAYPAAVIVTLKDVDKWSFDVFALNEASGEHSLKFMIYELFTRYDLINRFKIPVSCLITFAEALEVGYSKYKNPYHNLIHAADVTQTVHYIMLHTGIMHWLTELEILAMVFAAAIHDYEHTGTTNNFHIQTRSDVAILYNDRSVLENHHVSAAYRLMQEEEMNILINLSKDDWRDLRNLVIEMVLSTDMSGHFQQIKNIRNSLQQPEGIDRAKTMSLILHAADISHPAKSWKLHYRWTMALMEEFFLQGDKEAELGLPFSPLCDRKSTMVAQSQIGFIDFIVEPTFSLLTDSTEKIVIPLIEEASKAETSSYVASSSTTIVGLHIADALRRSNTKGSMSDGSYSPDYSLAAVDLKSFKNNLVDIIQQNKERWKELAAQGESDLHKNSEDLVNAEEKHDETHS

SEQ ID NO: 57696 - protein, 536 aa, Homo sapiens
MELSPRSPPEMLEESDCPSPLELKSAPSKKMWIKLRSLLRYMVKQLENGEINIEELKKNLEYTASLLEAVYIDETRQILDTEDELQELRSDAVPSEVRDWLASTFTQQARAKGRRAEEKPKFRSIVHAVQAGIFVERMFRRTYTSVGPTYSTAVLNCLKNLDLWCFDVFSLNQAADDHALRTIVFELLTRHNLISRFKIPTVFLMSFLDALETGYGKYKNPYHNQIHAADVTQTVHCFLLRTGMVHCLSEIELLAIIFAAAIHDYEHTGTTNSFHIQTKSECAIVYNDRSVLENHHISSVFRLMQDDEMNIFINLTKDEFVELRALVIEMVLATDMSCHFQQVKTMKTALQQLERIDKPKALSLLLHAADISHPTKQWLVHSRWTKALMEEFFRQGDKEAELGLPFSPLCDRTSTLVAQSQIGFIDFIVEPTFSVLTDVAEKSVQPLADEDSKSKNQPSFQWRQPSLDVEVGDPNPDVVSFRSTWVKRIQENKQKWKERAASGITNQMSIDELSPCEEEAPPSPAEDEHNQNGNLD

SEQ ID NO: 57697 - protein, 495 aa, Homo sapiens
MVKQLENGEINIEELKKNLEYTASLLEAVYIDETRQILDTEDELQELRSDAVPSEVRDWLASTFTQQARAKGRRAEEKPKFRSIVHAVQAGIFVERMFRRTYTSVGPTYSTAVLNCLKNLDLWCFDVFSLNQAADDHALRTIVFELLTRHNLISRFKIPTVFLMSFLDALETGYGKYKNPYHNQIHAADVTQTVHCFLLRTGMVHCLSEIELLAIIFAAAIHDYEHTGTTNSFHIQTKSECAIVYNDRSVLENHHISSVFRLMQDDEMNIFINLTKDEFVELRALVIEMVLATDMSCHFQQVKTMKTALQQLERIDKPKALSLLLHAADISHPTKQWLVHSRWTKALMEEFFRQGDKEAELGLPFSPLCDRTSTLVAQSQIGFIDFIVEPTFSVLTDVAEKSVQPLADEDSKSKNQPSFQWRQPSLDVEVGDPNPDVVSFRSTWVKRIQENKQKWKERAASGITNQMSIDELSPCEEEAPPSPAEDEHNQNGNLD

SEQ ID NO: 57698 - protein, 516 aa, Homo sapiens
MANPVPVQRSHLQGPILRLRYMVKQLENGEINIEELKKNLEYTASLLEAVYIDETRQILDTEDELQELRSDAVPSEVRDWLASTFTQQARAKGRRAEEKPKFRSIVHAVQAGIFVERMFRRTYTSVGPTYSTAVLNCLKNLDLWCFDVFSLNQAADDHALRTIVFELLTRHNLISRFKIPTVFLMSFLDALETGYGKYKNPYHNQIHAADVTQTVHCFLLRTGMVHCLSEIELLAIIFAAAIHDYEHTGTTNSFHIQTKSECAIVYNDRSVLENHHISSVFRLMQDDEMNIFINLTKDEFVELRALVIEMVLATDMSCHFQQVKTMKTALQQLERIDKPKALSLLLHAADISHPTKQWLVHSRWTKALMEEFFRQGDKEAELGLPFSPLCDRTSTLVAQSQIGFIDFIVEPTFSVLTDVAEKSVQPLADEDSKSKNQPSFQWRQPSLDVEVGDPNPDVVSFRSTWVKRIQENKQKWKERAASGITNQMSIDELSPCEEEAPPSPAEDEHNQNGNLD

SEQ ID NO: 57699 - protein, 769 aa, Homo sapiens
MTDAGNRKEGFKKCRSATFSIDGYSFTIVANEAGDKNARPLARFSRSKSQNCLWNSLIDGLTGNVKEKPRPTIVHDPRPPEEILADELPQLDSSEVLVKTSFRLRSLVKQLERGEASVVDLKKNLEYAATVLESVYIDETRRLLDTEDELSDIQSDAVPSEVRDWLASTFTRQMGMMLRRSDEKPRFKSIVHAVQAGIFVERMYRRTSNMVGLSYPPAVIEALKDVDKWSFDVFSLNEASGDHALKFIFYELLTRYDLISRFKIPISALVSFVEALEVGYSKHKNPYHNLMHAADVTQTVHYLLYKTGVANWLTELEIFAIIFSAAIHDYEHTGTTNNFHIQTRSDPAILYNDRSVLENHHLSAAYRLLQDDEEMNILINLSKDDWREFRTLVIEMVMATDMSCHFQQIKAMKTALQQPEAIEKPKALSLMLHTADISHPAKAWDLHHRWTMSLLEEFFRQGDREAELGLPFSPLCDRKSTMVAQSQVGFIDFIVEPTFTVLTDMTEKIVSPLIDETSQTGGTGQRRSSLNSISSSDAKRSGVKTSGSEGSAPINNSVISVDYKSFKATWTEVVHINRERWRAKVPKEEKAKKEAEEKARLAAEEQQKEMEAKSQAEEGASGKAEKKTSGETKNQVNGTRANKSDNPRGKNSKAEKSSGEQQQNGDFKDGKNKTDKKDHSNIGNDSKKTDGTKQRSHGSPAPSTSSTCRLTLPVIKPPLRHFKRPAYASSSYAPSVSKKTDEHPARYKMLDQRIKMKKIQNISHNWNRK

SEQ ID NO: 57700 - protein, 709 aa, Homo sapiens
MESPTKEIEEFESNSLKYLQPEQIEKIWLRLRGLRKYKKTSQRLRSLVKQLERGEASVVDLKKNLEYAATVLESVYIDETRRLLDTEDELSDIQSDAVPSEVRDWLASTFTRQMGMMLRRSDEKPRFKSIVHAVQAGIFVERMYRRTSNMVGLSYPPAVIEALKDVDKWSFDVFSLNEASGDHALKFIFYELLTRYDLISRFKIPISALVSFVEALEVGYSKHKNPYHNLMHAADVTQTVHYLLYKTGVANWLTELEIFAIIFSAAIHDYEHTGTTNNFHIQTRSDPAILYNDRSVLENHHLSAAYRLLQDDEEMNILINLSKDDWREFRTLVIEMVMATDMSCHFQQIKAMKTALQQPEAIEKPKALSLMLHTADISHPAKAWDLHHRWTMSLLEEFFRQGDREAELGLPFSPLCDRKSTMVAQSQVGFIDFIVEPTFTVLTDMTEKIVSPLIDETSQTGGTGQRRSSLNSISSSDAKRSGVKTSGSEGSAPINNSVISVDYKSFKATWTEVVHINRERWRAKVPKEEKAKKEAEEKARLAAEEQQKEMEAKSQAEEGASGKAEKKTSGETKNQVNGTRANKSDNPRGKNSKAEKSSGEQQQNGDFKDGKNKTDKKDHSNIGNDSKKTDGTKQRSHGSPAPSTSSTCRLTLPVIKPPLRHFKRPAYASSSYAPSVSKKTDEHPARYKMLDQRIKMKKIQNISHNWNRK

SEQ ID NO: 57701 - protein, 634 aa, Homo sapiens
MESPTKEIEEFESNSLKYLQPEQIEKIWLRLRGLRKYKKTSQRLRSLVKQLERGEASVVDLKKNLEYAATVLESVYIDETRRLLDTEDELSDIQSDAVPSEVRDWLASTFTRQMGMMLRRSDEKPRFKSIVHAVQAGIFVERMYRRTSNMVGLSYPPAVIEALKDVDKWSFDVFSLNEASGDHALKFIFYELLTRYDLISRFKIPISALVSFVEALEVGYSKHKNPYHNLMHAADVTQTVHYLLYKTGVANWLTELEIFAIIFSAAIHDYEHTGTTNNFHIQTRSDPAILYNDRSVLENHHLSAAYRLLQDDEEMNILINLSKDDWREFRTLVIEMVMATDMSCHFQQIKAMKTALQQPEAIEKPKALSLMLHTADISHPAKAWDLHHRWTMSLLEEFFRQGDREAELGLPFSPLCDRKSTMVAQSQVGFIDFIVEPTFTVLTDMTEKIVSPLIDETSQTGGTGQRRSSLNSISSSDAKRSGVKTSGSEGSAPINNSVISVDYKSFKATWTEVVHINRERWRAKVPKEEKAKKEAEEKARLAAEEQQKEMEAKSQAEEGASGKAEKKTSGETKNQVNGTRANKSDNPRGKNSKAEKSSGEQQQNGDFKDGKNKTDKKDHSNIGNDSKKTDDSQE

SEQ ID NO: 57702 - protein, 634 aa, Homo sapiens; identical to SEQ ID NO: 57701

SEQ ID NO: 57703 - protein, 46 aa, Homo sapiens
MESPTKEIEEFESNSLKYLQPEQIEKIWLRLRGLRKYKKTSQRLRS

SEQ ID NO: 57704 - protein, 709 aa, Homo sapiens; identical to SEQ ID NO: 57700

SEQ ID NO: 57705 - protein, 1112 aa, Homo sapiens
MRRDERDAKAMRSLQPPDGAGSPPESLRNGYVKSCVSPLRQDPPRGFFFHLCRFCNVELRPPPASPQQPRRCSPFCRARLSLGALAAFVLALLLGAEPESWAAGAAWLRTLLSVCSHSLSPLFSIACAFFFLTCFLTRTKRGPGPGRSCGSWWLLALPACCYLGDFLVWQWWSWPWGDGDAGSAAPHTPPEAAAGRLLLVLSCVGLLLTLAHPLRLRHCVLVLLLASFVWWVSFTSLGSLPSALRPLLSGLVGGAGCLLALGLDHFFQIREAPLHPRLSSAAEEKVPVIRPRRRSSCVSLGETAASYYGSCKIFRRPSLPCISREQMILWDWDLKQWYKPHYQNSGGGNGVDLSVLNEARNMVSDLLTDPSLPPQVISSLRSISSLMGAFSGSCRPKINPLTPFPGFYPCSEIEDPAEKGDRKLNKGLNRNSLPTPQLRRSSGTSGLLPVEQSSRWDRNNGKRPHQEFGISSQGCYLNGPFNSNLLTIPKQRSSSVSLTHHVGLRRAGVLSSLSPVNSSNHGPVSTGSLTNRSPIEFPDTADFLNKPSVILQRSLGNAPNTPDFYQQLRNSDSNLCNSCGHQMLKYVSTSESDGTDCCSGKSGEEENIFSKESFKLMETQQEEETEKKDSRKLFQEGDKWLTEEAQSEQQTNIEQEVSLDLILVEEYDSLIEKMSNWNFPIFELVEKMGEKSGRILSQVMYTLFQDTGLLEIFKIPTQQFMNYFRALENGYRDIPYHNRIHATDVLHAVWYLTTRPVPGLQQIHNGCGTGNETDSDGRINHGRIAYISSKSCSNPDESYGCLSSNIPALELMALYVAAAMHDYDHPGRTNAFLVATNAPQAVLYNDRSVLENHHAASAWNLYLSRPEYNFLLHLDHVEFKRFRFLVIEAILATDLKKHFDFLAEFNAKANDVNSNGIEWSNENDRLLVCQVCIKLADINGPAKVRDLHLKWTEGIVNEFYEQGDEEANLGLPISPFMDRSSPQLAKLQESFITHIVGPLCNSYDAAGLLPGQWLEAEEDNDTESGDDEDGEELDTEDEEMENNLNPKPPRRKSRRRIFCQLMHHLTENHKIWKEIVEEEEKCKADGNKLQVENSSLPQADEIQVIEEADEEE

SEQ ID NO: 57706 - protein, 1061 aa, Homo sapiens
MRRDERDAKAMRSLQPPDGAGSPPESLRNGYVKSCVSPLRQDPPRGFFFHLCRFCNVELRPPPASPQQPRRCSPFCRARLSLGALAAFVLALLLGAEPESWAAGAAWLRTLLSVCSHSLSPLFSIACAFFFLTCFLTRTKRGPGPGRSCGSWWLLALPACCYLGDFLVWQWWSWPWGDGDAGSAAPHTPPEAAAGRLLLVLSCVGLLLTLAHPLRLRHCVLVLLLASFVWWVSFTSLGSLPSALRPLLSGLVGGAGCLLALGLDHFFQIREAPLHPRLSSAAEEKVPVIRPRRRSSCVSLGETAASYYGSCKIFRRPSLPCISREQMILWDWDLKQWYKPHYQNSGGGNGVDLSVLNEARNMVSDLLTDPSLPPQGLNRNSLPTPQLRRSSGTSGLLPVEQSSRWDRNNGKRPHQEFGISSQGCYLNGPFNSNLLTIPKQRSSSVSLTHHVGLRRAGVLSSLSPVNSSNHGPVSTGSLTNRSPIEFPDTADFLNKPSVILQRSLGNAPNTPDFYQQLRNSDSNLCNSCGHQMLKYVSTSESDGTDCCSGKSGEEENIFSKESFKLMETQQEEETEKKDSRKLFQEGDKWLTEEAQSEQQTNIEQEVSLDLILVEEYDSLIEKMSNWNFPIFELVEKMGEKSGRILSQVMYTLFQDTGLLEIFKIPTQQFMNYFRALENGYRDIPYHNRIHATDVLHAVWYLTTRPVPGLQQIHNGCGTGNETDSDGRINHGRIAYISSKSCSNPDESYGCLSSNIPALELMALYVAAAMHDYDHPGRTNAFLVATNAPQAVLYNDRSVLENHHAASAWNLYLSRPEYNFLLHLDHVEFKRFRFLVIEAILATDLKKHFDFLAEFNAKANDVNSNGIEWSNENDRLLVCQVCIKLADINGPAKVRDLHLKWTEGIVNEFYEQGDEEANLGLPISPFMDRSSPQLAKLQESFITHIVGPLCNSYDAAGLLPGQWLEAEEDNDTESGDDEDGEELDTEDEEMENNLNPKPPRRKSRRRIFCQLMHHLTENHKIWKEIVEEEEKCKADGNKLQVENSSLPQADEIQVIEEADEEE

SEQ ID NO: 57707 - protein, 860 aa, Homo sapiens
MARPRGLGRIPELQLVAFPVAVAAEDEAFLPEPLAPRAPRRPRSPPSSPVFFASPSPTFRRRLRLLRSCQDLGRQAWAGAGFEAENGPTPSPGRSPLDSQASPGLVLHAGAATSQRRESFLYRSDSDYDMSPKTMSRNSSVTSEAHAEDLIVTPFAQVLASLRSVRSNFSLLTNVPVPSNKRSPLGGPTPVCKATLSEETCQQLARETLEELDWCLEQLETMQTYRSVSEMASHKFKRMLNRELTHLSEMSRSGNQVSEYISTTFLDKQNEVEIPSPTMKEREKQQAPRPRPSQPPPPPVPHLQPMSQITGLKKLMHSNSLNNSNIPRFGVKTDQEELLAQELENLNKWGLNIFCVSDYAGGRSLTCIMYMIFQERDLLKKFRIPVDTMVTYMLTLEDHYHADVAYHNSLHAADVLQSTHVLLATPALDAVFTDLEILAALFAAAIHDVDHPGVSNQFLINTNSELALMYNDESVLENHHLAVGFKLLQEDNCDIFQNLSKRQRQSLRKMVIDMVLATDMSKHMTLLADLKTMVETKKVTSSGVLLLDNYSDRIQVLRNMVHCADLSNPTKPLELYRQWTDRIMAEFFQQGDRERERGMEISPMCDKHTASVEKSQVGFIDYIVHPLWETWADLVHPDAQEILDTLEDNRDWYYSAIRQSPSPPPEEESRGPGHPPLPDKFQFELTLEEEEEEEISMAQIPCTAQEALTAQGLSGVEEALDATIAWEASPAQESLEVMAQEASLEAELEAVYLTQQAQSTGSAPVAPDEFSSREEFVVAVSHSSPSALALQSPLLPAWRTLSVSEHAPGLPGLPSTAAEVEAQREHQAAKRACSACAGTFGEDTSALPAPGGGGSGGDPT

SEQ ID NO: 57708 - protein, 647 aa, Homo sapiens
MPLVDFFCETCSKPWLVGWWDQFKRMLNRELTHLSEMSRSGNQVSEYISTTFLDKQNEVEIPSPTMKEREKQQAPRPRPSQPPPPPVPHLQPMSQITGLKKLMHSNSLNNSNIPRFGVKTDQEELLAQELENLNKWGLNIFCVSDYAGGRSLTCIMYMIFQERDLLKKFRIPVDTMVTYMLTLEDHYHADVAYHNSLHAADVLQSTHVLLATPALDAVFTDLEILAALFAAAIHDVDHPGVSNQFLINTNSELALMYNDESVLENHHLAVGFKLLQEDNCDIFQNLSKRQRQSLRKMVIDMVLATDMSKHMTLLADLKTMVETKKVTSSGVLLLDNYSDRIQVLRNMVHCADLSNPTKPLELYRQWTDRIMAEFFQQGDRERERGMEISPMCDKHTASVEKSQVGFIDYIVHPLWETWADLVHPDAQEILDTLEDNRDWYYSAIRQSPSPPPEEESRGPGHPPLPDKFQFELTLEEEEEEEISMAQIPCTAQEALTAQGLSGVEEALDATIAWEASPAQESLEVMAQEASLEAELEAVYLTQQAQSTGSAPVAPDEFSSREEFVVAVSHSSPSALALQSPLLPAWRTLSVSEHAPGLPGLPSTAAEVEAQREHQAAKRACSACAGTFGEDTSALPAPGGGGSGGDPT

SEQ ID NO: 57709 - protein, 886 aa, Homo sapiens
MEPPTVPSERSLSLSLPGPREGQATLKPPPQHLWRQPRTPIRIQQRGYSDSAERAERERQPHRPIERADAMDTSDRPGLRTTRMSWPSSFHGTGTGSGGAGGGSSRRFEAENGPTPSPGRSPLDSQASPGLVLHAGAATSQRRESFLYRSDSDYDMSPKTMSRNSSVTSEAHAEDLIVTPFAQVLASLRSVRSNFSLLTNVPVPSNKRSPLGGPTPVCKATLSEETCQQLARETLEELDWCLEQLETMQTYRSVSEMASHKFKRMLNRELTHLSEMSRSGNQVSEYISTTFLDKQNEVEIPSPTMKEREKQQAPRPRPSQPPPPPVPHLQPMSQITGLKKLMHSNSLNNSNIPRFGVKTDQEELLAQELENLNKWGLNIFCVSDYAGGRSLTCIMYMIFQERDLLKKFRIPVDTMVTYMLTLEDHYHADVAYHNSLHAADVLQSTHVLLATPALDAVFTDLEILAALFAAAIHDVDHPGVSNQFLINTNSELALMYNDESVLENHHLAVGFKLLQEDNCDIFQNLSKRQRQSLRKMVIDMVLATDMSKHMTLLADLKTMVETKKVTSSGVLLLDNYSDRIQVLRNMVHCADLSNPTKPLELYRQWTDRIMAEFFQQGDRERERGMEISPMCDKHTASVEKSQVGFIDYIVHPLWETWADLVHPDAQEILDTLEDNRDWYYSAIRQSPSPPPEEESRGPGHPPLPDKFQFELTLEEEEEEEISMAQIPCTAQEALTAQGLSGVEEALDATIAWEASPAQESLEVMAQEASLEAELEAVYLTQQAQSTGSAPVAPDEFSSREEFVVAVSHSSPSALALQSPLLPAWRTLSVSEHAPGLPGLPSTAAEVEAQREHQAAKRACSACAGTFGEDTSALPAPGGGGSGGDPT

SEQ ID NO: 57710 - protein, 323 aa, Homo sapiens
MVLPSDQGFKLLGNVLQGPEPYRLLTSGLRLHQELENLNKWGLNIFCVSDYAGGRSLTCIMYMIFQERDLLKKFRIPVDTMVTYMLTLEDHYHADVAYHNSLHAADVLQSTHVLLATPALDAVFTDLEILAALFAAAIHDVDHPGVSNQFLINTNSELALMYNDESVLENHHLAVGFKLLQEDNCDIFQNLSKRQRQSLRKMVIDMVLATDMSKHMTLLADLKTMVETKKVTSSGVLLLDNYSDRIQVLRNMVHCADLSNPTKPLELYRQWTDRIMAEFFQQGDRERERGMEISPMCDKHTASVEKSQVQARGIDGRAQGEFY

SEQ ID NO: 57711 - protein, 864 aa, Homo sapiens
MKRSRSALSVAGTGDERSRETPESDRANMLGADLRRPRRRLSSGPGLGWAQPEPSDPGVPLPPRPTTLPLLIPPRISITRAENDSFEAENGPTPSPGRSPLDSQASPGLVLHAGAATSQRRESFLYRSDSDYDMSPKTMSRNSSVTSEAHAEDLIVTPFAQVLASLRSVRSNFSLLTNVPVPSNKRSPLGGPTPVCKATLSEETCQQLARETLEELDWCLEQLETMQTYRSVSEMASHKFKRMLNRELTHLSEMSRSGNQVSEYISTTFLDKQNEVEIPSPTMKEREKQQAPRPRPSQPPPPPVPHLQPMSQITGLKKLMHSNSLNNSNIPRFGVKTDQEELLAQELENLNKWGLNIFCVSDYAGGRSLTCIMYMIFQERDLLKKFRIPVDTMVTYMLTLEDHYHADVAYHNSLHAADVLQSTHVLLATPALDAVFTDLEILAALFAAAIHDVDHPGVSNQFLINTNSELALMYNDESVLENHHLAVGFKLLQEDNCDIFQNLSKRQRQSLRKMVIDMVLATDMSKHMTLLADLKTMVETKKVTSSGVLLLDNYSDRIQVLRNMVHCADLSNPTKPLELYRQWTDRIMAEFFQQGDRERERGMEISPMCDKHTASVEKSQVGFIDYIVHPLWETWADLVHPDAQEILDTLEDNRDWYYSAIRQSPSPPPEEESRGPGHPPLPDKFQFELTLEEEEEEEISMAQIPCTAQEALTAQGLSGVEEALDATIAWEASPAQESLEVMAQEASLEAELEAVYLTQQAQSTGSAPVAPDEFSSREEFVVAVSHSSPSALALQSPLLPAWRTLSVSEHAPGLPGLPSTAAEVEAQREHQAAKRACSACAGTFGEDTSALPAPGGGGSGGDPT

SEQ ID NO: 57712 - protein, 102 aa, Homo sapiens
MVETKKVTSSGVLLLDNYSDRIQVLRNMVHCADLSNPTKPLELYRQWTDRIMAEFFQQGDRERERGMEISPMCDKHTASVEKSQVGFIDYIVHPLWETWADL

SEQ ID NO: 57713 - protein, 825 aa, Homo sapiens
MRSGAAPRARPRPPALALPPTGPESLTHFPFSDEDTRRHPPGRSVSFEAENGPTPSPGRSPLDSQASPGLVLHAGAATSQRRESFLYRSDSDYDMSPKTMSRNSSVTSEAHAEDLIVTPFAQVLASLRSVRSNFSLLTNVPVPSNKRSPLGGPTPVCKATLSEETCQQLARETLEELDWCLEQLETMQTYRSVSEMASHKFKRMLNRELTHLSEMSRSGNQVSEYISTTFLDKQNEVEIPSPTMKEREKQQAPRPRPSQPPPPPVPHLQPMSQITGLKKLMHSNSLNNSNIPRFGVKTDQEELLAQELENLNKWGLNIFCVSDYAGGRSLTCIMYMIFQERDLLKKFRIPVDTMVTYMLTLEDHYHADVAYHNSLHAADVLQSTHVLLATPALDAVFTDLEILAALFAAAIHDVDHPGVSNQFLINTNSELALMYNDESVLENHHLAVGFKLLQEDNCDIFQNLSKRQRQSLRKMVIDMVLATDMSKHMTLLADLKTMVETKKVTSSGVLLLDNYSDRIQVLRNMVHCADLSNPTKPLELYRQWTDRIMAEFFQQGDRERERGMEISPMCDKHTASVEKSQVGFIDYIVHPLWETWADLVHPDAQEILDTLEDNRDWYYSAIRQSPSPPPEEESRGPGHPPLPDKFQFELTLEEEEEEEISMAQIPCTAQEALTAQGLSGVEEALDATIAWEASPAQESLEVMAQEASLEAELEAVYLTQQAQSTGSAPVAPDEFSSREEFVVAVSHSSPSALALQSPLLPAWRTLSVSEHAPGLPGLPSTAAEVEAQREHQAAKRACSACAGTFGEDTSALPAPGGGGSGGDPT

SEQ ID NO: 57714 - protein, 736 aa, Homo sapiens
MKKSRSVMTVMADDNVKDYFECSLSKSYSSSSNTLGIDLWRGRRCCSGNLQLPPLSQRQSERARTPEGDGISRPTTLPLTTLPSIAITTVSQECFDVENGPSPGRSPLDPQASSSAGLVLHATFPGHSQRRESFLYRSDSDYDLSPKAMSRNSSLPSEQHGDDLIVTPFAQVLASLRSVRNNFTILTNLHGTSNKRSPAASQPPVSRVNPQEESYQKLAMETLEELDWCLDQLETIQTYRSVSEMASNKFKRMLNRELTHLSEMSRSGNQVSEYISNTFLDKQNDVEIPSPTQKDREKKKKQQLMTQISGVKKLMHSSSLNNTSISRFGVNTENEDHLAKELEDLNKWGLNIFNVAGYSHNRPLTCIMYAIFQERDLLKTFRISSDTFITYMMTLEDHYHSDVAYHNSLHAADVAQSTHVLLSTPALDAVFTDLEILAAIFAAAIHDVDHPGVSNQFLINTNSELALMYNDESVLENHHLAVGFKLLQEEHCDIFMNLTKKQRQTLRKMVIDMVLATDMSKHMSLLADLKTMVETKKVTSSGVLLLDNYTDRIQVLRNMVHCADLSNPTKSLELYRQWTDRIMEEFFQQGDKERERGMEISPMCDKHTASVEKSQVGFIDYIVHPLWETWADLVQPDAQDILDTLEDNRNWYQSMIPQSPSPPLDEQNRDCQGLMEKFQFELTLDEEDSEGPEKEGEGHSYFSSTKTLCVIDPENRDSLGETDIDIATEDKSPVDT

SEQ ID NO: 57715 - protein, 736 aa, Homo sapiens; identical to SEQ ID NO: 57714

SEQ ID NO: 57716 - protein, 564 aa, Homo sapiens
MKEHGGTFSSTGISGGSGDSAMDSLQPLQPNYMPVCLFAEESYQKLAMETLEELDWCLDQLETIQTYRSVSEMASNKFKRMLNRELTHLSEMSRSGNQVSEYISNTFLDKQNDVEIPSPTQKDREKKKKQQLMTQISGVKKLMHSSSLNNTSISRFGVNTENEDHLAKELEDLNKWGLNIFNVAGYSHNRPLTCIMYAIFQERDLLKTFRISSDTFITYMMTLEDHYHSDVAYHNSLHAADVAQSTHVLLSTPALDAVFTDLEILAAIFAAAIHDVDHPGVSNQFLINTNSELALMYNDESVLENHHLAVGFKLLQEEHCDIFMNLTKKQRQTLRKMVIDMVLATDMSKHMSLLADLKTMVETKKVTSSGVLLLDNYTDRIQVLRNMVHCADLSNPTKSLELYRQWTDRIMEEFFQQGDKERERGMEISPMCDKHTASVEKSQVGFIDYIVHPLWETWADLVQPDAQDILDTLEDNRNWYQSMIPQSPSPPLDEQNRDCQGLMEKFQFELTLDEEDSEGPEKEGEGHSYFSSTKTLCVIDPENRDSLGETDIDIATEDKSPVDT

SEQ ID NO: 57717 - protein, 736 aa, Homo sapiens; identical to SEQ ID NO: 57714

SEQ ID NO: 57718 - protein, 721 aa, Homo sapiens
MTAKDSSKELTASEPEVCIKTFKEQMHLELELPRLPGNRPTSPKISPRSSPRNSPCFFRKLLVNKSIRQRRRFTVAHTCFDVENGPSPGRSPLDPQASSSAGLVLHATFPGHSQRRESFLYRSDSDYDLSPKAMSRNSSLPSEQHGDDLIVTPFAQVLASLRSVRNNFTILTNLHGTSNKRSPAASQPPVSRVNPQEESYQKLAMETLEELDWCLDQLETIQTYRSVSEMASNKFKRMLNRELTHLSEMSRSGNQVSEYISNTFLDKQNDVEIPSPTQKDREKKKKQQLMTQISGVKKLMHSSSLNNTSISRFGVNTENEDHLAKELEDLNKWGLNIFNVAGYSHNRPLTCIMYAIFQERDLLKTFRISSDTFITYMMTLEDHYHSDVAYHNSLHAADVAQSTHVLLSTPALDAVFTDLEILAAIFAAAIHDVDHPGVSNQFLINTNSELALMYNDESVLENHHLAVGFKLLQEEHCDIFMNLTKKQRQTLRKMVIDMVLATDMSKHMSLLADLKTMVETKKVTSSGVLLLDNYTDRIQVLRNMVHCADLSNPTKSLELYRQWTDRIMEEFFQQGDKERERGMEISPMCDKHTASVEKSQVGFIDYIVHPLWETWADLVQPDAQDILDTLEDNRNWYQSMIPQSPSPPLDEQNRDCQGLMEKFQFELTLDEEDSEGPEKEGEGHSYFSSTKTLCVIDPENRDSLGETDIDIATEDKSPVDT

SEQ ID NO: 57719 - protein, 680 aa, Homo sapiens
MQGPPAPAPVPGPGSPRGSPRGSPGLFRKLLVNQSIRLQRRFTVAHPLCFDLENGLSCGRRALDPQSSPGLGRIMQAPVPHSQRRESFLYRSDSDYELSPKAMSRNSSVASDLHGEDMIVTPFAQVLASLRTVRSNVAALARQQCLGAAKQGPVGNPSSSNQLPPAEDTGQKLALETLDELDWCLDQLETLQTRHSVGEMASNKFKRILNRELTHLSETSRSGNQVSEYISRTFLDQQTEVELPKVTAEEAPQPMSRISGLHGLCHSASLSSATVPRFGVQTDQEEQLAKELEDTNKWGLDVFKVAELSGNRPLTAIIFSIFQERDLLKTFQIPADTLATYLLMLEGHYHANVAYHNSLHAADVAQSTHVLLATPALEAVFTDLEILAALFASAIHDVDHPGVSNQFLINTNSELALMYNDASVLENHHLAVGFKLLQAENCDIFQNLSAKQRLSLRRMVIDMVLATDMSKHMNLLADLKTMVETKKVTSLGVLLLDNYSDRIQVLQNLVHCADLSNPTKPLPLYRQWTDRIMAEFFQQGDRERESGLDISPMCDKHTASVEKSQVGFIDYIAHPLWETWADLVHPDAQDLLDTLEDNREWYQSKIPRSPSDLTNPERDGPDRFQFELTLEEAEEEDEEEEEEGEETALAKEALELPDTELLSPEAGPDPGDLPLDNQRT

SEQ ID NO: 57720 - protein, 426 aa, Homo sapiens
MASNKFKRILNRELTHLSETSRSGNQVSEYISRTFLDQQTEVELPKVTAEEAPQPMSRISGLHGLCHSASLSSATVPRFGVQTDQEEQLAKELEDTNKWGLDVFKVAELSGNRPLTAIIFSIFQAVFTDLEILAALFASAIHDVDHPGVSNQFLINTNSELALMYNDASVLENHHLAVGFKLLQAENCDIFQNLSAKQRLSLRRMVIDMVLATDMSKHMNLLADLKTMVETKKVTSLGVLLLDNYSDRIQVLQNLVHCADLSNPTKPLPLYRQWTDRIMAEFFQQGDRERESGLDISPMCDKHTASVEKSQVGFIDYIAHPLWETWADLVHPDAQDLLDTLEDNREWYQSKIPRSPSDLTNPERDGPDRFQFELTLEEAEEEDEEEEEEGEETALAKEALELPDTELLSPEAGPDPGDLPLDNQRT

SEQ ID NO: 57721 - protein, 712 aa, Homo sapiens
MENLGVGEGAEACSRLSRSRGRHSMTRAPKHLWRQPRRPIRIQQRFYSDPDKSAGCRERDLSPRPELRKSRLSWPVSSCRRFDLENGLSCGRRALDPQSSPGLGRIMQAPVPHSQRRESFLYRSDSDYELSPKAMSRNSSVASDLHGEDMIVTPFAQVLASLRTVRSNVAALARQQCLGAAKQGPVGNPSSSNQLPPAEDTGQKLALETLDELDWCLDQLETLQTRHSVGEMASNKFKRILNRELTHLSETSRSGNQVSEYISRTFLDQQTEVELPKVTAEEAPQPMSRISGLHGLCHSASLSSATVPRFGVQTDQEEQLAKELEDTNKWGLDVFKVAELSGNRPLTAIIFSIFQERDLLKTFQIPADTLATYLLMLEGHYHANVAYHNSLHAADVAQSTHVLLATPALEAVFTDLEILAALFASAIHDVDHPGVSNQFLINTNSELALMYNDASVLENHHLAVGFKLLQAENCDIFQNLSAKQRLSLRRMVIDMVLATDMSKHMNLLADLKTMVETKKVTSLGVLLLDNYSDRIQVLQNLVHCADLSNPTKPLPLYRQWTDRIMAEFFQQGDRERESGLDISPMCDKHTASVEKSQVGFIDYIAHPLWETWADLVHPDAQDLLDTLEDNREWYQSKIPRSPSDLTNPERDGPDRFQFELTLEEAEEEDEEEEEEGEETALAKEALELPDTELLSPEAGPDPGDLPLDNQRT

SEQ ID NO: 57722 - protein, 606 aa, Homo sapiens
MQAPVPHSQRRESFLYRSDSDYELSPKAMSRNSSVASDLHGEDMIVTPFAQVLASLRTVRSNVAALARQQCLGAAKQGPVGNPSSSNQLPPAEDTGQKLALETLDELDWCLDQLETLQTRHSVGEMASNKFKRILNRELTHLSETSRSGNQVSEYISRTFLDQQTEVELPKVTAEEAPQPMSRISGLHGLCHSASLSSATVPRFGVQTDQEEQLAKELEDTNKWGLDVFKVAELSGNRPLTAIIFSIFQERDLLKTFQIPADTLATYLLMLEGHYHANVAYHNSLHAADVAQSTHVLLATPALEAVFTDLEILAALFASAIHDVDHPGVSNQFLINTNSELALMYNDASVLENHHLAVGFKLLQAENCDIFQNLSAKQRLSLRRMVIDMVLATDMSKHMNLLADLKTMVETKKVTSLGVLLLDNYSDRIQVLQNLVHCADLSNPTKPLPLYRQWTDRIMAEFFQQGDRERESGLDISPMCDKHTASVEKSQVGFIDYIAHPLWETWADLVHPDAQDLLDTLEDNREWYQSKIPRSPSDLTNPERDGPDRFQFELTLEEAEEEDEEEEEEGEETALAKEALELPDTELLSPEAGPDPGDLPLDNQRT

SEQ ID NO: 57723 - protein, 791 aa, Homo sapiens
GTQAGLRSGAPSGHRQLLGVGPTLSPSSTFYRFSTSGADSSSLSPPLPALGRTREQTLLGARSRGRVLLPAIPDPFLWRMENLGVGEGAEACSRLSRSRGRHSMTRAPKHLWRQPRRPIRIQQRFYSDPDKSAGCRERDLSPRPELRKSRLSWPVSSCRRFDLENGLSCGRRALDPQSSPGLGRIMQAPVPHSQRRESFLYRSDSDYELSPKAMSRNSSVASDLHGEDMIVTPFAQVLASLRTVRSNVAALARQQCLGAAKQGPVGNPSSSNQLPPAEDTGQKLALETLDELDWCLDQLETLQTRHSVGEMASNKFKRILNRELTHLSETSRSGNQVSEYISRTFLDQQTEVELPKVTAEEAPQPMSRISGLHGLCHSASLSSATVPRFGVQTDQEEQLAKELEDTNKWGLDVFKVAELSGNRPLTAIIFSIFQERDLLKTFQIPADTLATYLLMLEGHYHANVAYHNSLHAADVAQSTHVLLATPALEAVFTDLEILAALFASAIHDVDHPGVSNQFLINTNSELALMYNDASVLENHHLAVGFKLLQAENCDIFQNLSAKQRLSLRRMVIDMVLATDMSKHMNLLADLKTMVETKKVTSLGVLLLDNYSDRIQVLQNLVHCADLSNPTKPLPLYRQWTDRIMAEFFQQGDRERESGLDISPMCDKHTASVEKSQVGFIDYIAHPLWETWADLVHPDAQDLLDTLEDNREWYQSKIPRSPSDLTNPERDGPDRFQFELTLEEAEEEDEEEEEEGEETALAKEALELPDTELLSPEAGPDPGDLPLDNQRT

SEQ ID NO: 57724 - protein, 700 aa, Homo sapiens
AVQKRSRAAGARSSLHAVLAMQGPPAPAPVPGPGSPRGSPRGSPGLFRKLLVNQSIRLQRRFTVAHPLCFDLENGLSCGRRALDPQSSPGLGRIMQAPVPHSQRRESFLYRSDSDYELSPKAMSRNSSVASDLHGEDMIVTPFAQVLASLRTVRSNVAALARQQCLGAAKQGPVGNPSSSNQLPPAEDTGQKLALETLDELDWCLDQLETLQTRHSVGEMASNKFKRILNRELTHLSETSRSGNQVSEYISRTFLDQQTEVELPKVTAEEAPQPMSRISGLHGLCHSASLSSATVPRFGVQTDQEEQLAKELEDTNKWGLDVFKVAELSGNRPLTAIIFSIFQERDLLKTFQIPADTLATYLLMLEGHYHANVAYHNSLHAADVAQSTHVLLATPALEAVFTDLEILAALFASAIHDVDHPGVSNQFLINTNSELALMYNDASVLENHHLAVGFKLLQAENCDIFQNLSAKQRLSLRRMVIDMVLATDMSKHMNLLADLKTMVETKKVTSLGVLLLDNYSDRIQVLQNLVHCADLSNPTKPLPLYRQWTDRIMAEFFQQGDRERESGLDISPMCDKHTASVEKSQVGFIDYIAHPLWETWADLVHPDAQDLLDTLEDNREWYQSKIPRSPSDLTNPERDGPDRFQFELTLEEAEEEDEEEEEEGEETALAKEALELPDTELLSPEAGPDPGDLPLDNQRT

SEQ ID NO: 57725 - protein, 481 aa, Homo sapiens
MASNKFKRILNRELTHLSETSRSGNQVSEYISRTFLDQQTEVELPKVTAEEAPQPMSRISGLHGLCHSASLSSATVPRFGVQTDQEEQLAKELEDTNKWGLDVFKVAELSGNRPLTAIIFSIFQERDLLKTFQIPADTLATYLLMLEGHYHANVAYHNSLHAADVAQSTHVLLATPALEAVFTDLEILAALFASAIHDVDHPGVSNQFLINTNSELALMYNDASVLENHHLAVGFKLLQAENCDIFQNLSAKQRLSLRRMVIDMVLATDMSKHMNLLADLKTMVETKKVTSLGVLLLDNYSDRIQVLQNLVHCADLSNPTKPLPLYRQWTDRIMAEFFQQGDRERESGLDISPMCDKHTASVEKSQVGFIDYIAHPLWETWADLVHPDAQDLLDTLEDNREWYQSKIPRSPSDLTNPERDGPDRFQFELTLEEAEEEDEEEEEEGEETALAKEALELPDTELLSPEAGPDPGDLPLDNQRT

SEQ ID NO: 57726 - protein, 821 aa, Homo sapiens
MQRYRGRQTVFGAGVLGGVSSAPSFNTPSPRSSPLFYPSAPSGHRQLLGVGPTLSPSSTFYRFSTSGADSSSLSPPLPALGRTREQTLLGARSRGRVLLPAIPDPFLWRMENLGVGEGAEACSRLSRSRGRHSMTRAPKHLWRQPRRPIRIQQRFYSDPDKSAGCRERDLSPRPELRKSRLSWPVSSCRRFDLENGLSCGRRALDPQSSPGLGRIMQAPVPHSQRRESFLYRSDSDYELSPKAMSRNSSVASDLHGEDMIVTPFAQVLASLRTVRSNVAALARQQCLGAAKQGPVGNPSSSNQLPPAEDTGQKLALETLDELDWCLDQLETLQTRHSVGEMASNKFKRILNRELTHLSETSRSGNQVSEYISRTFLDQQTEVELPKVTAEEAPQPMSRISGLHGLCHSASLSSATVPRFGVQTDQEEQLAKELEDTNKWGLDVFKVAELSGNRPLTAIIFSIFQERDLLKTFQIPADTLATYLLMLEGHYHANVAYHNSLHAADVAQSTHVLLATPALEAVFTDLEILAALFASAIHDVDHPGVSNQFLINTNSELALMYNDASVLENHHLAVGFKLLQAENCDIFQNLSAKQRLSLRRMVIDMVLATDMSKHMNLLADLKTMVETKKVTSLGVLLLDNYSDRIQVLQNLVHCADLSNPTKPLPLYRQWTDRIMAEFFQQGDRERESGLDISPMCDKHTASVEKSQVGFIDYIAHPLWETWADLVHPDAQDLLDTLEDNREWYQSKIPRSPSDLTNPERDGPDRFQFELTLEEAEEEDEEEEEEGEETALAKEALELPDTELLSPEAGPDPGDLPLDNQRT

SEQ ID NO: 57727 - protein, 518 aa, Homo sapiens
PLRIRPLLPTAYHLLPTGPGQSADRSEQRGGPCPPAMPRSSQFKRILNRELTHLSETSRSGNQVSEYISRTFLDQQTEVELPKVTAEEAPQPMSRISGLHGLCHSASLSSATVPRFGVQTDQEEQLAKELEDTNKWGLDVFKVAELSGNRPLTAIIFSIFQERDLLKTFQIPADTLATYLLMLEGHYHANVAYHNSLHAADVAQSTHVLLATPALEAVFTDLEILAALFASAIHDVDHPGVSNQFLINTNSELALMYNDASVLENHHLAVGFKLLQAENCDIFQNLSAKQRLSLRRMVIDMVLATDMSKHMNLLADLKTMVETKKVTSLGVLLLDNYSDRIQVLQNLVHCADLSNPTKPLPLYRQWTDRIMAEFFQQGDRERESGLDISPMCDKHTASVEKSQVGFIDYIAHPLWETWADLVHPDAQDLLDTLEDNREWYQSKIPRSPSDLTNPERDGPDRFQFELTLEEAEEEDEEEEEEGEETALAKEALELPDTELLSPEAGPDPGDLPLDNQRT

SEQ ID NO: 57728 - protein, 2240 aa, Homo sapiens
MEQTWTRDYFAEDDGEMVPRTSHTAAFLSDTKDRGPPVQSQIWRSGEKVPFVQTYSLRAFEKPPQVQTQALRDFEKHLNDLKKENFSLKLRIYFLEERMQQKYEASREDIYKRNIELKVEVESLKRELQDKKQHLDKTWADVENLNSQNEAELRRQFEERQQETEHVYELLENKIQLLQEESRLAKNEAARMAALVEAEKECNLELSEKLKGVTKNWEDVPGDQVKPDQYTEALAQRDKRIEELNQSLAAQERLVEQLSREKQQLLHLLEEPTSMEVQPMTEELLKQQKLNSHETTITQQSVSDSHLAELQEKIQQTEATNKILQEKLNEMSYELKCAQESSQKQDGTIQNLKETLKSRERETEELYQVIEGQNDTMAKLREMLHQSQLGQLHSSEGTSPAQQQVALLDLQSALFCSQLEIQKLQRVVRQKERQLADAKQCVQFVEAAAHESEQQKEASWKHNQELRKALQQLQEELQNKSQQLRAWEAEKYNEIRTQEQNIQHLNHSLSHKEQLLQEFRELLQYRDNSDKTLEANEMLLEKLRQRIHDKAVALERAIDEKFSALEEKEKELRQLRLAVRERDHDLERLRDVLSSNEATMQSMESLLRAKGLEVEQLSTTCQNLQWLKEEMETKFSRWQKEQESIIQQLQTSLHDRNKEVEDLSATLLCKLGPGQSEIAEELCQRLQRKERMLQDLLSDRNKQVLEHEMEIQGLLQSVSTREQESQAAAEKLVQALMERNSELQALRQYLGGRDSLMSQAPISNQQAEVTPTGCLGKQTDQGSMQIPSRDDSTSLTAKEDVSIPRSTLGDLDTVAGLEKELSNAKEELELMAKKERESQMELSALQSMMAVQEEELQVQAADMESLTRNIQIKEDLIKDLQMQLVDPEDIPAMERLTQEVLLLREKVASVESQGQEISGNRRQQLLLMLEGLVDERSRLNEALQAERQLYSSLVKFHAHPESSERDRTLQVELEGAQVLRSRLEEVLGRSLERLNRLETLAAIGGAAAGDDTEDTSTEFTDSIEEEAAHHSHQQLVKVALEKSLATVETQNPSFSPPSPMGGDSNRCLQEEMLHLRAEFHQHLEEKRKAEEELKELKAQIEEAGFSSVSHIRNTMLSLCLENAELKEQMGEAMSDGWEIEEDKEKGELDNQSQPRDPGPQSAFSLPGSTQHLRSQLSQCKQRYQDLQEKLLLSEATVFAQANELEKYRVMLTGESLVKQDSKQIQVDLQDLGYETCGRSENEAEREETTSPECEEHNSLKEMVLMEGLCSEQGRRGSTLASSSERKPLENQLGKQEEFRVYGKSENILVLRKDIKDLKAQLQNANKVIQNLKSRVRSLSVTSDYSSSLERPWKLRAVGTLEGSSPHSVPDEDEGWLSDGTGAFYSPGLQAKKDLESLIQRVSQLEAQLPKNGLEEKLAEELRSASWPGKYDSLIQDQARELSYLRQKIREGRGICYLITRHAKDTVKSFEDLLRSNDIDYYLGQSFREQLAQGSQLTERLTSKLSTKDHKSEKDQAGLEPLALRLSRELQEKEKVIEVLQAKLDARSLTPSSSHALSDSHRSPSSTSFLSDELEACSDMDIVSEYTHYEEKKASPSHSDSIHHSSHSAVLSSKPSSTSASQGAKAESNSNPISLPTPQNTPKEANQAHSGASTVPPASTATLLSNDLEADSSYYLNSAQPHSPPRGTIELGRILEPGYLGSSGKWDVMRPQKGSVSGDLSSGSSVYQLNSKPTGADLLEEHLGEIRNLRQRLEESICINDRLREQLEHRLTSTARGRGSTSNFYSQGLESIPQLCNENRVLREDNRRLQAQLSHVSREHSQETESLREALLSSRSHLQELEKELEHQKVERQQLLEDLREKQQEVLHFREERLSLQENDSRLQHKLVLLQQQCEEKQQLFESLQSELQIYEALYGNSKKGLKAYSLDACHQIPLSSDLSHLVAEVRALRGQLEQSIQGNNCLRLQLQQQLESGAGKASLSPSSINQNFPASTDPGNKQLLLQDSAVSPPVRDVGMNSPALVFPSSASSTPGSETPIINRANGLGLDTSPVMKTPPKLEGDATDGSFANKHGRHVIGHIDDYSALRQQIAEGKLLVKKIVSLVRSACSFPGLEAQGTEVLGSKGIHELRSSTSALHHALEESASLLTMFWRAALPSTHIPVLPGKVGESTERELLELRTKVSKQERLLQSTTEHLKNANQQKESMEQFIVSQLTRTHDVLKKARTNLEVKSLRALPCTPAL

SEQ ID NO: 57729 - protein, 1132 aa, Homo sapiens
MKEICRICARELCGNQRRWIFHTASKLNLQVLLSHVLGKDVPRDGKAEFACSKCAFMLDRIYRFDTVIARIEALSIERLQKLLLEKDRLKFCIASMYRKNNDDSGAEIKAGNGTVDMSVLPDARYSALLQEDFAYSGFECWVENEDQIQEPHSCHGSEGPGNRPRRCRGCAALRVADSDYEAICKVPRKVARSISCGPSSRWSTSICTEEPALSEVGPPDLASTKVPPDGESMEEETPGSSVESLDASVQASPPQQKDEETERSAKELGKCDCCSDDQAPQHGCNHKLELALSMIKGLDYKPIQSPRGSRLPIPVKSSLPGAKPGPSMTDGVSSGFLNRSLKPLYKTPVSYPLELSDLQELWDDLCEDYLPLRVQPMTEELLKQQKLNSHETTITQQSVSDSHLAELQEKIQQTEATNKILQEKLNEMSYELKCAQESSQKQDGTIQNLKETLKSRERETEELYQVIEGQNDTMAKLREMLHQSQLGQLHSSEGTSPAQQQVALLDLQSALFCSQLEIQKLQRVVRQKERQLADAKQCVQFVEAAAHESEQQKEASWKHNQELRKALQQLQEELQNKSQQLRAWEAEKYNEIRTQEQNIQHLNHSLSHKEQLLQEFRELLQYRDNSDKTLEANEMLLEKLRQRIHDKAVALERAIDEKFSALEEKEKELRQLRLAVRERDHDLERLRDVLSSNEATMQSMESLLRAKGLEVEQLSTTCQNLQWLKEEMETKFSRWQKEQESIIQQLQTSLHDRNKEVEDLSATLLCKLGPGQSEIAEELCQRLQRKERMLQDLLSDRNKQVLEHEMEIQGLLQSVSTREQESQAAAEKLVQALMERNSELQALRQYLGGRDSLMSQAPISNQQAEVTPTGCLGKQTDQGSMQIPSRDDSTSLTAKEDVSIPRSTLGDLDTVAGLEKELSNAKEELELMAKKERESQMELSALQSMMAVQEEELQVQAADMESLTRNIQIKEDLIKDLQMQLVDPEDIPAMERLTQEVLLLREKVASVESQGQEISGNRRQQLLLMLEGLVDERSRLNEALQAERQLYSSLVKFHAHPESSERDRTLQVELEGAQVLRSRLEEVLGRSLERLNRLETLAAIGGAAAGDDTEDTSTEFTDSIEEEAAHHSHQQL

SEQ ID NO: 57730 - protein, 173 aa, Homo sapiens
MSNGYRTLSQHLNDLKKENFSLKLRIYFLEERMQQKYEASREDIYKRNIELKVEVESLKRELQDKKQHLDKTWADVENLNSQNEAELRRQFEERQQETEHVYELLENKIQLLQEESRLAKNEAARMAALVEAEKECNLELSEKLKGVTKNWEDVPGDQVKPDQYTEALAQRDK

SEQ ID NO: 57731 - protein, 310 aa, Homo sapiens
MKGTDSGSCCRRRCDFGCCCRASRRAHYTPYRSGDATRTPQSPRQTPSRERRRPEPAGSWAAAAEEEEAAAAATPWMRDYFAEDDGEMVPRTSHTAAFLSDTKDRGPPVQSQIWRSGEKVPFVQTYSLRAFEKPPQVQTQALRDFEKHLNDLKKENFSLKLRIYFLEERMQQKYEASREDIYKRNIELKVEVESLKRELQDKKQHLDKTWADVENLNSQNEAELRRQFEERQQETEHVYELLENKIQLLQEESRLAKNEAARMAALVEAEKECNLELSEKLKGVTKNWEDVPGDQVKPDQYTEALAQRDK

SEQ ID NO: 57732 - protein, 969 aa, Homo sapiens
MSNGYRTLSQHLNDLKKENFSLKLRIYFLEERMQQKYEASREDIYKRNIELKVEVESLKRELQDKKQHLDKTWADVENLNSQNEAELRRQFEERQQETEHVYELLENKIQLLQEESRLAKNEAARMAALVEAEKECNLELSEKLKGVTKNWEDVPGDQVKPDQYTEALAQRDKRIEELNQSLAAQERLVEQLSREKQQLLHLLEEPTSMEVQPMTEELLKQQKLNSHETTITQQSVSDSHLAELQEKIQQTEATNKILQEKLNEMSYELKCAQESSQKQDGTIQNLKETLKSRERETEELYQVIEGQNDTMAKLREMLHQSQLGQLHSSEGTSPAQQQVALLDLQSALFCSQLEIQKLQRVVRQKERQLADAKQCVQFVEAAAHESEQQKEASWKHNQELRKALQQLQEELQNKSQQLRAWEAEKYNEIRTQEQNIQHLNHSLSHKEQLLQEFRELLQYRDNSDKTLEANEMLLEKLRQRIHDKAVALERAIDEKFSALEEKEKELRQLRLAVRERDHDLERLRDVLSSNEATMQSMESLLRAKGLEVEQLSTTCQNLQWLKEEMETKFSRWQKEQESIIQQLQTSLHDRNKEVEDLSATLLCKLGPGQSEIAEELCQRLQRKERMLQDLLSDRNKQVLEHEMEIQGLLQSVSTREQESQAAAEKLVQALMERNSELQALRQYLGGRDSLMSQAPISNQQAEVTPTGCLGKQTDQGSMQIPSRDDSTSLTAKEDVSIPRSTLGDLDTVAGLEKELSNAKEELELMAKKERESQMELSALQSMMAVQEEELQVQAADMESLTRNIQIKEDLIKDLQMQLVDPEDIPAMERLTQEVLLLREKVASVESQGQEISGNRRQQLLLMLEGLVDERSRLNEALQAERQLYSSLVKFHAHPESSERDRTLQVELEGAQVLRSRLEEVLGRSLERLNRLETLAAIGGAAAGDDTEDTSTEFTDSIEEEAAHHSHQQL

SEQ ID NO: 57733 - protein, 988 aa, Homo sapiens [sequence omitted]

SEQ ID NO: 57734 - protein, 1131 aa, Homo sapiens
MKEICRICARELCGNQRRWIFHTASKLNLQVLLSHVLGKDVPRDGKAEFACSKCAFMLDRIYRFDTVIARIEALSIERLQKLLLEKDRLKFCIASMYRKNNDDSGAEIKAGNGTVDMSVLPDARYSALLQEDFAYSGFECWVENEDQIQEPHSCHGSEGPGNRPRRCRGCAALRVADSDYEAICKVPRKVARSISCGPSSRWSTSICTEEPALSEVGPPDLASTKVPPDGESMEEETPGSSVESLDASVQASPPQQKDEETERSAKELGKCDCCSDDQAPQHGCNHKLELALSMIKGLDYKPIQSPRGSRLPIPVKSSLPGAKPGPSMTDGVSSGFLNRSLKPLYKTPVSYPLELSDLQELWDDLCEDYLPLRVQPMTEELLKQQKLNSHETTITQQSVSDSHLAELQEKIQQTEATNKILQEKLNEMSYELKCAQESSQKQDGTIQNLKETLKSRERETEELYQVIEGQNDTMAKLREMLHQSQLGQLHSSEGTSPAQQQVALLDLQSALFCSQLEIQKLQRVVRQKERQLADAKQCVQFVEAAAHESEQQKEASWKHNQELRKALQQLQEELQNKSQQLRAWEAEKYNEIRTQEQNIQHLNHSLSHKEQLLQEFRELLQYRDNSDKTLEANEMLLEKLRQRIHDKAVALERAIDEKFSALEEKEKELRQLRLAVRERDHDLERLRDVLSSNEATMQSMESLLRAKGLEVEQLSTTCQNLQWLKEEMETKFSRWQKEQESIIQQLQTSLHDRNKEVEDLSATLLCKLGPGQSEIAEELCQRLQRKERMLQDLLSDRNKQVLEHEMEIQGLLQSVSTREQESQAAAEKLVQALMERNSELQALRQYLGGRDSLMSQAPISNQQAEVTPTGCLGKQTDQGSMQIPSRDDSTSLTAKEDVSIPRSTLGDLDTVAGLEKELSNAKEELELMAKKERESQMELSALQSMMAVQEEELQVQAADMESLTRNIQIKEDLIKDLQMQLVDPEDIPAMERLTQEVLLLREKVASVESQGQEISGNRRQQLLLMLEGLVDERSRLNEALQAERQLYSSLVKFHAHPESSERDRTLQVELEGAQVLRSRLEEVLGRSLERLNRLETLAAIGGAAAGDDTEDTSTEFTDSIEEEAAHHSHQQ

SEQ ID NO: 57735 - protein, 2346 aa, Homo sapiens
MSNGYRTLSQHLNDLKKENFSLKLRIYFLEERMQQKYEASREDIYKRNIELKVEVESLKRELQDKKQHLDKTWADVENLNSQNEAELRRQFEERQQETEHVYELLENKIQLLQEESRLAKNEAARMAALVEAEKECNLELSEKLKGVTKNWEDVPGDQVKPDQYTEALAQRDKRIEELNQSLAAQERLVEQLSREKQQLLHLLEEPTSMEVQPMTEELLKQQKLNSHETTITQQSVSDSHLAELQEKIQQTEATNKILQEKLNEMSYELKCAQESSQKQDGTIQNLKETLKSRERETEELYQVIEGQNDTMAKLREMLHQSQLGQLHSSEGTSPAQQQVALLDLQSALFCSQLEIQKLQRVVRQKERQLADAKQCVQFVEAAAHESEQQKEASWKHNQELRKALQQLQEELQNKSQQLRAWEAEKYNEIRTQEQNIQHLNHSLSHKEQLLQEFRELLQYRDNSDKTLEANEMLLEKLRQRIHDKAVALERAIDEKFSALEEKEKELRQLRLAVRERDHDLERLRDVLSSNEATMQSMESLLRAKGLEVEQLSTTCQNLQWLKEEMETKFSRWQKEQESIIQQLQTSLHDRNKEVEDLSATLLCKLGPGQSEIAEELCQRLQRKERMLQDLLSDRNKQVLEHEMEIQGLLQSVSTREQESQAAAEKLVQALMERNSELQALRQYLGGRDSLMSQAPISNQQAEVTPTGCLGKQTDQGSMQIPSRDDSTSLTAKEDVSIPRSTLGDLDTVAGLEKELSNAKEELELMAKKERESQMELSALQSMMAVQEEELQVQAADMESLTRNIQIKEDLIKDLQMQLVDPEDIPAMERLTQEVLLLREKVASVESQGQEISGNRRQQLLLMLEGLVDERSRLNEALQAERQLYSSLVKFHAHPESSERDRTLQVELEGAQVLRSRLEEVLGRSLERLNRLETLAAIGGAAAGDDTEDTSTEFTDSIEEEAAHHSHQQLVKVALEKSLATVETQNPSFSPPSPMGGDSNRCLQEEMLHLRAEFHQHLEEKRKAEEELKELKAQIEEAGFSSVSHIRNTMLSLCLENAELKEQMGEAMSDGWEIEEDKEKGEVMVETVVTKEGLSESSLQAEFRKLQGKLKNAHNIINLLKEQLVLSSKEGNSKLTPELLVHLTSTIERINTELVGSPGKHQHQEEGNVTVRPFPRPQSLDLGATFTVDAHQLDNQSQPRDPGPQSAFSLPGSTQHLRSQLSQCKQRYQDLQEKLLLSEATVFAQANELEKYRVMLTGESLVKQDSKQIQVDLQDLGYETCGRSENEAEREETTSPECEEHNSLKEMVLMEGLCSEQGRRGSTLASSSERKPLENQLGKQEEFRVYGKSENILVLRKDIKDLKAQLQNANKVIQNLKSRVRSLSVTSDYSSSLERPWKLRAVGTLEGSSPHSVPDEDEGWLSDGTGAFYSPGLQAKKDLESLIQRVSQLEAQLPKNGLEEKLAEELRSASWPGKYDSLIQDQARELSYLRQKIREGRGICYLITRHAKDTVKSFEDLLRSNDIDYYLGQSFREQLAQGSQLTERLTSKLSTKDHKSEKDQAGLEPLALRLSRELQEKEKVIEVLQAKLDARSLTPSSSHALSDSHRSPSSTSFLSDELEACSDMDIVSEYTHYEEKKASPSHSDSIHHSSHSAVLSSKPSSTSASQGAKAESNSNPISLPTPQNTPKEANQAHSGFHFHSIPKLASLPQAPLPSAPSSFLPFSPTGPLLLGCCETPVVSLAEAQQELQMLQKQLGESASTVPPASTATLLSNDLEADSSYYLNSAQPHSPPRGTIELGRILEPGYLGSSGKWDVMRPQKGSVSGDLSSGSSVYQLNSKPTGADLLEEHLGEIRNLRQRLEESICINDRLREQLEHRLTSTARGRGSTSNFYSQGLESIPQLCNENRVLREDNRRLQAQLSHVSREHSQETESLREALLSSRSHLQELEKELEHQKVERQQLLEDLREKQQEVLHFREERLSLQENDSRLQHKLVLLQQQCEEKQQLFESLQSELQIYEALYGNSKKGLKAYSLDACHQIPLSSDLSHLVAEVRALRGQLEQSIQGNNCLRLQLQQQLESGAGKASLSPSSINQNFPASTDPGNKQLLLQDSAVSPPVRDVGMNSPALVFPSSASSTPGSETPIINRANGLGLDTSPVMKTPPKLEGDATDGSFANKHGRHVIGHIDDYSALRQQIAEGKLLVKKIVSLVRSACSFPGLEAQGTEVLGSKGIHELRSSTSALHHALEESASLLTMFWRAALPSTHIPVLPGKVGESTERELLELRTKVSKQERLLQSTTEHLKNANQQKESMEQFIVSQLTRTHDVLKKARTNLEVKSLRALPCTPAL

SEQ ID NO: 57736 - protein, 2362 aa, Homo sapiens
MSNGYRTLSQHLNDLKKENFSLKLRIYFLEERMQQKYEASREDIYKRNIELKVEVESLKRELQDKKQHLDKTWADVENLNSQNEAELRRQFEERQQETEHVYELLENKIQLLQEESRLAKNEAARMAALVEAEKECNLELSEKLKGVTKNWEDVPGDQVKPDQYTEALAQRDKRIEELNQSLAAQERLVEQLSREKQQLLHLLEEPTSMEVQPMTEELLKQQKLNSHETTITQQSVSDSHLAELQEKIQQTEATNKILQEKLNEMSYELKCAQESSQKQDGTIQNLKETLKSRERETEELYQVIEGQNDTMAKLREMLHQSQLGQLHSSEGTSPAQQQVALLDLQSALFCSQLEIQKLQRVVRQKERQLADAKQCVQFVEAAAHESEQQKEASWKHNQELRKALQQLQEELQNKSQQLRAWEAEKYNEIRTQEQNIQHLNHSLSHKEQLLQEFRELLQYRDNSDKTLEANEMLLEKLRQRIHDKAVALERAIDEKFSALEEKEKELRQLRLAVRERDHDLERLRDVLSSNEATMQSMESLLRAKGLEVEQLSTTCQNLQWLKEEMETKFSRWQKEQESIIQQLQTSLHDRNKEVEDLSATLLCKLGPGQSEIAEELCQRLQRKERMLQDLLSDRNKQVLEHEMEIQGLLQSVSTREQESQAAAEKLVQALMERNSELQALRQYLGGRDSLMSQAPISNQQAEVTPTGCLGKQTDQGSMQIPSRDDSTSLTAKEDVSIPRSTLGDLDTVAGLEKELSNAKEELELMAKKERESQMELSALQSMMAVQEEELQVQAADMESLTRNIQIKEDLIKDLQMQLVDPEDIPAMERLTQEVLLLREKVASVESQGQEISGNRRQQLLLMLEGLVDERSRLNEALQAERQLYSSLVKFHAHPESSERDRTLQVELEGAQVLRSRLEEVLGRSLERLNRLETLAAIGGAAAGDDTEDTSTEFTDSIEEEAAHHSHQQLVKVALEKSLATVETQNPSFSPPSPMGGDSNRCLQEEMLHLRAEFHQHLEEKRKAEEELKELKAQIEEAGFSSVSHIRNTMLSLCLENAELKEQMGEAMSDGWEIEEDKEKGEVMVETVVTKEGLSESSLQAEFRKLQGKLKNAHNIINLLKEQLVLSSKEGNSKLTPELLVHLTSTIERINTELVGSPGKHQHQEEGNVTVRPFPRPQSLDLGATFTVDAHQLDNQSQPRDPGPQSAFSLPGSTQHLRSQLSQCKQRYQDLQEKLLLSEATVFAQANELEKYRVMLTGESLVKQDSKQIQVDLQDLGYETCGRSENEAEREETTSPECEEHNSLKEMVLMEGLCSEQGRRGSTLASSSERKPLENQLGKQEEFRVYGKSENILVLRKDIKDLKAQLQNANKVIQNLKSRVRSLSVTSDYSSSLERPWKLRAVGTLEGSSPHSVPDEDEGWLSDGTGAFYSPGLQAKKDLESLIQRVSQLEAQLPKNGLEEKLAEELRSASWPGKYDSLIQDQARELSYLRQKIREGRGICYLITRHAKDTVKSFEDLLRSNDIDYYLGQSFREQLAQGSQLTERLTSKLSTKDHKSEKDQAGLEPLALRLSRELQEKEKVIEVLQAKLDARSLTPSSSHALSDSHRSPSSTSFLSDELEACSDMDIVSEYTHYEEKKASPSHSDSIHHSSHSAVLSSKPSSTSASQGAKAESNSNPISLPTPQNTPKEANQAHSGFHFHSIPKLASLPQAPLPSAPSSFLPFSPTGPLLLGCCETPVVSLAEAQQELQMLQKQLGESASTVPPASTATLLSNDLEADSSYYLNSAQPHSPPRGTIELGRILEPGYLGSSGKWDVMRPQKGSVSGDLSSGSSVYQLNSKPTGADLLEEHLGEIRNLRQRLEESICINDRLREQLEHRLTSTARGRGSTSNFYSQGLESIPQLCNENRVLREDNRRLQAQLSHVSREHSQETESLREALLSSRSHLQELEKELEHQKVERQQLLEDLREKQQEVLHFREERLSLQENDSRLQHKLVLLQQQCEEKQQLFESLQSELQIYEALYGNSKKGLKAYSLDACHQIPLSSDLSHLVAEVRALRGQLEQSIQGNNCLRLQLQQQLESGAGKASLSPSSINQNFPASTDPGNKQLLLQDSAVSPPVRDVGMNSPALVFPSSASSTPGSETPIINRANGLGLDTSPVMKTPPKLEGDATDGSFANKHGRHVIGHIDDYSALRQQIAEGKLLVKKIVSLVRSACSFPGLEAQGTEVLGSKGIHELRSSTSALHHALEESASLLTMFWRAALPSTHIPVLPGKVGESTERELLELRTKVSKQERLLQSTTEHLKNANQQKESMEQFIVSQLTRTHDVLKKARTNLEEPCKKRSHQKSLKQQERWACPPFVQLPIC

SEQ ID NO: 57737 - protein, 518 aa, Homo sapiens
MPEANYLLSVSWGYIKFKRMLNRELTHLSEMSRSGNQVSEFISNTFLDKQHEVEIPSPTQKEKEKKKRPMSQISGVKKLMHSSSLTNSSIPRFGVKTEQEDVLAKELEDVNKWGLHVFRIAELSGNRPLTVIMHTIFQERDLLKTFKIPVDTLITYLMTLEDHYHADVAYHNNIHAADVVQSTHVLLSTPALEAVFTDLEILAAIFASAIHDVDHPGVSNQFLINTNSELALMYNDSSVLENHHLAVGFKLLQEENCDIFQNLTKKQRQSLRKMVIDIVLATDMSKHMNLLADLKTMVETKKVTSSGVLLLDNYSDRIQVLQNMVHCADLSNPTKPLQLYRQWTDRIMEEFFRQGDRERERGMEISPMCDKHNASVEKSQVGFIDYIVHPLWETWADLVHPDAQDILDTLEDNREWYQSTIPQSPSPAPDDPEEGRQGQTEKFQFELTLEEDGESDTEKDSGSQVEEDTSCSDSKTLCTQDSESTEIPLDEQVEEEAVGEEEESQPEACVIDDRSPDT

SEQ ID NO: 57738 - protein, 809 aa, Homo sapiens
MEAEGSSAPARAGSGEGSDSAGGATLKAPKHLWRHEQHHQYPLRQPQFRLLHPHHHLPPPPPPSPQPQPQCPLQPPPPPPLPPPPPPPGAARGRYASSGATGRVRHRGYSDTERYLYCRAMDRTSYAVETGHRPGLKKSRMSWPSSFQGLRRFDVDNGTSAGRSPLDPMTSPGSGLILQANFVHSQRRESFLYRSDSDYDLSPKSMSRNSSIASDIHGDDLIVTPFAQVLASLRTVRNNFAALTNLQDRAPSKRSPMCNQPSINKATITEEAYQKLASETLEELDWCLDQLETLQTRHSVSEMASNKFKRMLNRELTHLSEMSRSGNQVSEFISNTFLDKQHEVEIPSPTQKEKEKKKRPMSQISGVKKLMHSSSLTNSSIPRFGVKTEQEDVLAKELEDVNKWGLHVFRIAELSGNRPLTVIMHTIFQERDLLKTFKIPVDTLITYLMTLEDHYHADVAYHNNIHAADVVQSTHVLLSTPALEAVFTDLEILAAIFASAIHDVDHPGVSNQFLINTNSELALMYNDSSVLENHHLAVGFKLLQEENCDIFQNLTKKQRQSLRKMVIDIVLATDMSKHMNLLADLKTMVETKKVTSSGVLLLDNYSDRIQVLQNMVHCADLSNPTKPLQLYRQWTDRIMEEFFRQGDRERERGMEISPMCDKHNASVEKSQVGFIDYIVHPLWETWADLVHPDAQDILDTLEDNREWYQSTIPQSPSPAPDDPEEGRQGQTEKFQFELTLEEDGESDTEKDSGSQVEEDTSCSDSKTLCTQDSESTEIPLDEQVEEEAVGEEEESQPEACVIDDRSPDT

SEQ ID NO: 57739 - protein, 678 aa, Homo sapiens [sequence omitted]

SEQ ID NO: 57740 - protein, 507 aa, Homo sapiens
MASNKFKRMLNRELTHLSEMSRSGNQVSEFISNTFLDKQHEVEIPSPTQKEKEKKKRPMSQISGVKKLMHSSSLTNSSIPRFGVKTEQEDVLAKELEDVNKWGLHVFRIAELSGNRPLTVIMHTIFQERDLLKTFKIPVDTLITYLMTLEDHYHADVAYHNNIHAADVVQSTHVLLSTPALEAVFTDLEILAAIFASAIHDVDHPGVSNQFLINTNSELALMYNDSSVLENHHLAVGFKLLQEENCDIFQNLTKKQRQSLRKMVIDIVLATDMSKHMNLLADLKTMVETKKVTSSGVLLLDNYSDRIQVLQNMVHCADLSNPTKPLQLYRQWTDRIMEEFFRQGDRERERGMEISPMCDKHNASVEKSQVGFIDYIVHPLWETWADLVHPDAQDILDTLEDNREWYQSTIPQSPSPAPDDPEEGRQGQTEKFQFELTLEEDGESDTEKDSGSQVEEDTSCSDSKTLCTQDSESTEIPLDEQVEEEAVGEEEESQPEACVIDDRSPDT

SEQ ID NO: 57741 - protein, 673 aa, Homo sapiens
MMHVNNFPFRRHSWICFDVDNGTSAGRSPLDPMTSPGSGLILQANFVHSQRRESFLYRSDSDYDLSPKSMSRNSSIASDIHGDDLIVTPFAQVLASLRTVRNNFAALTNLQDRAPSKRSPMCNQPSINKATITEEAYQKLASETLEELDWCLDQLETLQTRHSVSEMASNKFKRMLNRELTHLSEMSRSGNQVSEFISNTFLDKQHEVEIPSPTQKEKEKKKRPMSQISGVKKLMHSSSLTNSSIPRFGVKTEQEDVLAKELEDVNKWGLHVFRIAELSGNRPLTVIMHTIFQERDLLKTFKIPVDTLITYLMTLEDHYHADVAYHNNIHAADVVQSTHVLLSTPALEAVFTDLEILAAIFASAIHDVDHPGVSNQFLINTNSELALMYNDSSVLENHHLAVGFKLLQEENCDIFQNLTKKQRQSLRKMVIDIVLATDMSKHMNLLADLKTMVETKKVTSSGVLLLDNYSDRIQVLQNMVHCADLSNPTKPLQLYRQWTDRIMEEFFRQGDRERERGMEISPMCDKHNASVEKSQVGFIDYIVHPLWETWADLVHPDAQDILDTLEDNREWYQSTIPQSPSPAPDDPEEGRQGQTEKFQFELTLEEDGESDTEKDSGSQVEEDTSCSDSKTLCTQDSESTEIPLDEQVEEEAVGEEEESQPEACVIDDRSPDT

SEQ ID NO: 57742 - protein, 687 aa, Homo sapiens
MAFVWDPLGATVPGPSTRAKSRLRFSKSYSFDVDNGTSAGRSPLDPMTSPGSGLILQANFVHSQRRESFLYRSDSDYDLSPKSMSRNSSIASDIHGDDLIVTPFAQVLASLRTVRNNFAALTNLQDRAPSKRSPMCNQPSINKATITEEAYQKLASETLEELDWCLDQLETLQTRHSVSEMASNKFKRMLNRELTHLSEMSRSGNQVSEFISNTFLDKQHEVEIPSPTQKEKEKKKRPMSQISGVKKLMHSSSLTNSSIPRFGVKTEQEDVLAKELEDVNKWGLHVFRIAELSGNRPLTVIMHTIFQERDLLKTFKIPVDTLITYLMTLEDHYHADVAYHNNIHAADVVQSTHVLLSTPALEAVFTDLEILAAIFASAIHDVDHPGVSNQFLINTNSELALMYNDSSVLENHHLAVGFKLLQEENCDIFQNLTKKQRQSLRKMVIDIVLATDMSKHMNLLADLKTMVETKKVTSSGVLLLDNYSDRIQVLQNMVHCADLSNPTKPLQLYRQWTDRIMEEFFRQGDRERERGMEISPMCDKHNASVEKSQVGFIDYIVHPLWETWADLVHPDAQDILDTLEDNREWYQSTIPQSPSPAPDDPEEGRQGQTEKFQFELTLEEDGESDTEKDSGSQVEEDTSCSDSKTLCTQDSESTEIPLDEQVEEEAVGEEEESQPEACVIDDRSPDT

SEQ ID NO: 57743 - protein, 748 aa, Homo sapiens
MKRNTCDLLSRSKSASEETLHSSNEEEDPFRGMEPYLVRRLSCRNIQLPPLAFRQLEQADLKSESENIQRPTSLPLKILPLIAITSAESSGFDVDNGTSAGRSPLDPMTSPGSGLILQANFVHSQRRESFLYRSDSDYDLSPKSMSRNSSIASDIHGDDLIVTPFAQVLASLRTVRNNFAALTNLQDRAPSKRSPMCNQPSINKATITEEAYQKLASETLEELDWCLDQLETLQTRHSVSEMASNKFKRMLNRELTHLSEMSRSGNQVSEFISNTFLDKQHEVEIPSPTQKEKEKKKRPMSQISGVKKLMHSSSLTNSSIPRFGVKTEQEDVLAKELEDVNKWGLHVFRIAELSGNRPLTVIMHTIFQERDLLKTFKIPVDTLITYLMTLEDHYHADVAYHNNIHAADVVQSTHVLLSTPALEAVFTDLEILAAIFASAIHDVDHPGVSNQFLINTNSELALMYNDSSVLENHHLAVGFKLLQEENCDIFQNLTKKQRQSLRKMVIDIVLATDMSKHMNLLADLKTMVETKKVTSSGVLLLDNYSDRIQVLQNMVHCADLSNPTKPLQLYRQWTDRIMEEFFRQGDRERERGMEISPMCDKHNASVEKSQVGFIDYIVHPLWETWADLVHPDAQDILDTLEDNREWYQSTIPQSPSPAPDDPEEGRQGQTEKFQFELTLEEDGESDTEKDSGSQVEEDTSCSDSKTLCTQDSESTEIPLDEQVEEEAVGEEEESQPEACVIDDRSPDT

SEQ ID NO: 57744 - protein, 219 aa, Homo sapiens
MAQQTSPDTLTVPEVDNPHCPNPWLNEDLVKSLRENLLQHEKSKTARKSVSPKLSPVISPRNSPRLLRRMLLSSNIPKQRRFTVAHTCFDVDNGTSAGRSPLDPMTSPGSGLILQANFVHSQRRESFLYRSDSDYDLSPKSMSRNSSIASDIHGDDLIVTPFAQVLASLRTVRNNFAALTNLQDRAPSKRSPMCNQPSINKATITGSWMELNPYTLLDM

SEQ ID NO: 57745 - protein, 679 aa, Homo sapiens
MSIIMKPRSRSTSSLRTAEAVCFDVDNGTSAGRSPLDPMTSPGSGLILQANFVHSQRRESFLYRSDSDYDLSPKSMSRNSSIASDIHGDDLIVTPFAQVLASLRTVRNNFAALTNLQDRAPSKRSPMCNQPSINKATITEEAYQKLASETLEELDWCLDQLETLQTRHSVSEMASNKFKRMLNRELTHLSEMSRSGNQVSEFISNTFLDKQHEVEIPSPTQKEKEKKKRPMSQISGVKKLMHSSSLTNSSIPRFGVKTEQEDVLAKELEDVNKWGLHVFRIAELSGNRPLTVIMHTIFQERDLLKTFKIPVDTLITYLMTLEDHYHADVAYHNNIHAADVVQSTHVLLSTPALEAVFTDLEILAAIFASAIHDVDHPGVSNQFLINTNSELALMYNDSSVLENHHLAVGFKLLQEENCDIFQNLTKKQRQSLRKMVIDIVLATDMSKHMNLLADLKTMVETKKVTSSGVLLLDNYSDRIQVLQNMVHCADLSNPTKPLQLYRQWTDRIMEEFFRQGDRERERGMEISPMCDKHNASVEKSQVGFIDYIVHPLWETWADLVHPDAQDILDTLEDNREWYQSTIPQSPSPAPDDPEEGRQGQTEKFQFELTLEEDGESDTEKDSGSQVEEDTSCSDSKTLCTQDSESTEIPLDEQVEEEAVGEEEESQPEACVIDDRSPDT

SEQ ID NO: 57746 - protein, 422 aa, Homo sapiens
MASNKFKRMLNRELTHLSEMSRSGNQVSEFISNTFLDKQHEVEIPSPTQKEKEKKKRPMSQISGVKKLMHSSSLTNSSIPRFGVKTEQEDVLAKELEDVNKWGLHVFRIAELSGNRPLTVIMHTIFQERDLLKTFKIPVDTLITYLMTLEDHYHADVAYHNNIHAADVVQSTHVLLSTPALEAVFTDLEILAAIFASAIHDVDHPGVSNQFLINTNSELALMYNDSSVLENHHLAVGFKLLQEENCDIFQNLTKKQRQSLRKMVIDIVLATDMSKHMNLLADLKTMVETKKVTSSGVLLLDNYSDRIQVLQNMVHCADLSNPTKPLQLYRQWTDRIMEEFFRQGDRERERGMEISPMCDKHNASVEKSQVGFIDYIVHPLWETWADLVHPDAQDILDTLEDNREWYQSTIPQSPSPAPDDPE

SEQ ID NO: 57747 - protein, 81 aa, Homo sapiens
MKRNTCDLLSRSKSASEETLHSSNEEEDPFRGMEPYLVRRLSCRNIQLPPLAFRQLEQADLKSESENIQRPTSLPLKILPL

SEQ ID NO: 57748 - protein, 745 aa, Homo sapiens
MAQQTSPDTLTVPEVDNPHCPNPWLNEDLVKSLRENLLQHEKSKTARKSVSPKLSPVISPRNSPRLLRRMLLSSNIPKQRRFTVAHTCFDVDNGTSAGRSPLDPMTSPGSGLILQANFVHSQRRESFLYRSDSDYDLSPKSMSRNSSIASDIHGDDLIVTPFAQVLASLRTVRNNFAALTNLQDRAPSKRSPMCNQPSINKATITEEAYQKLASETLEELDWCLDQLETLQTRHSVSEMASNKFKRMLNRELTHLSEMSRSGNQVSEFISNTFLDKQHEVEIPSPTQKEKEKKKRPMSQISGVKKLMHSSSLTNSSIPRFGVKTEQEDVLAKELEDVNKWGLHVFRIAELSGNRPLTVIMHTIFQERDLLKTFKIPVDTLITYLMTLEDHYHADVAYHNNIHAADVVQSTHVLLSTPALEAVFTDLEILAAIFASAIHDVDHPGVSNQFLINTNSELALMYNDSSVLENHHLAVGFKLLQEENCDIFQNLTKKQRQSLRKMVIDIVLATDMSKHMNLLADLKTMVETKKVTSSGVLLLDNYSDRIQVLQNMVHCADLSNPTKPLQLYRQWTDRIMEEFFRQGDRERERGMEISPMCDKHNASVEKSQVGFIDYIVHPLWETWADLVHPDAQDILDTLEDNREWYQSTIPQSPSPAPDDPEEGRQGQTEKFQFELTLEEDGESDTEKDSGSQVEEDTSCSDSKTLCTQDSESTEIPLDEQVEEEAVGEEEESQPEACVIDDRSPDT

SEQ ID NO: 57749 - protein, 75 aa, Homo sapiens
MKRNTCDLLSRSKSASEETLHSSNEEEDPFRGMEPYLVRRLSCRNIQLPPLAFRQLEQADLKSESENIQRPTSLP

SEQ ID NO: 57750 - protein, 748 aa, Homo sapiens; identical to SEQ ID NO: 57743

SEQ ID NO: 57751 - protein, 833 aa, Homo sapiens
MLPFGDKTREMVNAWFAERVHTIPVCKEGIRGHTESCSCPLQQSPRADNSAPGTPTRKISASEFDRPLRPIVVKDSEGTVSFLSDSEKKEQMPLTPPRFDHDEGDQCSRLLELVKDISSHLDVTALCHKIFLHIHGLISADRYSLFLVCEDSSNDKFLISRLFDVAEGSTLEEVSNNCIRLEWNKGIVGHVAALGEPLNIKDAYEDPRFNAEVDQITGYKTQSILCMPIKNHREEVVGVAQAINKKSGNGGTFTEKDEKDFAAYLAFCGIVLHNAQLYETSLLENKRNQVLLDLASLIFEEQQSLEVILKKIAATIISFMQVQKCTIFIVDEDCSDSFSSVFHMECEELEKSSDTLTREHDANKINYMYAQYVKNTMEPLNIPDVSKDKRFPWTTENTGNVNQQCIRSLLCTPIKNGKKNKVIGVCQLVNKMEENTGKVKPFNRNDEQFLEAFVIFCGLGIQNTQMYEAVERAMAKQMVTLEVLSYHASAAEEETRELQSLAAAVVPSAQTLKITDFSFSDFELSDLETALCTIRMFTDLNLVQNFQMKHEVLCRWILSVKKNYRKNVAYHNWRHAFNTAQCMFAALKAGKIQNKLTDLEILALLIAALSHDLDHRGVNNSYIQRSEHPLAQLYCHSIMEHHHFDQCLMILNSPGNQILSGLSIEEYKTTLKIIKQAILATDLALYIKRRGEFFELIRKNQFNLEDPHQKELFLAMLMTACDLSAITKPWPIQQRIAELVATEFFDQGDRERKELNIEPTDLMNREKKNKIPSMQVGFIDAICLQLYEALTHVSEDCFPLLDGCRKNRQKWQALAEQQEKMLINGESGQAKRN

SEQ ID NO: 57752 - protein, 875 aa, Homo sapiens
MERAGPSFGQQRQQQQPQQQKQQQRDQDSVEAWLDDHWDFTFSYFVRKATREMVNAWFAERVHTIPVCKEGIRGHTESCSCPLQQSPRADNSAPGTPTRKISASEFDRPLRPIVVKDSEGTVSFLSDSEKKEQMPLTPPRFDHDEGDQCSRLLELVKDISSHLDVTALCHKIFLHIHGLISADRYSLFLVCEDSSNDKFLISRLFDVAEGSTLEEVSNNCIRLEWNKGIVGHVAALGEPLNIKDAYEDPRFNAEVDQITGYKTQSILCMPIKNHREEVVGVAQAINKKSGNGGTFTEKDEKDFAAYLAFCGIVLHNAQLYETSLLENKRNQVLLDLASLIFEEQQSLEVILKKIAATIISFMQVQKCTIFIVDEDCSDSFSSVFHMECEELEKSSDTLTREHDANKINYMYAQYVKNTMEPLNIPDVSKDKRFPWTTENTGNVNQQCIRSLLCTPIKNGKKNKVIGVCQLVNKMEENTGKVKPFNRNDEQFLEAFVIFCGLGIQNTQMYEAVERAMAKQMVTLEVLSYHASAAEEETRELQSLAAAVVPSAQTLKITDFSFSDFELSDLETALCTIRMFTDLNLVQNFQMKHEVLCRWILSVKKNYRKNVAYHNWRHAFNTAQCMFAALKAGKIQNKLTDLEILALLIAALSHDLDHRGVNNSYIQRSEHPLAQLYCHSIMEHHHFDQCLMILNSPGNQILSGLSIEEYKTTLKIIKQAILATDLALYIKRRGEFFELIRKNQFNLEDPHQKELFLAMLMTACDLSAITKPWPIQQRIAELVATEFFDQGDRERKELNIEPTDLMNREKKNKIPSMQVGFIDAICLQLYEALTHVSEDCFPLLDGCRKNRQKWQALAEQQEKMLINGESGQAKRN

SEQ ID NO: 57753 - protein, 823 aa, Homo sapiens
MVNAWFAERVHTIPVCKEGIRGHTESCSCPLQQSPRADNSAPGTPTRKISASEFDRPLRPIVVKDSEGTVSFLSDSEKKEQMPLTPPRFDHDEGDQCSRLLELVKDISSHLDVTALCHKIFLHIHGLISADRYSLFLVCEDSSNDKFLISRLFDVAEGSTLEEVSNNCIRLEWNKGIVGHVAALGEPLNIKDAYEDPRFNAEVDQITGYKTQSILCMPIKNHREEVVGVAQAINKKSGNGGTFTEKDEKDFAAYLAFCGIVLHNAQLYETSLLENKRNQVLLDLASLIFEEQQSLEVILKKIAATIISFMQVQKCTIFIVDEDCSDSFSSVFHMECEELEKSSDTLTREHDANKINYMYAQYVKNTMEPLNIPDVSKDKRFPWTTENTGNVNQQCIRSLLCTPIKNGKKNKVIGVCQLVNKMEENTGKVKPFNRNDEQFLEAFVIFCGLGIQNTQMYEAVERAMAKQMVTLEVLSYHASAAEEETRELQSLAAAVVPSAQTLKITDFSFSDFELSDLETALCTIRMFTDLNLVQNFQMKHEVLCRWILSVKKNYRKNVAYHNWRHAFNTAQCMFAALKAGKIQNKLTDLEILALLIAALSHDLDHRGVNNSYIQRSEHPLAQLYCHSIMEHHHFDQCLMILNSPGNQILSGLSIEEYKTTLKIIKQAILATDLALYIKRRGEFFELIRKNQFNLEDPHQKELFLAMLMTACDLSAITKPWPIQQRIAELVATEFFDQGDRERKELNIEPTDLMNREKKNKIPSMQVGFIDAICLQLYEALTHVSEDCFPLLDGCRKNRQKWQALAEQQEKMLINGESGQAKRN

SEQ ID NO: 57754 - protein, 860 aa, Homo sapiens
MGEVTAEEVEKFLDSNIGFAKQYYNLHYRAKLISDLLGAKEAAVDFSNYHSPSSMEESEIIFDLLRDFQENLQTEKCIFNVMKKLCFLLQADRMSLFMYRTRNGIAELATRLFNVHKDAVLEDCLVMPDQEIVFPLDMGIVGHVAHSKKIANVPNTEEDEHFCDFVDILTEYKTKNILASPIMNGKDVVAIIMAVNKVDGSHFTKRDEEILLKYLNFANLIMKVYHLSYLHNCETRRGQILLWSGSKVFEELTDIERQFHKALYTVRAFLNCDRYSVGLLDMTKQKEFFDVWPVLMGEVPPYSGPRTPDGREINFYKVIDYILHGKEDIKVIPNPPPDHWALVSGLPAYVAQNGLICNIMNAPAEDFFAFQKEPLDESGWMIKNVLSMPIVNKKEEIVGVATFYNRKDGKPFDEMDETLMESLTQFLGWSVLNPDTYESMNKLENRKDIFQDIVKYHVKCDNEEIQKILKTREVYGKEPWECEEEELAEILQAELPDADKYEINKFHFSDLPLTELELVKCGIQMYYELKVVDKFHIPQEALVRFMYSLSKGYRKITYHNWRHGFNVGQTMFSLLVTGKLKRYFTDLEALAMVTAAFCHDIDHRGTNNLYQMKSQNPLAKLHGSSILERHHLEFGKTLLRDESLNIFQNLNRRQHEHAIHMMDIAIIATDLALYFKKRTMFQKIVDQSKTYESEQEWTQYMMLEQTRKEIVMAMMMTACDLSAITKPWEVQSQVALLVAAEFWEQGDLERTVLQQNPIPMMDRNKADELPKLQVGFIDFVCTFVYKEFSRFHEEITPMLDGITNNRKEWKALADEYDAKMKVQEEKKQKQQSAKSAAAGNQPGGNPSPGGATTSKSCCIQ

SEQ ID NO: 57755 - protein, 575 aa, Homo sapiens
MTKEKEFFDVWSVLMGESQPYSGPRTPDGREIVFYKVIDYVLHGKEEIKVIPTPSADHWALASGLPSYVAESGFICNIMNASADEMFKFQEGALDDSGWLIKNVLSMPIVNKKEEIVGVATFYNRKDGKPFDEQDEVLMESLTQFLGWSVMNTDTYDKMNKLENRKDIAQDMVLYHVKCDRDEIQLILPTRARLGKEPADCDEDELGEILKEELPGPTTFDIYEFHFSDLECTELDLVKCGIQMYYELGVVRKFQIPQEVLVRFLFSISKGYRRITYHNWRHGFNVAQTMFTLLMTGKLKSYYTDLEAFAMVTAGLCHDIDHRGTNNLYQMKSQNPLAKLHGSSILERHHLEFGKFLLSEETLNIYQNLNRRQHEHVIHLMDIAIIATDLALYFKKRAMFQKIVDESKNYQDKKSWVEYLSLETTRKEIVMAMMMTACDLSAITKPWEVQSKVALLVAAEFWEQGDLERTVLDQQPIPMMDRNKAAELPKLQVGFIDFVCTFVYKEFSRFHEEILPMFDRLQNNRKEWKALADEYEAKVKALEEKEEEERVAAKKVGTEICNGGPAPKSSTCCIL

SEQ ID NO: 57756 - protein, 853 aa, Homo sapiens
MSLSEEQARSFLDQNPDFARQYFGKKLSPENVAAACEDGCPPDCDSLRDLCQVEESTALLELVQDMQESINMERVVFKVLRRLCTLLQADRCSLFMYRQRNGVAELATRLFSVQPDSVLEDCLVPPDSEIVFPLDIGVVGHVAQTKKMVNVEDVAECPHFSSFADELTDYKTKNMLATPIMNGKDVVAVIMAVNKLNGPFFTSEDEDVFLKYLNFATLYLKIYHLSYLHNCETRRGQVLLWSANKVFEELTDIERQFHKAFYTVRAYLNCERYSVGLLDMTKEKEFFDVWSVLMGESQPYSGPRTPDGREIVFYKVIDYVLHGKEEIKVIPTPSADHWALASGLPSYVAESGFICNIMNASADEMFKFQEGALDDSGWLIKNVLSMPIVNKKEEIVGVATFYNRKDGKPFDEQDEVLMESLTQFLGWSVMNTDTYDKMNKLENRKDIAQDMVLYHVKCDRDEIQLILPTRARLGKEPADCDEDELGEILKEELPGPTTFDIYEFHFSDLECTELDLVKCGIQMYYELGVVRKFQIPQEVLVRFLFSISKGYRRITYHNWRHGFNVAQTMFTLLMTGKLKSYYTDLEAFAMVTAGLCHDIDHRGTNNLYQMKSQNPLAKLHGSSILERHHLEFGKFLLSEETLNIYQNLNRRQHEHVIHLMDIAIIATDLALYFKKRAMFQKIVDESKNYQDKKSWVEYLSLETTRKEIVMAMMMTACDLSAITKPWEVQSKVALLVAAEFWEQGDLERTVLDQQPIPMMDRNKAAELPKLQVGFIDFVCTFVYKEFSRFHEEILPMFDRLQNNRKEWKALADEYEAKVKALEEKEEEERVAAKKGTEICNGGPAPKSSTCCIL

SEQ ID NO: 57757 - protein, 854 aa, Homo sapiens
MSLSEEQARSFLDQNPDFARQYFGKKLSPENVAAACEDGCPPDCDSLRDLCQVEESTALLELVQDMQESINMERVVFKVLRRLCTLLQADRCSLFMYRQRNGVAELATRLFSVQPDSVLEDCLVPPDSEIVFPLDIGVVGHVAQTKKMVNVEDVAECPHFSSFADELTDYKTKNMLATPIMNGKDVVAVIMAVNKLNGPFFTSEDEDVFLKYLNFATLYLKIYHLSYLHNCETRRGQVLLWSANKVFEELTDIERQFHKAFYTVRAYLNCERYSVGLLDMTKEKEFFDVWSVLMGESQPYSGPRTPDGREIVFYKVIDYVLHGKEEIKVIPTPSADHWALASGLPSYVAESGFICNIMNASADEMFKFQEGALDDSGWLIKNVLSMPIVNKKEEIVGVATFYNRKDGKPFDEQDEVLMESLTQFLGWSVMNTDTYDKMNKLENRKDIAQDMVLYHVKCDRDEIQLILPTRARLGKEPADCDEDELGEILKEELPGPTTFDIYEFHFSDLECTELDLVKCGIQMYYELGVVRKFQIPQEVLVRFLFSISKGYRRITYHNWRHGFNVAQTMFTLLMTGKLKSYYTDLEAFAMVTAGLCHDIDHRGTNNLYQMKSQNPLAKLHGSSILERHHLEFGKFLLSEETLNIYQNLNRRQHEHVIHLMDIAIIATDLALYFKKRAMFQKIVDESKNYQDKKSWVEYLSLETTRKEIVMAMMMTACDLSAITKPWEVQSKVALLVAAEFWEQGDLERTVLDQQPIPMMDRNKAAELPKLQVGFIDFVCTFVYKEFSRFHEEILPMFDRLQNNRKEWKALADEYEAKVKALEEKEEEERVAAKKVGTEICNGGPAPKSSTCCIL

SEQ ID NO: 57758 - protein, 858 aa, Homo sapiens
MGEINQVAVEKYLEENPQFAKEYFDRKLRVEVLGEIFKNSQVPVQSSMSFSELTQVEESALCLELLWTVQEEGGTPEQGVHRALQRLAHLLQADRCSMFLCRSRNGIPEVASRLLDVTPTSKFEDNLVGPDKEVVFPLDIGIVGWAAHTKKTHNVPDVKKNSHFSDFMDKQTGYVTKNLLATPIVVGKEVLAVIMAVNKVNASEFSKQDEEVFSKYLNFVSIILRLHHTSYMYNIESRRSQILMWSANKVFEELTDVERQFHKALYTVRSYLNCERYSIGLLDMTKEKEFYDEWPIKLGEVEPYKGPKTPDGREVNFYKIIDYILHGKEEIKVIPTPPADHWTLISGLPTYVAENGFICNMMNAPADEYFTFQKGPVDETGWVIKNVLSLPIVNKKEDIVGVATFYNRKDGKPFDEHDEYITETLTQFLGWSLLNTDTYDKMNKLENRKDIAQEMLMNQTKATPEEIKSILKFQEKLNVDVIDDCEEKQLVAILKEDLPDPRSAELYEFRFSDFPLTEHGLIKCGIRLFFEINVVEKFKVPVEVLTRWMYTVRKGYRAVTYHNWRHGFNVGQTMFTLLMTGRLKKYYTDLEAFAMLAAAFCHDIDHRGTNNLYQMKSTSPLARLHGSSILERHHLEYSKTLLQDESLNIFQNLNKRQFETVIHLFEVAIIATDLALYFKKRTMFQKIVDACEQMQTEEEAIKYVTVDPTKKEIIMAMMMTACDLSAITKPWEVQSQVALMVANEFWEQGDLERTVLQQQPIPMMDRNKRDELPKLQVGFIDFVCTFVYKEFSRFHKEITPMLSGLQNNRVEWKSLADEYDAKMKVIEEEAKKQEGGAEKAAEDSGGGDDKKSKTCLML

SEQ ID NO: 57759 - protein, 150 aa, Homo sapiens
MSAKDERAREILRGFKLNWMNLRDAETGKILWQGTEDLSVPGVEHEARVPKKILKCKAVSRELNFSSTEQMEKFRLEQKVYFKGQCLEEWFFEFGFVIPNSTNTWQSLIEAAPESQMMPASVLTGNVIIETKFFDDDLLVSTSRVRLFYV

SEQ ID NO: 57760 - protein, 137 aa, Homo sapiens
MKQRDKGRGWHPAEGGPALTAQPPETRPALDRSRRESRSQGCRGVSVSLTMNLEPPKAEFRSATRVAGGPVTPRKGPPKFKQRQTRQFKSKPPKKGVQGFGDDIPGMEGLGTDITVICPWEAFNHLELHELAQYGII

SEQ ID NO: 57761 - protein, 87 aa, Homo sapiens
MNLEPPKAEFRSATRVAGGPVTPRKGPPKFKQRQTRQFKSKPPKKGVQGFGDDIPGMEGLGTDITVICPWEAFNHLELHELAQYGII

SEQ ID NO: 57762 - protein, 83 aa, Homo sapiens
MSDNTTLPAPASNQGPTTPRKGPPKFKQRQTRQFKSKPPKKGVKGFGDDIPGMEGLGTDITVICPWEAFSHLELHELAQFGII

SEQ ID NO: 57763 - protein, 456 aa, Homo sapiens
MGITLIWCLALVLIKWITSKRRGAISYDSSDQTALYIRMLGDVRVRSRAGFESERRGSHPYIDFRIFHSQSEIEVSVSARNIRRLLSFQRYLRSSRFFRGTAVSNSLNILDDDYNGQAKCMLEKVGNWNFDIFLFDRLTNGNSLVSLTFHLFSLHGLIEYFHLDMMKLRRFLVMIQEDYHSQNPYHNAVHAADVTQAMHCYLKEPKLANSVTPWDILLSLIAAATHDLDHPGVNQPFLIKTNHYLATLYKNTSVLENHHWRSAVGLLRESGLFSHLPLESRQQMETQIGALILATDISRQNEYLSLFRSHLDRGDLCLEDTRHRHLVLQMALKCADICNPCRTWELSKQWSEKVTEEFFHQGDIEKKYHLGVSPLCDRHTESIANIQIGFMTYLVEPLFTEWARFSNTRLSQTMLGHVGLNKASWKGLQREQSSSEDTDAAFELNSQLLPQENRLS

SEQ ID NO: 57764 - protein, 424 aa, Homo sapiens
MEVCYQLPVLPLDRPVPQHVLSRRGAISFSSSSALFGCPNPRQLSQRRGAISYDSSDQTALYIRMLGDVRVRSRAGFESERRGSHPYIDFRIFHSQSEIEVSVSARNIRRLLSFQRYLRSSRFFRGTAVSNSLNILDDDYNGQAKCMLEKVGNWNFDIFLFDRLTNGNSLVSLTFHLFSLHGLIEYFHLDMMKLRRFLVMIQEDYHSQNPYHNAVHAADVTQAMHCYLKEPKLANSVTPWDILLSLIAAATHDLDHPGVNQPFLIKTNHYLATLYKNTSVLENHHWRSAVGLLRESGLFSHLPLESRQQMETQIGALILATDISRQNEYLSLFRSHLDRGDLCLEDTRHRHLVLQMALKCADICNPCRTWELSKQWSEKVTEEFFHQGDIEKKYHLGVSPLCDRHTESIANIQIGNYTYLDIAG

SEQ ID NO: 57765 - protein, 482 aa, Homo sapiens
MEVCYQLPVLPLDRPVPQHVLSRRGAISFSSSSALFGCPNPRQLSQRRGAISYDSSDQTALYIRMLGDVRVRSRAGFESERRGSHPYIDFRIFHSQSEIEVSVSARNIRRLLSFQRYLRSSRFFRGTAVSNSLNILDDDYNGQAKCMLEKVGNWNFDIFLFDRLTNGNSLVSLTFHLFSLHGLIEYFHLDMMKLRRFLVMIQEDYHSQNPYHNAVHAADVTQAMHCYLKEPKLANSVTPWDILLSLIAAATHDLDHPGVNQPFLIKTNHYLATLYKNTSVLENHHWRSAVGLLRESGLFSHLPLESRQQMETQIGALILATDISRQNEYLSLFRSHLDRGDLCLEDTRHRHLVLQMALKCADICNPCRTWELSKQWSEKVTEEFFHQGDIEKKYHLGVSPLCDRHTESIANIQIGFMTYLVEPLFTEWARFSNTRLSQTMLGHVGLNKASWKGLQREQSSSEDTDAAFELNSQLLPQENRLS

SEQ ID NO: 57766 - protein, 829 aa, Homo sapiens
MGCAPSIHISERLVAEDAPSPAAPPLSSGGPRLPQGQKTAALPRTRGAGLLESELRDGSGKKVAVADVQFGPMRFHQDQLQVLLVFTKEDNQCNGFCRACEKAGFKCTVTKEAQAVLACFLDKHHDIIIIDHRNPRQLDAEALCRSIRSSKLSENTVIVGVVRRVDREELSVMPFISAGFTRRYVENPNIMACYNELLQLEFGEVRSQLKLRACNSVFTALENSEDAIEITSEDRFIQYANPAFETTMGYQSGELIGKELGEVPINEKKADLLDTINSCIRIGKEWQGIYYAKKKNGDNIQQNVKIIPVIGQGGKIRHYVSIIRVCNGNNKAEKISECVQSDTHTDNQTGKHKDRRKGSLDVKAVASRATEVSSQRRHSSMARIHSMTIEAPITKVINIINAAQESSPMPVTEALDRVLEILRTTELYSPQFGAKDDDPHANDLVGGLMSDGLRRLSGNEYVLSTKNTQMVSSNIITPISLDDVPPRIARAMENEEYWDFDIFELEAATHNRPLIYLGLKMFARFGICEFLHCSESTLRSWLQIIEANYHSSNPYHNSTHSADVLHATAYFLSKERIKETLDPIDEVAALIAATIHDVDHPGRTNSFLCNAGSELAILYNDTAVLESHHAALAFQLTTGDDKCNIFKNMERNDYRTLRQGIIDMVLATEMTKHFEHVNKFVNSINKPLATLEENGETDKNQEVINTMLRTPENRTLIKRMLIKCADVSNPCRPLQYCIEWAARISEEYFSQTDEEKQQGLPVVMPVFDRNTCSIPKSQISFIDYFITDMFDAWDAFVDLPDLMQHLDNNFKYWKGLDEMKLRNLRPPPE

SEQ ID NO: 57767 - protein, 783 aa, Homo sapiens
MGCAPSIHISERLVAEDAPSPAAPPLSSGGPRLPQGQKTAALPRTRGAGLLESELRDGSGKKVAVADVQFGPMRFHQDQLQVLLVFTKEDNQCNGFCRACEKAGFKCTVTKEAQAVLACFLDKHHDIIIIDHRNPRQLDAEALCRSIRSSKLSENTVIVGVVRRVDREELSVMPFISAGFTRRYVENPNIMACYNELLQLEFGEVRSQLKLRACNSVFTALENSEDAIEITSEDRFIQEWQGIYYAKKKNGDNIQQNVKIIPVIGQGGKIRHYVSIIRVCNGNNKAEKISECVQSDTHTDNQTGKHKDRRKGSLDVKAVASRATEVSSQRRHSSMARIHSMTIEAPITKVINIINAAQESSPMPVTEALDRVLEILRTTELYSPQFGAKDDDPHANDLVGGLMSDGLRRLSGNEYVLSTKNTQMVSSNIITPISLDDVPPRIARAMENEEYWDFDIFELEAATHNRPLIYLGLKMFARFGICEFLHCSESTLRSWLQIIEANYHSSNPYHNSTHSADVLHATAYFLSKERIKETLDPIDEVAALIAATIHDVDHPGRTNSFLCNAGSELAILYNDTAVLESHHAALAFQLTTGDDKCNIFKNMERNDYRTLRQGIIDMVLATEMTKHFEHVNKFVNSINKPLATLEENGETDKNQEVINTMLRTPENRTLIKRMLIKCADVSNPCRPLQYCIEWAARISEEYFSQTDEEKQQGLPVVMPVFDRNTCSIPKSQISFIDYFITDMFDAWDAFVDLPDLMQHLDNNFKYWKGLDEMKLRNLRPPPE

SEQ ID NO: 57768 - protein, 829 aa, Homo sapiens; identical to SEQ ID NO: 57766

SEQ ID NO: 57769 - protein, 757 aa, Homo sapiens
MRFHQDQLQVLLVFTKEDNQCNGFCRACEKAGFKCTVTKEAQAVLACFLDKHHDIIIIDHRNPRQLDAEALCRSIRSSKLSENTVIVGVVRRVDREELSVMPFISAGFTRRYVENPNIMACYNELLQLEFGEVRSQLKLRACNSVFTALENSEDAIEITSEDRFIQYANPAFETTMGYQSGELIGKELGEVPINEKKADLLDTINSCIRIGKEWQGIYYAKKKNGDNIQQNVKIIPVIGQGGKIRHYVSIIRVCNGNNKAEKISECVQSDTHTDNQTGKHKDRRKGSLDVKAVASRATEVSSQRRHSSMARIHSMTIEAPITKVINIINAAQESSPMPVTEALDRVLEILRTTELYSPQFGAKDDDPHANDLVGGLMSDGLRRLSGNEYVLSTKNTQMVSSNIITPISLDDVPPRIARAMENEEYWDFDIFELEAATHNRPLIYLGLKMFARFGICEFLHCSESTLRSWLQIIEANYHSSNPYHNSTHSADVLHATAYFLSKERIKETLDPIDEVAALIAATIHDVDHPGRTNSFLCNAGSELAILYNDTAVLESHHAALAFQLTTGDDKCNIFKNMERNDYRTLRQGIIDMVLATEMTKHFEHVNKFVNSINKPLATLEENGETDKNQEVINTMLRTPENRTLIKRMLIKCADVSNPCRPLQYCIEWAARISEEYFSQTDEEKQQGLPVVMPVFDRNTCSIPKSQISFIDYFITDMFDAWDAFVDLPDLMQHLDNNFKYWKGLDEMKLRNLRPPPE

SEQ ID NO: 57770 - protein, 885 aa, Homo sapiens
MGCAPSIHVSQSGVIYCRDSDESSSPRQTTSVSQGPAAPLPGLFVQTDAADAIPPSRASGPPSVARVRRARTELGSGSSAGSAAPAATTSRGRRRHCCSSAEAETQTCYTSVKQVSSAEVRIGPMRLTQDPIQVLLIFAKEDSQSDGFWWACDRAGYRCNIARTPESALECFLDKHHEIIVIDHRQTQNFDAEAVCRSIRATNPSEHTVILAVVSRVSDDHEEASVLPLLHAGFNRRFMENSSIIACYNELIQIEHGEVRSQFKLRACNSVFTALDHCHEAIEITSDDHVIQYVNPAFERMMGYHKGELLGKELADLPKSDKNRADLLDTINTCIKKGKEWQGVYYARRKSGDSIQQHVKITPVIGQGGKIRHFVSLKKLCCTTDNNKQIHKIHRDSGDNSQTEPHSFRYKNRRKESIDVKSISSRGSDAPSLQNRRYPSMARIHSMTIEAPITKVINIINAAQENSPVTVAEALDRVLEILRTTELYSPQLGTKDEDPHTSDLVGGLMTDGLRRLSGNEYVFTKNVHQSHSHLAMPITINDVPPCISQLLDNEESWDFNIFELEAITHKRPLVYLGLKVFSRFGVCEFLNCSETTLRAWFQVIEANYHSSNAYHNSTHAADVLHATAFFLGKERVKGSLDQLDEVAALIAATVHDVDHPGRTNSFLCNAGSELAVLYNDTAVLESHHTALAFQLTVKDTKCNIFKNIDRNHYRTLRQAIIDMVLATEMTKHFEHVNKFVNSINKPMAAEIEGSDCECNPAGKNFPENQILIKRMMIKCADVANPCRPLDLCIEWAGRISEEYFAQTDEEKRQGLPVVMPVFDRNTCSIPKSQISFIDYFITDMFDAWDAFAHLPALMQHLADNYKHWKTLDDLKCKSLRLPSDS

SEQ ID NO: 57771 - protein, 830 aa, Homo sapiens
MGCAPSIHVSQSGVIYCRDSDESSSPRQTTSVSQGPAAPLPGLFVQTDAADAIPPSRASGPPSVARVRRARTELGSGSSAGSAAPAATTSRGRRRHCCSSAEAETQTCYTSVKQVSSAEVRIGPMRLTQDPIQVLLIFAKEDSQSDGFWWACDRAGYRCNIARTPESALECFLDKHHEIIVIDHRQTQNFDAEAVCRSIRATNPSEHTVILAVVSRVSDDHEEASVLPLLHAGFNRRFMENSSIIACYNELIQIEHGEVRSQFKLRACNSVFTALDHCHEAIEITSDDHVIQYVNPAFERMMGYHKGELLGKELADLPKSDKNRADLLDTINTCIKKGKEWQGVYYARRKSGDSIQQHVKITPVIGQGGKIRHFVSLKKLCCTTDNNKQIHKIHRDSGDNSQTEPHSFRYKNRRKESIDVKSISSRGSDAPSLQNRRYPSMARIHSMTIEAPITKDGLRRLSGNEYVFTKNVHQSHSHLAMPITINDVPPCISQLLDNEESWDFNIFELEAITHKRPLVYLGLKVFSRFGVCEFLNCSETTLRAWFQVIEANYHSSNAYHNSTHAADVLHATAFFLGKERVKGSLDQLDEVAALIAATVHDVDHPGRTNSFLCNAGSELAVLYNDTAVLESHHTALAFQLTVKDTKCNIFKNIDRNHYRTLRQAIIDMVLATEMTKHFEHVNKFVNSINKPMAAEIEGSDCECNPAGKNFPENQILIKRMMIKCADVANPCRPLDLCIEWAGRISEEYFAQTDEEKRQGLPVVMPVFDRNTCSIPKSQISFIDYFITDMFDAWDAFAHLPALMQHLADNYKHWKTLDDLKCKSLRLPSDS

SEQ ID NO: 57772 - protein, 838 aa, Homo sapiens
MGCAPSIHVSQSGVIYCRDSDESSSPRQTTSVSQGPAAPLPGLFVQTDAADAIPPSRASGPPSVARVRRARTELGSGSSAGSAAPAATTSRGRRRHCCSSAEAETQTCYTSVKQVSSAEVRIGPMRLTQDPIQVLLIFAKEDSQSDGFWWACDRAGYRCNIARTPESALECFLDKHHEIIVIDHRQTQNFDAEAVCRSIRATNPSEHTVILAVVSRVSDDHEEASVLPLLHAGFNRRFMENSSIIACYNELIQIEHGEVRSQFKLRACNSVFTALDHCHEAIEITSDDHVIQEWQGVYYARRKSGDSIQQHVKITPVIGQGGKIRHFVSLKKLCCTTDNNKQIHKIHRDSGDNSQTEPHSFRYKNRRKESIDVKSISSRGSDAPSLQNRRYPSMARIHSMTIEAPITKVINIINAAQENSPVTVAEALDRVLEILRTTELYSPQLGTKDEDPHTSDLVGGLMTDGLRRLSGNEYVFTKNVHQSHSHLAMPITINDVPPCISQLLDNEESWDFNIFELEAITHKRPLVYLGLKVFSRFGVCEFLNCSETTLRAWFQVIEANYHSSNAYHNSTHAADVLHATAFFLGKERVKGSLDQLDEVAALIAATVHDVDHPGRTNSFLCNAGSELAVLYNDTAVLESHHTALAFQLTVKDTKCNIFKNIDRNHYRTLRQAIIDMVLATEMTKHFEHVNKFVNSINKPMAAEIEGSDCECNPAGKNFPENQILIKRMMIKCADVANPCRPLDLCIEWAGRISEEYFAQTDEEKRQGLPVVMPVFDRNTCSIPKSQISFIDYFITDMFDAWDAFAHLPALMQHLADNYKHWKTLDDLKCKSLRLPSDS

SEQ ID NO: 57773 - protein, 865 aa, Homo sapiens
MGCAPSIHVSQSGVIYCRDSDESSSPRQTTSVSQGPAAPLPGLFVQTDAADAIPPSRASGPPSVARVRRARTELGSGSSAGSAAPAATTSRGRRRHCCSSAEAETQTCYTSVKVLLIFAKEDSQSDGFWWACDRAGYRCNIARTPESALECFLDKHHEIIVIDHRQTQNFDAEAVCRSIRATNPSEHTVILAVVSRVSDDHEEASVLPLLHAGFNRRFMENSSIIACYNELIQIEHGEVRSQFKLRACNSVFTALDHCHEAIEITSDDHVIQYVNPAFERMMGYHKGELLGKELADLPKSDKNRADLLDTINTCIKKGKEWQGVYYARRKSGDSIQQHVKITPVIGQGGKIRHFVSLKKLCCTTDNNKQIHKIHRDSGDNSQTEPHSFRYKNRRKESIDVKSISSRGSDAPSLQNRRYPSMARIHSMTIEAPITKVINIINAAQENSPVTVAEALDRVLEILRTTELYSPQLGTKDEDPHTSDLVGGLMTDGLRRLSGNEYVFTKNVHQSHSHLAMPITINDVPPCISQLLDNEESWDFNIFELEAITHKRPLVYLGLKVFSRFGVCEFLNCSETTLRAWFQVIEANYHSSNAYHNSTHAADVLHATAFFLGKERVKGSLDQLDEVAALIAATVHDVDHPGRTNSFLCNAGSELAVLYNDTAVLESHHTALAFQLTVKDTKCNIFKNIDRNHYRTLRQAIIDMVLATEMTKHFEHVNKFVNSINKPMAAEIEGSDCECNPAGKNFPENQILIKRMMIKCADVANPCRPLDLCIEWAGRISEEYFAQTDEEKRQGLPVVMPVFDRNTCSIPKSQISFIDYFITDMFDAWDAFAHLPALMQHLADNYKHWKTLDDLKCKSLRLPSDS

SEQ ID NO: 57774 - protein, 788 aa, Homo sapiens
MGCAPSIHVSQSGVIYCRDSDESSSPRQTTSVSQGPAAPLPGLFVQTDAADAIPPSRASGPPSVARVRRARTELGSGSSAGSAAPAATTSRGRRRHCCSSAEAETQTCYTSVKQVSSAEVRIGPMRLTQDPIQVLLIFAKEDSQSDGFWWACDRAGYRCNIARTPESALECFLDKHHEIIVIDHRQTQNFDAEAVCRSIRATNPSEHTVILAVVSRVSDDHEEASVLPLLHAGFNRRFMENSSIIACYNELIQIEHGEVRSQFKLRACNSVFTALDHCHEAIEITSDDHVIQIHKIHRDSGDNSQTEPHSFRYKNRRKESIDVKSISSRGSDAPSLQNRRYPSMARIHSMTIEAPITKVINIINAAQENSPVTVAEALDRVLEILRTTELYSPQLGTKDEDPHTSDLVGGLMTDGLRRLSGNEYVFTKNVHQSHSHLAMPITINDVPPCISQLLDNEESWDFNIFELEAITHKRPLVYLGLKVFSRFGVCEFLNCSETTLRAWFQVIEANYHSSNAYHNSTHAADVLHATAFFLGKERVKGSLDQLDEVAALIAATVHDVDHPGRTNSFLCNAGSELAVLYNDTAVLESHHTALAFQLTVKDTKCNIFKNIDRNHYRTLRQAIIDMVLATEMTKHFEHVNKFVNSINKPMAAEIEGSDCECNPAGKNFPENQILIKRMMIKCADVANPCRPLDLCIEWAGRISEEYFAQTDEEKRQGLPVVMPVFDRNTCSIPKSQISFIDYFITDMFDAWDAFAHLPALMQHLADNYKHWKTLDDLKCKSLRLPSDS

SEQ ID NO: 57775 - protein, 350 aa, Homo sapiens
MPITINDVPPCISQLLDNEESWDFNIFELEAITHKRPLVYLGLKVFSRFGVCEFLNCSETTLRAWFQVIEANYHSSNAYHNSTHAADVLHATAFFLGKERVKGSLDQLDEVAALIAATVHDVDHPGRTNSFLCNAGSELAVLYNDTAVLESHHTALAFQLTVKDTKCNIFKNIDRNHYRTLRQAIIDMVLATEMTKHFEHVNKFVNSINKPMAAEIEGSDCECNPAGKNFPENQILIKRMMIKCADVANPCRPLDLCIEWAGRISEEYFAQTDEEKRQGLPVVMPVFDRNTCSIPKSQISFIDYFITDMFDAWDAFAHLPALMQHLADNYKHWKTLDDLKCKSLRLPSDS

SEQ ID NO: 57776 - protein, 593 aa, Homo sapiens
MGSGSSSYRPKAIYLDIDGRIQKVIFSKYCNSSDIMDLFCIATGLPRNTTISLLTTDDAMVSIDPTMPANSERTPYKVRPVAIKQLSAGVEDKRTTSRGQSAERPLRDRRVVGLEQPRREGAFESGQVEPRPREPQGCYQEGQRIPPEREELIQSVLAQVAEQFSRAFKINELKAEVANHLAVLEKRVELEGLKVVEIEKCKSDIKKMREELAARSSRTNCPCKYSFLDNHKKLTPRRDVPTYPKYLLSPETIEALRKPTFDVWLWEPNEMLSCLEHMYHDLGLVRDFSINPVTLRRWLFCVHDNYRNNPFHNFRHCFCVAQMMYSMVWLCSLQEKFSQTDILILMTAAICHDLDHPGYNNTYQINARTELAVRYNDISPLENHHCAVAFQILAEPECNIFSNIPPDGFKQIRQGMITLILATDMARHAEIMDSFKEKMENFDYSNEEHMTLLKMILIKCCDISNEVRPMEVAEPWVDCLLEEYFMQSDREKSEGLPVAPFMDRDKVTKATAQIGFIKFVLIPMFETVTKLFPMVEEIMLQPLWESRDRYEELKRIDDAMKELQKKTDSLTSGATEKSRERSRDVKNSEGDCA

SEQ ID NO: 57777 - protein, 567 aa, Homo sapiens
MGSGSSSYRPKAIYLDIDGRIQKVIFSKYCNSSDIMDLFCIATGLPRTPYKVRPVAIKQLSAGVEDKRTTSRGQSAERPLRDRRVVGLEQPRREGAFESGQVEPRPREPQGCYQEGQRIPPEREELIQSVLAQVAEQFSRAFKINELKAEVANHLAVLEKRVELEGLKVVEIEKCKSDIKKMREELAARSSRTNCPCKYSFLDNHKKLTPRRDVPTYPKYLLSPETIEALRKPTFDVWLWEPNEMLSCLEHMYHDLGLVRDFSINPVTLRRWLFCVHDNYRNNPFHNFRHCFCVAQMMYSMVWLCSLQEKFSQTDILILMTAAICHDLDHPGYNNTYQINARTELAVRYNDISPLENHHCAVAFQILAEPECNIFSNIPPDGFKQIRQGMITLILATDMARHAEIMDSFKEKMENFDYSNEEHMTLLKMILIKCCDISNEVRPMEVAEPWVDCLLEEYFMQSDREKSEGLPVAPFMDRDKVTKATAQIGFIKFVLIPMFETVTKLFPMVEEIMLQPLWESRDRYEELKRIDDAMKELQKKTDSLTSGATEKSRERSRDVKNSEGDCA

SEQ ID NO: 57778 - protein, 491 aa, Homo sapiens
MGSGSSSYRPKAIYLDIDGRIQKEHDHLPADHRRRHGLHRPHHAREFRTHSVQSETCGHQATLRAFKINELKAEVANHLAVLEKRVELEGLKVVEIEKCKSDIKKMREELAARSSRTNCPCKYSFLDNHKKLTPRRDVPTYPKYLLSPETIEALRKPTFDVWLWEPNEMLSCLEHMYHDLGLVRDFSINPVTLRRWLFCVHDNYRNNPFHNFRHCFCVAQMMYSMVWLCSLQEKFSQTDILILMTAAICHDLDHPGYNNTYQINARTELAVRYNDISPLENHHCAVAFQILAEPECNIFSNIPPDGFKQIRQGMITLILATDMARHAEIMDSFKEKMENFDYSNEEHMTLLKMILIKCCDISNEVRPMEVAEPWVDCLLEEYFMQSDREKSEGLPVAPFMDRDKVTKATAQIGFIKFVLIPMFETVTKLFPMVEEIMLQPLWESRDRYEELKRIDDAMKELQKKTDSLTSGATEKSRERSRDVKNSEGDCA

SEQ ID NO: 57779 - protein, 533 aa, Homo sapiens
MGSGSSSYRPKAIYLDIDGRIQKVIFSKYCNSSDIMDLFCIATGLPRNTTISLLTTDDAMVSIDPTMPANSERTPYKVRPVAIKQLSEREELIQSVLAQVAEQFSRAFKINELKAEVANHLAVLEKRVELEGLKVVEIEKCKSDIKKMREELAARSSRTNCPCKYSFLDNHKKLTPRRDVPTYPKYLLSPETIEALRKPTFDVWLWEPNEMLSCLEHMYHDLGLVRDFSINPVTLRRWLFCVHDNYRNNPFHNFRHCFCVAQMMYSMVWLCSLQEKFSQTDILILMTAAICHDLDHPGYNNTYQINARTELAVRYNDISPLENHHCAVAFQILAEPECNIFSNIPPDGFKQIRQGMITLILATDMARHAEIMDSFKEKMENFDYSNEEHMTLLKMILIKCCDISNEVRPMEVAEPWVDCLLEEYFMQSDREKSEGLPVAPFMDRDKVTKATAQIGFIKFVLIPMFETVTKLFPMVEEIMLQPLWESRDRYEELKRIDDAMKELQKKTDSLTSGATEKSRERSRDVKNSEGDCA

SEQ ID NO: 57780 - protein, 465 aa, Homo sapiens
MGSGSSSYRPKAIYLDIDGRIQKHSVQSETCGHQATLRAFKINELKAEVANHLAVLEKRVELEGLKVVEIEKCKSDIKKMREELAARSSRTNCPCKYSFLDNHKKLTPRRDVPTYPKYLLSPETIEALRKPTFDVWLWEPNEMLSCLEHMYHDLGLVRDFSINPVTLRRWLFCVHDNYRNNPFHNFRHCFCVAQMMYSMVWLCSLQEKFSQTDILILMTAAICHDLDHPGYNNTYQINARTELAVRYNDISPLENHHCAVAFQILAEPECNIFSNIPPDGFKQIRQGMITLILATDMARHAEIMDSFKEKMENFDYSNEEHMTLLKMILIKCCDISNEVRPMEVAEPWVDCLLEEYFMQSDREKSEGLPVAPFMDRDKVTKATAQIGFIKFVLIPMFETVTKLFPMVEEIMLQPLWESRDRYEELKRIDDAMKELQKKTDSLTSGATEKSRERSRDVKNSEGDCA

SEQ ID NO: 57781 - protein, 540 aa, Homo sapiens
MGSGSSSYRPKAIYLDIDGRIQKVIFSKYCNSSDIMDLFCIATGLPRNTTISLLTTDDAMVSIDPTMPANSERNELILYTSLRNLLFLPSKESWASHQHSVQSETCGHQATLRAFKINELKAEVANHLAVLEKRVELEGLKVVEIEKCKSDIKKMREELAARSSRTNCPCKYSFLDNHKKLTPRRDVPTYPKYLLSPETIEALRKPTFDVWLWEPNEMLSCLEHMYHDLGLVRDFSINPVTLRRWLFCVHDNYRNNPFHNFRHCFCVAQMMYSMVWLCSLQEKFSQTDILILMTAAICHDLDHPGYNNTYQINARTELAVRYNDISPLENHHCAVAFQILAEPECNIFSNIPPDGFKQIRQGMITLILATDMARHAEIMDSFKEKMENFDYSNEEHMTLLKMILIKCCDISNEVRPMEVAEPWVDCLLEEYFMQSDREKSEGLPVAPFMDRDKVTKATAQIGFIKFVLIPMFETVTKLFPMVEEIMLQPLWESRDRYEELKRIDDAMKELQKKTDSLTSGATEKSRERSRDVKNSEGDCA

SEQ ID NO: 57782 - protein, 466 aa, Homo sapiens
MDAFRSTPYKVRPVAIKQLSEREELIQSVLAQVAEQFSRAFKINELKAEVANHLAVLEKRVELEGLKVVEIEKCKSDIKKMREELAARSSRTNCPCKYSFLDNHKKLTPRRDVPTYPKYLLSPETIEALRKPTFDVWLWEPNEMLSCLEHMYHDLGLVRDFSINPVTLRRWLFCVHDNYRNNPFHNFRHCFCVAQMMYSMVWLCSLQEKFSQTDILILMTAAICHDLDHPGYNNTYQINARTELAVRYNDISPLENHHCAVAFQILAEPECNIFSNIPPDGFKQIRQGMITLILATDMARHAEIMDSFKEKMENFDYSNEEHMTLLKMILIKCCDISNEVRPMEVAEPWVDCLLEEYFMQSDREKSEGLPVAPFMDRDKVTKATAQIGFIKFVLIPMFETVTKLFPMVEEIMLQPLWESRDRYEELKRIDDAMKELQKKTDSLTSGATEKSRERSRDVKNSEGDCA

SEQ ID NO: 57783 - protein, 552 aa, Homo sapiens
MDAFRRNTTISLLTTDDAMVSIDPTMPANSERTPYKVRPVAIKQLSAGVEDKRTTSRGQSAERPLRDRRVVGLEQPRREGAFESGQVEPRPREPQGCYQEGQRIPPEREELIQSVLAQVAEQFSRAFKINELKAEVANHLAVLEKRVELEGLKVVEIEKCKSDIKKMREELAARSSRTNCPCKYSFLDNHKKLTPRRDVPTYPKYLLSPETIEALRKPTFDVWLWEPNEMLSCLEHMYHDLGLVRDFSINPVTLRRWLFCVHDNYRNNPFHNFRHCFCVAQMMYSMVWLCSLQEKFSQTDILILMTAAICHDLDHPGYNNTYQINARTELAVRYNDISPLENHHCAVAFQILAEPECNIFSNIPPDGFKQIRQGMITLILATDMARHAEIMDSFKEKMENFDYSNEEHMTLLKMILIKCCDISNEVRPMEVAEPWVDCLLEEYFMQSDREKSEGLPVAPFMDRDKVTKATAQIGFIKFVLIPMFETVTKLFPMVEEIMLQPLWESRDRYEELKRIDDAMKELQKKTDSLTSGATEKSRERSRDVKNSEGDCA

SEQ ID NO: 57784 - protein, 433 aa, Homo sapiens
MDAFRRAFKINELKAEVANHLAVLEKRVELEGLKVVEIEKCKSDIKKMREELAARSSRTNCPCKYSFLDNHKKLTPRRDVPTYPKYLLSPETIEALRKPTFDVWLWEPNEMLSCLEHMYHDLGLVRDFSINPVTLRRWLFCVHDNYRNNPFHNFRHCFCVAQMMYSMVWLCSLQEKFSQTDILILMTAAICHDLDHPGYNNTYQINARTELAVRYNDISPLENHHCAVAFQILAEPECNIFSNIPPDGFKQIRQGMITLILATDMARHAEIMDSFKEKMENFDYSNEEHMTLLKMILIKCCDISNEVRPMEVAEPWVDCLLEEYFMQSDREKSEGLPVAPFMDRDKVTKATAQIGFIKFVLIPMFETVTKLFPMVEEIMLQPLWESRDRYEELKRIDDAMKELQKKTDSLTSGATEKSRERSRDVKNSEGDCA

SEQ ID NO: 57785 - protein, 459 aa, Homo sapiens
MDAFRRNTTISLLTTDDAMVSIDPTMPANSERAFKINELKAEVANHLAVLEKRVELEGLKVVEIEKCKSDIKKMREELAARSSRTNCPCKYSFLDNHKKLTPRRDVPTYPKYLLSPETIEALRKPTFDVWLWEPNEMLSCLEHMYHDLGLVRDFSINPVTLRRWLFCVHDNYRNNPFHNFRHCFCVAQMMYSMVWLCSLQEKFSQTDILILMTAAICHDLDHPGYNNTYQINARTELAVRYNDISPLENHHCAVAFQILAEPECNIFSNIPPDGFKQIRQGMITLILATDMARHAEIMDSFKEKMENFDYSNEEHMTLLKMILIKCCDISNEVRPMEVAEPWVDCLLEEYFMQSDREKSEGLPVAPFMDRDKVTKATAQIGFIKFVLIPMFETVTKLFPMVEEIMLQPLWESRDRYEELKRIDDAMKELQKKTDSLTSGATEKSRERSRDVKNSEGDCA

SEQ ID NO: 57786 - protein, 526 aa, Homo sapiens
MDAFRSTPYKVRPVAIKQLSAGVEDKRTTSRGQSAERPLRDRRVVGLEQPRREGAFESGQVEPRPREPQGCYQEGQRIPPEREELIQSVLAQVAEQFSRAFKINELKAEVANHLAVLEKRVELEGLKVVEIEKCKSDIKKMREELAARSSRTNCPCKYSFLDNHKKLTPRRDVPTYPKYLLSPETIEALRKPTFDVWLWEPNEMLSCLEHMYHDLGLVRDFSINPVTLRRWLFCVHDNYRNNPFHNFRHCFCVAQMMYSMVWLCSLQEKFSQTDILILMTAAICHDLDHPGYNNTYQINARTELAVRYNDISPLENHHCAVAFQILAEPECNIFSNIPPDGFKQIRQGMITLILATDMARHAEIMDSFKEKMENFDYSNEEHMTLLKMILIKCCDISNEVRPMEVAEPWVDCLLEEYFMQSDREKSEGLPVAPFMDRDKVTKATAQIGFIKFVLIPMFETVTKLFPMVEEIMLQPLWESRDRYEELKRIDDAMKELQKKTDSLTSGATEKSRERSRDVKNSEGDCA

SEQ ID NO: 57787 - protein, 492 aa, Homo sapiens
MDAFRRNTTISLLTTDDAMVSIDPTMPANSERTPYKVRPVAIKQLSEREELIQSVLAQVAEQFSRAFKINELKAEVANHLAVLEKRVELEGLKVVEIEKCKSDIKKMREELAARSSRTNCPCKYSFLDNHKKLTPRRDVPTYPKYLLSPETIEALRKPTFDVWLWEPNEMLSCLEHMYHDLGLVRDFSINPVTLRRWLFCVHDNYRNNPFHNFRHCFCVAQMMYSMVWLCSLQEKFSQTDILILMTAAICHDLDHPGYNNTYQINARTELAVRYNDISPLENHHCAVAFQILAEPECNIFSNIPPDGFKQIRQGMITLILATDMARHAEIMDSFKEKMENFDYSNEEHMTLLKMILIKCCDISNEVRPMEVAEPWVDCLLEEYFMQSDREKSEGLPVAPFMDRDKVTKATAQIGFIKFVLIPMFETVTKLFPMVEEIMLQPLWESRDRYEELKRIDDAMKELQKKTDSLTSGATEKSRERSRDVKNSEGDCA

SEQ ID NO: 57788 - protein, 507 aa, Homo sapiens
MGSGSSSYRPKAIYLDIDGRIQKVIFSKYCNSSDIMDLFCIATGLPRTPYKVRPVAIKQLSEREELIQSVLAQVAEQFSRAFKINELKAEVANHLAVLEKRVELEGLKVVEIEKCKSDIKKMREELAARSSRTNCPCKYSFLDNHKKLTPRRDVPTYPKYLLSPETIEALRKPTFDVWLWEPNEMLSCLEHMYHDLGLVRDFSINPVTLRRWLFCVHDNYRNNPFHNFRHCFCVAQMMYSMVWLCSLQEKFSQTDILILMTAAICHDLDHPGYNNTYQINARTELAVRYNDISPLENHHCAVAFQILAEPECNIFSNIPPDGFKQIRQGMITLILATDMARHAEIMDSFKEKMENFDYSNEEHMTLLKMILIKCCDISNEVRPMEVAEPWVDCLLEEYFMQSDREKSEGLPVAPFMDRDKVTKATAQIGFIKFVLIPMFETVTKLFPMVEEIMLQPLWESRDRYEELKRIDDAMKELQKKTDSLTSGATEKSRERSRDVKNSEGDCA

SEQ ID NO: 57789 - protein, 465 aa, Homo sapiens
MDLFCIATGLPRNTTISLLTTDDAMVSIDPTMPANSERAFKINELKAEVANHLAVLEKRVELEGLKVVEIEKCKSDIKKMREELAARSSRTNCPCKYSFLDNHKKLTPRRDVPTYPKYLLSPETIEALRKPTFDVWLWEPNEMLSCLEHMYHDLGLVRDFSINPVTLRRWLFCVHDNYRNNPFHNFRHCFCVAQMMYSMVWLCSLQEKFSQTDILILMTAAICHDLDHPGYNNTYQINARTELAVRYNDISPLENHHCAVAFQILAEPECNIFSNIPPDGFKQIRQGMITLILATDMARHAEIMDSFKEKMENFDYSNEEHMTLLKMILIKCCDISNEVRPMEVAEPWVDCLLEEYFMQSDREKSEGLPVAPFMDRDKVTKATAQIGFIKFVLIPMFETVTKLFPMVEEIMLQPLWESRDRYEELKRIDDAMKELQKKTDSLTSGATEKSRERSRDVKNSEGDCA

SEQ ID NO: 57790 - protein, 622 aa, Homo sapiens
MPPQLQNGLNLSAKVVQGSLDSLPQAVREFLENNAELCQPDHIHICDGSEEENGRLLGQMEEEGILRRLKKYDNCWLALTDPRDVARIESKTVIVTQEQRDTVPIPKTGLSQLGRWMSEEDFEKAFNARFPGCMKGRTMYVIPFSMGPLGSPLSKIGIELTDSPYVVASMRIMTRMGTPVLEAVGDGEFVKCLHSVGCPLPLQKPLVNNWPCNPELTLIAHLPDRREIISFGSGYGGNSLLGKKCFALRMASRLAKEEGWLAEHMLILGITNPEGEKKYLAAAFPSACGKTNLAMMNPSLPGWKVECVGDDIAWMKFDAQGHLRAINPENGFFGVAPGTSVKTNPNAIKTIQKNTIFTNVAETSDGGVYWEGIDEPLASGVTITSWKNKEWSSEDGEPCAHPNSRFCTPASQCPIIDAAWESPEGVPIEGIIFGGRRPAGVPLVYEALSWQHGVFVGAAMRSEATAAAEHKGKIIMHDPFAMRPFFGYNFGKYLAHWLSMAQHPAAKLPKIFHVNWFRKDKEGKFLWPGFGENSRVLEWMFNRIDGKASTKLTPIGYIPKEDALNLKGLGHINMMELFSISKEFWEKEVEDIEKYLEDQVNADLPCEIEREILALKQRISQM

SEQ ID NO: 57791 - protein, 313 aa, Homo sapiens
MTTGRTMYVIPFSMGPLGSPLSKIGIELTDSPYVVASMRIMTRMGTPVLEAVGDGEFVKCLHSVGCPLPLQKPLVNNWPCNPELTLIAHLPDRREIISFGSGYGGNSLLGKKCFALRMASRLAKEEGWLAEHMLILGITNPEGEKKYLAAAFPSACGKTNLAMMNPSLPGWKVECVGDDIAWMKFDAQGHLRAINPENGFFGVAPGTSVKTNPNAIKTIQKNTIFTNVAETSDGGVYWEGIDEPLASGVTITSWKNKEWSSEDGVSLPEALVCRAAGTACLSQALTSLSLSYRGTLCPPQLEVLHPCQPVPHH

SEQ ID NO: 57792 - protein, 304 aa, Homo sapiens
TTGHLRAINPENGFFGVAPGTSVKTNPNAIKTIQKNTIFTNVAETSDGGVYWEGIDEPLASGVTITSWKNKEWSSEDGEPCAHPNSRFCTPASQCPIIDAAWESPEGVPIEGIIFGGRRPAGVPLVYEALSWQHGVFVGAAMRSEATAAAEHKGKIIMHDPFAMRPFFGYNFGKYLAHWLSMAQHPAAKLPKIFHVNWFRKDKEGKFLWPGFGENSRVLEWMFNRIDGKASTKLTPIGYIPKEDALNLKGLGHINMMELFSISKEFWEKEVEDIEKYLEDQVNADLPCEIEREILALKQRISQM

SEQ ID NO: 57793 - protein, 305 aa, Homo sapiens
MTTGHLRAINPENGFFGVAPGTSVKTNPNAIKTIQKNTIFTNVAETSDGGVYWEGIDEPLASGVTITSWKNKEWSSEDGEPCAHPNSRFCTPASQCPIIDAAWESPEGVPIEGIIFGGRRPAGVPLVYEALSWQHGVFVGAAMRSEATAAAEHKGKIIMHDPFAMRPFFGYNFGKYLAHWLSMAQHPAAKLPKIFHVNWFRKDKEGKFLWPGFGENSRVLEWMFNRIDGKASTKLTPIGYIPKEDALNLKGLGHINMMELFSISKEFWEKEVEDIEKYLEDQVNADLPCEIEREILALKQRISQM

SEQ ID NO: 57794 - protein, 640 aa, Homo sapiens
MAALYRPGLRLNWHGLSPLGWPSCRSIQTLRVLSGDLGQLPTGIRDFVEHSARLCQPEGIHICDGTEAENTATLTLLEQQGLIRKLPKYNNCWLARTDPKDVARVESKTVIVTPSQRDTVQLPPGGARGQLGNWMSPADFQRAVDERFPGCMQGRTMYVLPFSMGPVGSPLSRIGVQLTDSAYVVASMRIMTRLGTPVLQALGDGDFVKCLHSVGQPLTGQGEPVSQWPCNPEKTLIGHVPDQREIISFGSGYGGNSLLGKKCFALRIASRLARDEGWLAEHMLILGITSPAGKKRYVAAAFPSACGKTNLAMMRPALPGWKVECVGDDIAWMRFDSEGRLRAINPENGFFGVAPGTSATTNPNAMATIQSNTIFTNVAETSDGGVYWEGIDQPLPPGVTVTSWLGKPWKPGDKEPCAHPNSRFCAPARQCPIMDPAWEAPEGVPIDAIIFGGRRPKGVPLVYEAFNWRHGVFVGSAMRSESTAAAEHKGKIIMHDPFAMRPFFGYNFGHYLEHWLSMEGRKGAQLPRIFHVNWFRRDEAGHFLWPGFGENARVLDWICRRLEGEDSARETPIGLVPKEGALDLSGLRAIDTTQLFSLPKDFWEQEVRDIRSYLTEQVNQDLPKEVLAELEALERRVHKM

SEQ ID NO: 57795 - protein, 441 aa, Homo sapiens
MAALYRPGLRLNWHGLSPLGWPSCRSIQTLRVLSGDLGQLPTGIRDFVEHSARLCQPEGIHICDGTEAENTATLTLLEQQGLIRKLPKYNNCWLARTDPKDVARVESKTVIVTPSQRDTVQLPPGGARGQLGNWMSPADFQRAVDERFPGCMQGRTMYVLPFSMGPVGSPLSRIGVQLTDSAYVVASMRIMTRLGTPVLQALGDGDFVKCLHSVGQPLTGQGEPVSQWPCNPEKTLIGHVPDQREIISFGSGYGGNSLLGKKCFALRIASRLARDEGWLAEHMLILGITSPAGKKRYVAAAFPSACGKTNLAMMRPALPGWKVECVGDDIAWMRFDSEGRLRAINPENGFFGVAPGTSATTNPNAMATIQSNTIFTNVAETSDGGVYWEGIDQPLPPGVTVTSWLGKPWKPGMCGGEGVAQPPGLSTLMVEKLSPQPPTIF

SEQ ID NO: 57796 - protein, 506 aa, Homo sapiens
MSPADFQRAVDERFPGCMQGRTMYVLPFSMGPVGSPLSRIGVQLTDSAYVVASMRIMTRLGTPVLQALGDGDFVKCLHSVGQPLTGQGEPVSQWPCNPEKTLIGHVPDQREIISFGSGYGGNSLLGKKCFALRIASRLARDEGWLAEHMLILGITSPAGKKRYVAAAFPSACGKTNLAMMRPALPGWKVECVGDDIAWMRFDSEGRLRAINPENGFFGVAPGTSATTNPNAMATIQSNTIFTNVAETSDGGVYWEGIDQPLPPGVTVTSWLGKPWKPGDKEPCAHPNSRFCAPARQCPIMDPAWEAPEGVPIDAIIFGGRRPKGVPLVYEAFNWRHGVFVGSAMRSESTAAAEHKGKIIMHDPFAMRPFFGYNFGHYLEHWLSMEGRKGAQLPRIFHVNWFRRDEAGHFLWPGFGENARVLDWICRRLEGEDSARETPIGLVPKEGALDLSGLRAIDTTQLFSLPKDFWEQEVRDIRSYLTEQVNQDLPKEVLAELEALERRVHKM

SEQ ID NO: 57797 - protein, 506 aa, Homo sapiens; identical to SEQ ID NO: 57796

SEQ ID NO: 57798 - protein, 780 aa, Homo sapiens
MAAVDLEKLRASGAGKAIGVLTSGGDAQGMNAAVRAVTRMGIYVGAKVFLIYEGYEGLVEGGENIKQANWLSVSNIIQLGGTIIGSARCKAFTTREGRRAAAYNLVQHGITNLCVIGGDGSLTGANIFRSEWGSLLEELVAEGKISETTARTYSHLNIAGLVGSIDNDFCGTDMTIGTDSALHRIMEVIDAITTTAQSHQRTFVLEVMGRHCGYLALVSALASGADWLFIPEAPPEDGWENFMCERLGETRSRGSRLNIIIIAEGAIDRNGKPISSSYVKDLVVQRLGFDTRVTVLGHVQRGGTPSAFDRILSSKMGMEAVMALLEATPDTPACVVTLSGNQSVRLPLMECVQMTKEVQKAMDDKRFDEATQLRGGSFENNWNIYKLLAHQKPPKEKSNFSLAILNVGAPAAGMNAAVRSAVRTGISHGHTVYVVHDGFEGLAKGQVQEVGWHDVAGWLGRGGSMLGTKRTLPKGQLESIVENIRIYGIHALLVVGGFEAYEGVLQLVEARGRYEELCIVMCVIPATISNNVPGTDFSLGSDTAVNAAMESCDRIKQSASGTKRRVFIVETMGGYCGYLATVTGIAVGADAAYVFEDPFNIHDLKVNVEHMTEKMKTDIQRGLVLRNEKCHDYYTTEFLYNLYSSEGKGVFDCRTNVLGHLQQGGAPTPFDRNYGTKLGVKAMLWLSEKLREVYRKGRVFANAPDSACVIGLKKKAVAFSPVTELKKDTDFEHRMPREQWWLSLRLMLKMLAQYRISMAAYVSGELEHVTRRTLSMDKGF

SEQ ID NO: 57799 - protein, 253 aa, Homo sapiens
MRSMCNQGRGRESSRGGLHVQGSCRGLSRSPQQETGFAKAPAGTDCFFHCSPGSRGQGDRKEEVTSEPGGTSIMSRLGGMNAAVRAVTRMGIYVGAKVFLIYEGYEGLVEGGENIKQANWLSVSNIIQLGGTIIGSARCKAFTTREGRRAAAYNLVQHGITNLCVIGGDGSLTGANIFRSEWGSLLEELVAEGKISETTARTYSHLNIAGLVGSIDNDFCGTDMTIGTDSALHRIMEVIDAITTRGRLGELHV

SEQ ID NO: 57800 - protein, 827 aa, Homo sapiens
MCNQGRGRESSRGGLHVQGSCRGLSRSPQQETGFAKAPAGTDCFFHCSPGSRGQGDRKEEVTSEPGGTSIMSRLGGMNAAVRAVTRMGIYVGAKVFLIYEGYEGLVEGGENIKQANWLSVSNIIQLGGTIIGSARCKAFTTREGRRAAAYNLVQHGITNLCVIGGDGSLTGANIFRSEWGSLLEELVAEGKISETTARTYSHLNIAGLVGSIDNDFCGTDMTIGTDSALHRIMEVIDAITTTAQSHQRTFVLEVMGRHCGYLALVSALASGADWLFIPEAPPEDGWENFMCERLGETRSRGSRLNIIIIAEGAIDRNGKPISSSYVKDLVVQRLGFDTRVTVLGHVQRGGTPSAFDRILSSKMGMEAVMALLEATPDTPACVVTLSGNQSVRLPLMECVQMTKEVQKAMDDKRFDEATQLRGGSFENNWNIYKLLAHQKPPKEKSNFSLAILNVGAPAAGMNAAVRSAVRTGISHGHTVYVVHDGFEGLAKGQVQEVGWHDVAGWLGRGGSMLGTKRTLPKGQLESIVENIRIYGIHALLVVGGFEAYEGVLQLVEARGRYEELCIVMCVIPATISNNVPGTDFSLGSDTAVNAAMESCDRIKQSASGTKRRVFIVETMGGYCGYLATVTGIAVGADAAYVFEDPFNIHDLKVNVEHMTEKMKTDIQRGLVLRNEKCHDYYTTEFLYNLYSSEGKGVFDCRTNVLGHLQQGGAPTPFDRNYGTKLGVKAMLWLSEKLREVYRKGRVFANAPDSACVIGLKKKAVAFSPVTELKKDTDFEHRMPREQWWLSLRLMLKMLAQYRISMAAYVSGELEHVTRRTLSMDKGF

SEQ ID NO: 57801 - protein, 573 aa, Homo sapiens
MGRHCGYLALVSALASGADWLFIPEAPPEDGWENFMCERLGETRSRGSRLNIIIIAEGAIDRNGKPISSSYVKDLVVQRLGFDTRVTVLGHVQRGGTPSAFDRILSSKMGMEAVMALLEATPDTPACVVTLSGNQSVRLPLMECVQMTKEVQKAMDDKRFDEATQLRGGSFENNWNIYKLLAHQKPPKEKSNFSLAILNVGAPAAGMNAAVRSAVRTGISHGHTVYVVHDGFEGLAKGQVQEVGWHDVAGWLGRGGSMLGTKRTLPKGQLESIVENIRIYGIHALLVVGGFEAYEGVLQLVEARGRYEELCIVMCVIPATISNNVPGTDFSLGSDTAVNAAMESCDRIKQSASGTKRRVFIVETMGGYCGYLATVTGIAVGADAAYVFEDPFNIHDLKVNVEHMTEKMKTDIQRGLVLRNEKCHDYYTTEFLYNLYSSEGKGVFDCRTNVLGHLQQGGAPTPFDRNYGTKLGVKAMLWLSEKLREVYRKGRVFANAPDSACVIGLKKKAVAFSPVTELKKDTDFEHRMPREQWWLSLRLMLKMLAQYRISMAAYVSGELEHVTRRTLSMDKGF

SEQ ID NO: 57802 - protein, 780 aa, Homo sapiens
MTHEEHHAAKTLGIGKAIAVLTSGGDAQGMNAAVRAVVRVGIFTGARVFFVHEGYQGLVDGGDHIKEATWESVSMMLQLGGTVIGSARCKDFREREGRLRAAYNLVKRGITNLCVIGGDGSLTGADTFRSEWSDLLSDLQKAGKITDEEATKSSYLNIVGLVGSIDNDFCGTDMTIGTDSALHRIMEIVDAITTTAQSHQRTFVLEVMGRHCGYLALVTSLSCGADWVFIPECPPDDDWEEHLCRRLSETRTRGSRLNIIIVAEGAIDKNGKPITSEDIKNLVVKRLGYDTRVTVLGHVQRGGTPSAFDRILGSRMGVEAVMALLEGTPDTPACVVSLSGNQAVRLPLMECVQVTKDVTKAMDEKKFDEALKLRGRSFMNNWEVYKLLAHVRPPVSKSGSHTVAVMNVGAPAAGMNAAVRSTVRIGLIQGNRVLVVHDGFEGLAKGQIEEAGWSYVGGWTGQGGSKLGTKRTLPKKSFEQISANITKFNIQGLVIIGGFEAYTGGLELMEGRKQFDELCIPFVVIPATVSNNVPGSDFSVGADTALNTICTTCDRIKQSAAGTKRRVFIIETMGGYCGYLATMAGLAAGADAAYIFEEPFTIRDLQANVEHLVQKMKTTVKRGLVLRNEKCNENYTTDFIFNLYSEEGKGIFDSRKNVLGHMQQGGSPTPFDRNFATKMGAKAMNWMSGKIKESYRNGRIFANTPDSGCVLGMRKRALVFQPVAELKDQTDFEHRIPKEQWWLKLRPILKILAKYEIDLDTSDHAHLEHITRKRSGEAAV

SEQ ID NO: 57803 - protein, 851 aa, Homo sapiens
MHKDEFHLKFFMCVIQSRQLVRTPQRTAGEASTSSMLIPKPPPKTDILKSLDTMDDPDTVGSIPVFKTEWIMTHEEHHAAKTLGIGKAIAVLTSGGDAQGMNAAVRAVVRVGIFTGARVFFVHEGYQGLVDGGDHIKEATWESVSMMLQLGGTVIGSARCKDFREREGRLRAAYNLVKRGITNLCVIGGDGSLTGADTFRSEWSDLLSDLQKAGKITDEEATKSSYLNIVGLVGSIDNDFCGTDMTIGTDSALHRIMEIVDAITTTAQSHQRTFVLEVMGRHCGYLALVTSLSCGADWVFIPECPPDDDWEEHLCRRLSETRTRGSRLNIIIVAEGAIDKNGKPITSEDIKNLVVKRLGYDTRVTVLGHVQRGGTPSAFDRILGSRMGVEAVMALLEGTPDTPACVVSLSGNQAVRLPLMECVQVTKDVTKAMDEKKFDEALKLRGRSFMNNWEVYKLLAHVRPPVSKSGSHTVAVMNVGAPAAGMNAAVRSTVRIGLIQGNRVLVVHDGFEGLAKGQIEEAGWSYVGGWTGQGGSKLGTKRTLPKKSFEQISANITKFNIQGLVIIGGFEAYTGGLELMEGRKQFDELCIPFVVIPATVSNNVPGSDFSVGADTALNTICTTCDRIKQSAAGTKRRVFIIETMGGYCGYLATMAGLAAGADAAYIFEEPFTIRDLQANVEHLVQKMKTTVKRGLVLRNEKCNENYTTDFIFNLYSEEGKGIFDSRKNVLGHMQQGGSPTPFDRNFATKMGAKAMNWMSGKIKESYRNGRIFANTPDSGCVLGMRKRALVFQPVAELKDQTDFEHRIPKEQWWLKLRPILKILAKYEIDLDTSDHAHLEHITRKRSGEAAV

SEQ ID NO: 57804 - protein, 780 aa, Homo sapiens; identical to SEQ ID NO: 57802

SEQ ID NO: 57805 - protein, 749 aa, Homo sapiens
MTHEEHHAAKTLGIGKAIAVLTSGGDAQGMNAAVRAVVRVGIFTGARVFFVHEGYQGLVDGGDHIKEATWESVSMMLQLGGTVIGSARCKDFREREGRLRAAYNLVKRGITNLCVIGGDGSLTGADTFRSEWSDLLSDLQKAGKITDEEATKSSYLNIVGLVGSIDNDFCGTDMTIGTDSALHRIMEIVDAITTTAQSHQRTFVLEVMGRHCGYLALVTSLSCGADWVFIPECPPDDDWEEHLCRRLSETRTRGSRLNIIIVAEGAIDKNGKPITSEDIKNGSRMGVEAVMALLEGTPDTPACVVSLSGNQAVRLPLMECVQVTKDVTKAMDEKKFDEALKLRGRSFMNNWEVYKLLAHVRPPVSKSGSHTVAVMNVGAPAAGMNAAVRSTVRIGLIQGNRVLVVHDGFEGLAKGQIEEAGWSYVGGWTGQGGSKLGTKRTLPKKSFEQISANITKFNIQGLVIIGGFEAYTGGLELMEGRKQFDELCIPFVVIPATVSNNVPGSDFSVGADTALNTICTTCDRIKQSAAGTKRRVFIIETMGGYCGYLATMAGLAAGADAAYIFEEPFTIRDLQANVEHLVQKMKTTVKRGLVLRNEKCNENYTTDFIFNLYSEEGKGIFDSRKNVLGHMQQGGSPTPFDRNFATKMGAKAMNWMSGKIKESYRNGRIFANTPDSGCVLGMRKRALVFQPVAELKDQTDFEHRIPKEQWWLKLRPILKILAKYEIDLDTSDHAHLEHITRKRSGEAAV

SEQ ID NO: 57806 - protein, 177 aa, Homo sapiens [sequence omitted]

SEQ ID NO: 57807 - protein, 780 aa, Homo sapiens; identical to SEQ ID NO: 57802

SEQ ID NO: 57808 - protein, 117 aa, Homo sapiens
MTHEEHHAAKTLGIGKAIAVLTSGGDAQGMNAAVRAVVRVGIFTGARVFFVHEGYQGLVDGGDHIKEATWESVSMMLQLGGTVIGSARCKDFREREGRLRAAYNLVKRGITNLCVIG

SEQ ID NO: 57809 - protein, 161 aa, Homo sapiens
MTHEEHHAAKTLGIGKAIAVLTSGGDAQGMNAAVRAVVRVGIFTGARVFFVHEGYQGLVDGGDHIKEATWESVSMMLQLGGTVIGSARCKDFREREGRLRAAYNLVKRGITNLCVIGGDGSLTGADTFRSEWSDLLSDLQKAGKITDEEATKSSYLNIVGL

SEQ ID NO: 57810 - protein, 157 aa, Homo sapiens
MTHEEHHAAKTLGIGKAIAVLTSGGDAQGMNAAVRAVVRVGIFTGARVFFVHEGYQGLVDGGDHIKEATWESVSMMLQLGGTVIGSARCKDFREREGRLRAAYNLVKRGITNLCVIGGDGSLTGADTFRSEWSDLLSDLQKAGKITDEEATKSSYLN

SEQ ID NO: 57811 - protein, 85 aa, Homo sapiens
MTHEEHHAAKTLGIGKAIAVLTSGGDAQGMNAAVRAVVRVGIFTGARVFFVHEGYQGLVDGGDHIKEATWESVSMMLQLGGTVIG

SEQ ID NO: 57812 - protein, 139 aa, Homo sapiens
MTHEEHHAAKTLGIGKAIAVLTSGGDAQGMNAAVRAVVRVGIFTGARVFFVHEGYQGLVDGGDHIKEATWESVSMMLQLGGTVIGSARCKDFREREGRLRAAYNLVKRGITNLCVIGGDGSLTGADTFRSEWSDLLSDL

SEQ ID NO: 57813 - protein, 749 aa, Homo sapiens; identical to SEQ ID NO: 57805

SEQ ID NO: 57814 - protein, 202 aa, Homo sapiens
MGGYCGYLANMGGLAAGADAAYIFEEPFDIRDLQSNVEHLTEKMKTTIQRGLVLRNESCSENYTTDFIYQLYSEEGKGVFDCRKNVLGHMQQGGAPSPFDRNFGTKISARAMEWITAKLKEARGRGKKFTTDDSICVLGISKRNVIFQPVAELKKQTDFEHRIPKEQWWLKLRPLMKILAKYKASYDVSDSGQLEHVQPWSV

SEQ ID NO: 57815 - protein, 776 aa, Homo sapiens
MCGYERCRPCRGAHGYLRGGQGVLHLRGLPGHGGRRLKHRRGRLGECLQHPASGAVRGDWREKPGCWSHRFPCPGRHALVGGTIIGSARCQAFRTREGRLKAACNLLQRGITNLCVIGGDGSLTGANLFRKEWSGLLEELARNGQIDKEAVQKYAYLNVVGMVGSIDNDFCGTDMTIGTDSALHRIIEVVDAIMTTAQSHQRTFVLEVMGRHCGYLALVSALACGADWVFLPESPPEEGWEEQMCVKLSENRARKKRLNIIIVAEGAIDTQNKPITSEKIKELVVTQLGYDTRVTILGHVQRGGTPSAFDRILASRMGVEAVIALLEATPDTPACVVSLNGNHAVRLPLMECVQMTQDVQKAMDERRFQDAVRLRGRSFAGNLNTYKRLAIKLPDDQIPKTNCNVAVINVGAPAAGMNAAVRSAVRVGIADGHRMLAIYDGFDGFAKGQIKEIGWTDVGGWTGQGGSILGTKRVLPGKYLEEIATQMRTHSINALLIIGGFEAYLGLLELSAAREKHEEFCVPMVMVPATVSNNVPGSDFSIGADTALNTITDTCDRIKQSASGTKRRVFIIETMGGYCGYLANMGGLAAGADAAYIFEEPFDIRDLQSNVEHLTEKMKTTIQRGLVLRNESCSENYTTDFIYQLYSEEGKGVFDCRKNVLGHMQQGGAPSPFDRNFGTKISARAMEWITAKLKEARGRGKKFTTDDSICVLGISKRNVIFQPVAELKKQTDFEHRIPKEQWWLKLRPLMKILAKYKASYDVSDSGQLEHVQPWSV

SEQ ID NO: 57816 - protein, 784 aa, Homo sapiens
MDADDSRAPKGSLRKFLEHLSGAGKAIGVLTSGGDAQGMNAAVRAVVRMGIYVGAKVYFIYEGYQGMVDGGSNIAEADWESVSSILQVGGTIIGSARCQAFRTREGRLKAACNLLQRGITNLCVIGGDGSLTGANLFRKEWSGLLEELARNGQIDKEAVQKYAYLNVVGMVGSIDNDFCGTDMTIGTDSALHRIIEVVDAIMTTAQSHQRTFVLEVMGRHCGYLALVSALACGADWVFLPESPPEEGWEEQMCVKLSENRARKKRLNIIIVAEGAIDTQNKPITSEKIKELVVTQLGYDTRVTILGHVQRGGTPSAFDRILASRMGVEAVIALLEATPDTPACVVSLNGNHAVRLPLMECVQMTQDVQKAMDERRFQDAVRLRGRSFAGNLNTYKRLAIKLPDDQIPKTNCNVAVINVGAPAAGMNAAVRSAVRVGIADGHRMLAIYDGFDGFAKGQIKEIGWTDVGGWTGQGGSILGTKRVLPGKYLEEIATQMRTHSINALLIIGGFEAYLGLLELSAAREKHEEFCVPMVMVPATVSNNVPGSDFSIGADTALNTITDTCDRIKQSASGTKRRVFIIETMGGYCGYLANMGGLAAGADAAYIFEEPFDIRDLQSNVEHLTEKMKTTIQRGLVLRNESCSENYTTDFIYQLYSEEGKGVFDCRKNVLGHMQQGGAPSPFDRNFGTKISARAMEWITAKLKEARGRGKKFTTDDSICVLGISKRNVIFQPVAELKKQTDFEHRIPKEQWWLKLRPLMKILAKYKASYDVSDSGQLEHVQPWSV

SEQ ID NO: 57817 - protein, 773 aa, Homo sapiens
YERCRPCRGAHGYLRGGQGVLHLRGLPGHGGRRLKHRRGRLGECLQHPASGAVRGDWREKPGCWSHRFPCPGRHALVGGTIIGSARCQAFRTREGRLKAACNLLQRGITNLCVIGGDGSLTGANLFRKEWSGLLEELARNGQIDKEAVQKYAYLNVVGMVGSIDNDFCGTDMTIGTDSALHRIIEVVDAIMTTAQSHQRTFVLEVMGRHCGYLALVSALACGADWVFLPESPPEEGWEEQMCVKLSENRARKKRLNIIIVAEGAIDTQNKPITSEKIKELVVTQLGYDTRVTILGHVQRGGTPSAFDRILASRMGVEAVIALLEATPDTPACVVSLNGNHAVRLPLMECVQMTQDVQKAMDERRFQDAVRLRGRSFAGNLNTYKRLAIKLPDDQIPKTNCNVAVINVGAPAAGMNAAVRSAVRVGIADGHRMLAIYDGFDGFAKGQIKEIGWTDVGGWTGQGGSILGTKRVLPGKYLEEIATQMRTHSINALLIIGGFEAYLGLLELSAAREKHEEFCVPMVMVPATVSNNVPGSDFSIGADTALNTITDTCDRIKQSASGTKRRVFIIETMGGYCGYLANMGGLAAGADAAYIFEEPFDIRDLQSNVEHLTEKMKTTIQRGLVLRNESCSENYTTDFIYQLYSEEGKGVFDCRKNVLGHMQQGGAPSPFDRNFGTKISARAMEWITAKLKEARGRGKKFTTDDSICVLGISKRNVIFQPVAELKKQTDFEHRIPKEQWWLKLRPLMKILAKYKASYDVSDSGQLEHVQPWSV

SEQ ID NO: 57818 - protein, 210 aa, Homo sapiens
MNAAVRAVVRMGIYVGAKVYFIYEGYQGMVDGGSNIAEADWESVSSILQVGGTIIGSARCQAFRTREGRLKAACNLLQRGITNLCVIGGDGSLTGANLFRKEWSGLLEELARNGQIDKEAVQKYAYLNVVGMVGSIDNDFCGTDMTIGTDSALHRIIEVVDAIMTTAQSHQRTFVLEVMGRHCGYLALVSALACGADWVFLPESPPEEGW

SEQ ID NO: 57819 - protein, 166 aa, Homo sapiens
  VARIANT 1: note = MOD_RES - Any amino acid
XADGHRMLAIYDGFDGFAKGQIKEIGWTDVGGWTGQGGSILGTKRVLPGKYLEEIATQMRTHSINALLIIGGFEAYKSACDMAEARGRHQELCIPLCVVPATISNNVPGTEISLGSDTGLNAVVETCDRIKQSASGTKRRVFIIETMGGYCGYLANMGGLAAGADA

SEQ ID NO: 57820 - protein, 240 aa, Homo sapiens
MGRHCGYLALVSALACGADWVFLPESPPEEGWEEQMCVKLSENRARKKRLNIIIVAEGAIDTQNKPITSEKIKELVVTQLGYDTRVTILGHVQRGGTPSAFDRILASRMGVEAVIALLEATPDTPACVVSLNGNHAVRLPLMECVQMTQDVQKAMDERRFQDAVRLRGRSFAGNLNTYKRLAIKLPDDQIPKTNCNVAVINVGAPAAGMNAAVRSAVRVGIADGHRMLAIYDGFDGFAKG

SEQ ID NO: 57821 - protein, 166 aa, Homo sapiens
MNAAVRAVVRMGIYVGAKVYFIYEGYQGMVDGGSNIAEADWESVSSILQVGGTIIGSARCQAFRTREGRLKAACNLLQRGITNLCVIGGDGSLTGANLFRKEWSGLLEELARNGQIDKEAVQKYAYLNVVGMVGSIDNDFCGTDMTIGTDSALHRIIEVVDAIMTT

SEQ ID NO: 57822 - protein, 103 aa, Homo sapiens
  VARIANT 1: note = MOD_RES - Any amino acid
XFIYQLYSEEGKGVFDCRKNVLGHMQQGGAPSPFDRNFGTKISARAMEWITAKLKEARGRGKKFTTDDSICVLGISKRNVIFQPVAELKKQTDFETVSMQPPR

SEQ ID NO: 57823 - protein, 580 aa, Homo sapiens
MSDFEEWISGTYRKMEEGPLPLLTFATAPYHDQKPGTSGLRKKTYYFEEKPCYLENFIQSIFFSIDLKDRQGSSLVVGGDGRYFNKSAIETIVQMAAANGIGRLVIGQNGILSTPAVSCIIRKIKAIGGIILTASHNPGGPNGDFGIKFNISNGGPAPEAITDKIFQISKTIEEYAVCPDLKVDLGVLGKQQFDLENKFKPFTVEIVDSVEAYATMLRSIFDFSALKELLSGPNRLKIRIDAMHGVVGPYVKKILCEELGAPANSAVNCVPLEDFGGHHPDPNLTYAADLVETMKSGEHDFGAAFDGDGDRNMILGKHGFFVNPSDSVAVIAANIFSIPYFQQTGVRGFARSMPTSGALDRVASATKIALYETPTGWKFFGNLMDASKLSLCGEESFGTGSDHIREKDGLWAVLAWLSILATRKQSVEDILKDHWQKYGRNFFTRYDYEEVEAEGANKMMKDLEALMFDRSFVGKQFSANDKVYTVEKADNFEYSDPVDGSISRNQGLRLIFTDGSRIVFRLSGTGSAGATIRLYIDSYEKDVAKINQDPQVMLAPLISIALKVSQLQERTGRTAPTVIT

SEQ ID NO: 57824 - protein, 562 aa, Homo sapiens
MVKIVTVKTQAYQDQKPGTSGLRKRVKVFQSSANYAENFIQSIISTVEPAQRQEATLVVGGDGRFYMKEAIQLIARIAAANGIGRLVIGQNGILSTPAVSCIIRKIKAIGGIILTASHNPGGPNGDFGIKFNISNGGPAPEAITDKIFQISKTIEEYAVCPDLKVDLGVLGKQQFDLENKFKPFTVEIVDSVEAYATMLRSIFDFSALKELLSGPNRLKIRIDAMHGVVGPYVKKILCEELGAPANSAVNCVPLEDFGGHHPDPNLTYAADLVETMKSGEHDFGAAFDGDGDRNMILGKHGFFVNPSDSVAVIAANIFSIPYFQQTGVRGFARSMPTSGALDRVASATKIALYETPTGWKFFGNLMDASKLSLCGEESFGTGSDHIREKDGLWAVLAWLSILATRKQSVEDILKDHWQKYGRNFFTRYDYEEVEAEGANKMMKDLEALMFDRSFVGKQFSANDKVYTVEKADNFEYSDPVDGSISRNQGLRLIFTDGSRIVFRLSGTGSAGATIRLYIDSYEKDVAKINQDPQVMLAPLISIALKVSQLQERTGRTAPTVIT

SEQ ID NO: 57825 - protein, 538 aa, Homo sapiens
MVKVFQSSANYAENFIQSIISTVEPAQRQEATLVVGGDGRFYMKEAIQLIARIAAANGIGRLVIGQNGILSTPAVSCIIRKIKAIGGIILTASHNPGGPNGDFGIKFNISNGGPAPEAITDKIFQISKTIEEYAVCPDLKVDLGVLGKQQFDLENKFKPFTVEIVDSVEAYATMLRSIFDFSALKELLSGPNRLKIRIDAMHGVVGPYVKKILCEELGAPANSAVNCVPLEDFGGHHPDPNLTYAADLVETMKSGEHDFGAAFDGDGDRNMILGKHGFFVNPSDSVAVIAANIFSIPYFQQTGVRGFARSMPTSGALDRVASATKIALYETPTGWKFFGNLMDASKLSLCGEESFGTGSDHIREKDGLWAVLAWLSILATRKQSVEDILKDHWQKYGRNFFTRYDYEEVEAEGANKMMKDLEALMFDRSFVGKQFSANDKVYTVEKADNFEYSDPVDGSISRNQGLRLIFTDGSRIVFRLSGTGSAGATIRLYIDSYEKDVAKINQDPQVMLAPLISIALKVSQLQERTGRTAPTVIT

SEQ ID NO: 57826 - protein, 365 aa, Homo sapiens
MLRSIFDFSALKELLSGPNRLKIRIDAMHGVVGPYVKKILCEELGAPANSAVNCVPLEDFGGHHPDPNLTYAADLVETMKSGEHDFGAAFDGDGDRNMILGKHGFFVNPSDSVAVIAANIFSIPYFQQTGVRGFARSMPTSGALDRVASATKIALYETPTGWKFFGNLMDASKLSLCGEESFGTGSDHIREKDGLWAVLAWLSILATRKQSVEDILKDHWQKYGRNFFTRYDYEEVEAEGANKMMKDLEALMFDRSFVGKQFSANDKVYTVEKADNFEYSDPVDGSISRNQGLRLIFTDGSRIVFRLSGTGSAGATIRLYIDSYEKDVAKINQDPQVMLAPLISIALKVSQLQERTGRTAPTVIT

SEQ ID NO: 57827 - protein, 612 aa, Homo sapiens
MAAPEGSGLGEDARLDQETAQWLRWDKNSLTLEAVKRLIAEGNKEELRKCFGARMEFGTAGLRAAMGPGISRMNDLTIIQTTQGFCRYLEKQFSDLKQKGIVISFDARAHPSSGGSSRRFARLAATTFISQGIPVYLFSDITPTPFVPFTVSHLKLCAGIMITASHNPKQDNGYKVYWDNGAQIISPHDKGISQAIEENLEPWPQAWDDSLIDSSPLLHNPSASINNDYFEDLKKYCFHRSVNRETKVKFVHTSVHGVGHSFVQSAFKAFDLVPPEAVPEQKDPDPEFPTVKYPNPEEGKGVLTLSFALADKTKARIVLANDPDADRLAVAEKQDSGEWRVFSGNELGALLGWWLFTSWKEKNQDRSALKDTYMLSSTVSSKILRAIALKEGFHFEETLTGFKWMGNRAKQLIDQGKTVLFAFEEAIGYMCCPFVLDKDGVSAAVISAELASFLATKNLSLSQQLKAIYVEYGYHITKASYFICHDQETIKKLFENLRNYDGKNNYPKACGKFEISAIRDLTTGYDDSQPDKKAVLPTSKSSQMITFTFANGGVATMRTSGTEPKIKYYAELCAPPGNSDPEQLKKELNELVSAIEEHFFQPQKYNLQPKAD

SEQ ID NO: 57828 - protein, 452 aa, Homo sapiens
MITASHNPKQDNGYKVYWDNGAQIISPHDKGISQAIEENLEPWPQAWDDSLIDSSPLLHNPSASINNDYFEDLKKYCFHRSVNRETKVKFVHTSVHGVGHSFVQSAFKAFDLVPPEAVPEQKDPDPEFPTVKYPNPEEGKGVLTLSFALADKTKARIVLANDPDADRLAVAEKQDSGEWRVFSGNELGALLGWWLFTSWKEKNQDRSALKDTYMLSSTVSSKILRAIALKEGFHFEETLTGFKWMGNRAKQLIDQGKTVLFAFEEAIGYMCCPFVLDKDGVSAAVISAELASFLATKNLSLSQQLKAIYVEYGYHITKASYFICHDQETIKKLFENLRNYDGKNNYPKACGKFEISAIRDLTTGYDDSQPDKKAVLPTSKSSQMITFTFANGGVATMRTSGTEPKIKYYAELCAPPGNSDPEQLKKELNELVSAIEEHFFQPQKYNLQPKAD

SEQ ID NO: 57829 - protein, 291 aa, Homo sapiens
MSSQLILRPFTVSHLKLCAGIMITASHNPKQDNGYKVYWDNGAQIISPHDKGISQAIEENLEPWPQAWDDSLIDSSPLLHNPSASINNDYFEDLKKYCFHRSVNRETKVKFVHTSVHGVGHSFVQSAFKAFDLVPPEAVPEQKDPDPEFPTVKYPNPEEGKGVLTLSFALADKTKARIVLANDPDADRLAVAEKQDSGEWRVFSGNELGALLGWWLFTSWKEKNQDRSALKDTYMLSSTVSSKILRAIALKEGFHFEETLTGFKWMGNRAKQLIDQGKTVLFAFEEAIGKK

SEQ ID NO: 57830 - protein, 622 aa, Homo sapiens
MAENTEGDLNSNLLHAPYHTGDPQLDTAIGQWLRWDKNPKTKEQIENLLRNGMNKELRDRLCCRMTFGTAGLRSAMGAGFCYINDLTVIQSTQGMYKYLERCFSDFKQRGFVVGYDTRGQVTSSCSSQRLAKLTAAVLLAKDVPVYLFSRYVPTPFVPYAVQKLKAVAGVMITASHNRKEDNGYKVYWETGAQITSPHDKEILKCIEECVEPWNGSWNDNLVDTSPLKRDPLQDICRRYMEDLKKICFYRELNSKTTLKFVHTSFHGVGHDYVQLAFKVFGFKPPIPVPEQKDPDPDFSTVKCPNPEEGESVLELSLRLAEKENARVVLATDPDADRLAAAELQENGCWKVFTGNELAALFGWWMFDCWKKNKSRNADVKNVYMLATTVSSKILKAIALKEGFHFEETLPGFKWIGSRIIDLLENGKEVLFAFEESIGFLCGTSVLDKDGVSAAVVVAEMASYLETMNITLKQQLVKVYEKYGYHISKTSYFLCYEPPTIKSIFERLRNFDSPKEYPKFCGTFAILHVRDVTTGYDSSQPNKKSVLPVSKNSQMITFTFQNGCVATLRTSGTEPKIKYYAEMCASPDQSDTALLEEELKKLIDALIENFLQPSKNGLIWRSV

SEQ ID NO: 57831 - protein, 570 aa, Homo sapiens
MGGEWGQSAICPESAQEWTYQVGQHLVDMDLGAITKYSALHAKPNGLILQYGTAGFRTKAEHLDHVMFRMGLLAVLRSKQTKSTIGVMVTASHNPEEDNGVKLVDPLGEMLAPSWEEHATCLANAEEQDMQRVLIDISEKEAVNLQQDAFVVIGRDTRPSSEKLSQSVIDGVTVLGGQFHDYGLLTTPQLHYMVYCRNTGGRYGKATIEGYYQKLSKAFVELTKQASCSGDEYRSLKVDCANGIGALKLREMEHYFSQGLSVQLFNDGSKGKLNHLCGADFVKSHQKPPQGMEIKSNERCCSFDGDADRIVYYYHDADGHFHLIDGDKIATLISSFLKELLVEIGESLNIGVVQTAYANGSSTRYLEEVMKVPVYCTKTGVKHLHHKAQEFDIGVYFEANGHGTALFSTAVEMKIKQSAEQLEDKKRKAAKMLENIIDLFNQAAGDAISDMLVIEAILALKGLTVQQWDALYTDLPNRQLKVQVADRRVISTTDAERQAVTPPGLQEAINDLVKKYKLSRAFVRPSGTEDVVRVYAEADSQESADHLAHEVSLAVFQLAGGIGERPQPGF

SEQ ID NO: 57832 - protein, 147 aa, Homo sapiens
MDLGAITKYSALHAKPNGLILQYGTAGFRTKAEHLDHVMFRMGLLAVLRSKQTKSTIGVMVTASHNPEEDNGVKLVDPLGEMLAPSWEEHATCLANAEEQDMQRVLIDISEKEAVNLQQDAFVVIGRDTRPSSEKLSQSVIDGVTVL

SEQ ID NO: 57833 - protein, 542 aa, Homo sapiens
MDLGAITKYSALHAKPNGLILQYGTAGFRTKAEHLDHVMFRMGLLAVLRSKQTKSTIGVMVTASHNPEEDNGVKLVDPLGEMLAPSWEEHATCLANAEEQDMQRVLIDISEKEAVNLQQDAFVVIGRDTRPSSEKLSQSVIDGVTVLGGQFHDYGLLTTPQLHYMVYCRNTGGRYGKATIEGYYQKLSKAFVELTKQASCSGDEYRSLKVDCANGIGALKLREMEHYFSQGLSVQLFNDGSKGKLNHLCGADFVKSHQKPPQGMEIKSNERCCSFDGDADRIVYYYHDADGHFHLIDGDKIATLISSFLKELLVEIGESLNIGVVQTAYANGSSTRYLEEVMKVPVYCTKTGVKHLHHKAQEFDIGVYFEANGHGTALFSTAVEMKIKQSAEQLEDKKRKAAKMLENIIDLFNQAAGDAISDMLVIEAILALKGLTVQQWDALYTDLPNRQLKVQVADRRVISTTDAERQAVTPPGLQEAINDLVKKYKLSRAFVRPSGTEDVVRVYAEADSQESADHLAHEVSLAVFQLAGGIGERPQPGF

SEQ ID NO: 57834 - protein, 566 aa, Homo sapiens
MDLGAITKYSALHAKPNGLILQYGTAGFRTKAEHLDHVMFRMGLLAVLRSKQTKSTIGVMVTASHNPEEDNGVKLVDPLGEMLAPSWEEHATCLANAEEQDMQRVLIDISEKEAVNLQQDAFVVIGRDTRPSSEKLSQSVIDGVTVLGGQFHDYGLLTTPQLHYMVYCRNTGGRYGKATIEGYYQKLSKAFVELTKQASCSGDEYRSLKVDCANGIGALKLREMEHYFSQGLSVQLFNDGSKGKLNHLCGADFVKSHQKPPQGMEIKSNERCCSFDGDADRIVYYYHDADGHFHLIDGDKIATLISSFLKELLVEIGESLNIGVVQTAYANGSSTRYLEEVMKVPVYCTKTGVKHLHHKAQEFDIGVYFEANGHGTALFSTAVEMKIKQSAEQLEDKKRKAAKMLENIIDLFNQAAGDAISDMLVIEAILALKGLTVQQWDALYTDLPNRQLKVQVADRRVISTTDAERQAVTPPGLQEAINDLVKKYKLSRAFVRPSGTEDVVRVYAEADSQESADHLAHEVSLAVFQLAGGIGERPQPGYKAAETTHNINNAFGPGTANEHTVP

SEQ ID NO: 57835 - protein, 239 aa, Homo sapiens
MEGSPIPVLTVPTAPYEDQRPAGGGGLRRPTGLFEGQRNYLPNFIQSVLSSIDLRDRQGCTMVVGSDGRYFSRTAIEIVVQMAAANGIGRLIIGQNGILSTPAVSCIIRKIKAAGGIILTASHCPGGPGGEFGVKFNVANGVEIVDPVDIYLNLLRTIFDFHAIKGLLTGPSQLKIRIDAMHGVMGPYVRKVLCDELGAPANSAINCVPLEDFGGQHPDPNLTYATTLLEAMKGGEYGF

SEQ ID NO: 57836 - protein, 567 aa, Homo sapiens
MEGSPIPVLTVPTAPYEDQRPAGGGGLRRPTGLFEGQRNYLPNFIQSVLSSIDLRDRQGCTMVVGSDGRYFSRTAIEIVVQMAAANGIGRLIIGQNGILSTPAVSCIIRKIKAAGGIILTASHCPGGPGGEFGVKFNVANGGPAPDVVSDKIYQISKTIEEYAICPDLRIDLSRLGRQEFDLENKFKPFRVEIVDPVDIYLNLLRTIFDFHAIKGLLTGPSQLKIRIDAMHGVMGPYVRKVLCDELGAPANSAINCVPLEDFGGQHPDPNLTYATTLLEAMKGGEYGFGAAFDADGDRYMILGQNGFFVSPSDSLAIIAANLSCIPYFRQMGVRGFGRSMPTSMALDRVAKSMKVPVYETPAGWRFFSNLMDSGRCNLCGEESFGTGSDHLREKDGLWAVLVWLSIIAARKQSVEEIVRDHWAKFGRHYYCRFDYEGLDPKTTYYIMRDLEALVTDKSFIGQQFAVGSHVYSVAKTDSFEYVDPVDGTVTKKQGLRIIFSDASRLIFRLSSSSGVRATLRLYAESYERDPSGHDQEPQAVLSPLIAIALKISQIHERTGRRGPTVIT

SEQ ID NO: 57837 - protein, 483 aa, Homo sapiens
MAQADIALIGLAVMGQNLILNMNDHGFVVCAFNRTVSKVDDFLANEAKGTKVVGAQSLKEMVSKLKKPRRIILLVKAGQAVDDFIEKLVPLLDTGDIIIDGGNSEYRDTTRRCRDLKAKGILFVGSGVSGGEEGARYGPSLMPGGNKEAWPHIKTIFQGIAAKVGTGEPCCDWVGDEGAGHFVKMVHNGIEYGDMQLICEAYHLMKDVLGMAQDEMAQAFEDWNKTELDSFLIEITANILKFQDTDGKHLLPKIRDSAGQKGTGKWTAISALEYGVPVTLIGEAVFARCLSSLKDERIQASKKLKGPQKFQFDGDKKSFLEDIRKALYASKIISYAQGFMLLRQAATEFGWTLNYGGIALMWRGGCIIRSVFLGKIKDAFDRNPELQNLLLDDFFKSAVENCQDSWRRAVSTGVQAGIPMPCFTTALSFYDGYRHEMLPASLIQAQRDYFGAHTYELLAKPGQFIHTNWTGHGGTVSSSSYNA

SEQ ID NO: 57838 - protein, 470 aa, Homo sapiens
MGQNLILNMNDHGFVVCAFNRTVSKVDDFLANEAKGTKVVGAQSLKEMVSKLKKPRRIILLVKAGQAVDDFIEKLVPLLDTGDIIIDGGNSEYRDTTRRCRDLKAKGILFVGSGVSGGEEGARYGPSLMPGGNKEAWPHIKTIFQGIAAKVGTGEPCCDWVGDEGAGHFVKMVHNGIEYGDMQLICEAYHLMKDVLGMAQDEMAQAFEDWNKTELDSFLIEITANILKFQDTDGKHLLPKIRDSAGQKGTGKWTAISALEYGVPVTLIGEAVFARCLSSLKDERIQASKKLKGPQKFQFDGDKKSFLEDIRKALYASKIISYAQGFMLLRQAATEFGWTLNYGGIALMWRGGCIIRSVFLGKIKDAFDRNPELQNLLLDDFFKSAVENCQDSWRRAVSTGVQAGIPMPCFTTALSFYDGYRHEMLPASLIQAQRDYFGAHTYELLAKPGQFIHTNWTGHGGTVSSSSYNA

SEQ ID NO: 57839 - protein, 461 aa, Homo sapiens
MAQADIALIGLAVMGQNLILNMNDHGFVVCAFNRTVSKVDDFLANEAKGTKVVGAQSLKEMVSKLKKPRRIILLVKAGQAVDDFIEKLRRCRDLKAKGILFVGSGVSGGEEGARYGPSLMPGGNKEAWPHIKTIFQGIAAKVGTGEPCCDWVGDEGAGHFVKMVHNGIEYGDMQLICEAYHLMKDVLGMAQDEMAQAFEDWNKTELDSFLIEITANILKFQDTDGKHLLPKIRDSAGQKGTGKWTAISALEYGVPVTLIGEAVFARCLSSLKDERIQASKKLKGPQKFQFDGDKKSFLEDIRKALYASKIISYAQGFMLLRQAATEFGWTLNYGGIALMWRGGCIIRSVFLGKIKDAFDRNPELQNLLLDDFFKSAVENCQDSWRRAVSTGVQAGIPMPCFTTALSFYDGYRHEMLPASLIQAQRDYFGAHTYELLAKPGQFIHTNWTGHGGTVSSSSYNA

SEQ ID NO: 57840 - protein, 429 aa, Homo sapiens
MTTALWSVLLIGLSPKLMISWPMRQAVDDFIEKLVPLLDTGDIIIDGGNSEYRDTTRRCRDLKAKGILFVGSGVSGGEEGARYGPSLMPGGNKEAWPHIKTIFQGIAAKVGTGEPCCDWVGDEGAGHFVKMVHNGIEYGDMQLICEAYHLMKDVLGMAQDEMAQAFEDWNKTELDSFLIEITANILKFQDTDGKHLLPKIRDSAGQKGTGKWTAISALEYGVPVTLIGEAVFARCLSSLKDERIQASKKLKGPQKFQFDGDKKSFLEDIRKALYASKIISYAQGFMLLRQAATEFGWTLNYGGIALMWRGGCIIRSVFLGKIKDAFDRNPELQNLLLDDFFKSAVENCQDSWRRAVSTGVQAGIPMPCFTTALSFYDGYRHEMLPASLIQAQRDYFGAHTYELLAKPGQFIHTNWTGHGGTVSSSSYNA

SEQ ID NO: 57841 - protein, 499 aa, Homo sapiens
MTFWTQMFFLLQDCEGLIVRSATKVTADVINAAEKLQVVGRAGTGVDNVDLEAATRKGILVMNTPNGNSLSAAELTCGMIMCLARQIPQATASMKDGKWERKKFMGTELNGKTLGILGLGRIGREVATRMQSFGMKTIGYDPIISPEVSASFGVQQLPLEEIWPLCDFITVHTPLLPSTTGLLNDNTFAQCKKGVRVVNCARGGIVDEGALLRALQSGQCAGAALDVFTEEPPRDRALVDHENVISCPHLGASTKEAQSRCGEEIAVQFVDMVKGKSLTGVVNAQALTSAFSPHTKPWIGLAEALGTLMRAWAGSPKGTIQVITQGTSLKNAGNCLSPAVIVGLLKEASKQADVNLVNAKLLVKEAGLNVTTSHSPAAPGEQGFGECLLAVALAGAPYQAVGLVQGTTPVLQGLNGAVFRPEVPLRRDLPLLLFRTQTSDPAMLPTMIGLLAEAGVRLLSYQTSLVSDGETWHVMGISSLLPSLEAWKQHVTEAFQFHF

SEQ ID NO: 57842 - protein, 533 aa, Homo sapiens
MAFANLRKVLISDSLDPCCRKILQDGGLQVVEKQNLSKEELIAELQDCEGLIVRSATKVTADVINAAEKLQVVGRAGTGVDNVDLEAATRKGILVMNTPNGNSLSAAELTCGMIMCLARQIPQATASMKDGKWERKKFMGTELNGKTLGILGLGRIGREVATRMQSFGMKTIGYDPIISPEVSASFGVQQLPLEEIWPLCDFITVHTPLLPSTTGLLNDNTFAQCKKGVRVVNCARGGIVDEGALLRALQSGQCAGAALDVFTEEPPRDRALVDHENVISCPHLGASTKEAQSRCGEEIAVQFVDMVKGKSLTGVVNAQALTSAFSPHTKPWIGLAEALGTLMRAWAGSPKGTIQVITQGTSLKNAGNCLSPAVIVGLLKEASKQADVNLVNAKLLVKEAGLNVTTSHSPAAPGEQGFGECLLAVALAGAPYQAVGLVQGTTPVLQGLNGAVFRPEVPLRRDLPLLLFRTQTSDPAMLPTMIGLLAEAGVRLLSYQTSLVSDGETWHVMGISSLLPSLEAWKQHVTEAFQFHF

SEQ ID NO: 57843 - protein, 96 aa, Homo sapiens
MKTIGYDPIISPEVSASFGVQQLPLEEIWPLCDFITVHTPLLPSTTGLLNDNTFAQCKKGVRVVNCARGGIVDEGALLRALQSGQCAGAALDVFTE

SEQ ID NO: 57844 - protein, 406 aa, Homo sapiens [sequence omitted]

SEQ ID NO: 57845 - protein, 417 aa, Homo sapiens
MSLSNKLTLDKLDVKGKRVVMRVDFNVPMKNNQITNNQRIKAAVPSIKFCLDNGAKSVVLMSHLGRPDGVPMPDKYSLEPVAVELKSLLGKDVLFLKDCVGPEVEKACANPAAGSVILLENLRFHVEEEGKGKDASGNKVKAEPAKIEAFRASLSKLGDVYVNDAFGTAHRAHSSMVGVNLPQKAGGFLMKKELNYFAKALESPERPFLAILGGAKVADKIQLINNMLDKVNEMIIGGGMAFTFLKVLNNMEIGTSLFDEEGAKIVKDLMSKAEKNGVKITLPVDFVTADKFDENAKTGQATVASGIPAGWMGLDCGPESSKKYAEAVTRAKQIVWNGPVGVFEWEAFARGTKALMDEVVKATSRGCITIIGGGDTATCCAKWNTEDKVSHVSTGGGASLELLEGKVLPGVDALSNI

SEQ ID NO: 57846 - protein, 281 aa, Homo sapiens
MSLSNKLTLDKLDVKGKRVVMRVDFNVPMKNNQITNNQRIKAAVPSIKFCLDNGAKSVVLMSHLGRPDGRPFLAILGGAKVADKIQLINNMLDKVNEMIIGGGMAFTFLKVLNNMEIGTSLFDEEGAKIVKDLMSKAEKNGVKITLPVDFVTADKFDENAKTGQATVASGIPAGWMGLDCGPESSKKYAEAVTRAKQIVWNGPVGVFEWEAFARGTKALMDEVVKATSRGCITIIGGGDTATCCAKWNTEDKVSHVSTGGGASLELLEGKVLPGVDALSNI

SEQ ID NO: 57847 - protein, 242 aa, Homo sapiens
MVGVNLPQKAGGFLMKKELNYFAKALESPERPFLAILGGAKVADKIQLINNMLDKVNEMIIGGGMAFTFLKVLNNMEIGTSLFDEEGAKIVKDLMSKAEKNGVKITLPVDFVTADKFDENAKTGQATVASGIPAGWMGLDCGPESSKKYAEAVTRAKQIVWNGPVGVFEWEAFARGTKALMDEVVKATSRGCITIIGGGDTATCCAKWNTEDKVSHVSTGGGASLELLEGKVLPGVDALSNI

SEQ ID NO: 57848 - protein, 389 aa, Homo sapiens
MKNNQITNNQRIKAAVPSIKFCLDNGAKSVVLMSHLGRPDGVPMPDKYSLEPVAVELKSLLGKDVLFLKDCVGPEVEKACANPAAGSVILLENLRFHVEEEGKGKDASGNKVKAEPAKIEAFRASLSKLGDVYVNDAFGTAHRAHSSMVGVNLPQKAGGFLMKKELNYFAKALESPERPFLAILGGAKVADKIQLINNMLDKVNEMIIGGGMAFTFLKVLNNMEIGTSLFDEEGAKIVKDLMSKAEKNGVKITLPVDFVTADKFDENAKTGQATVASGIPAGWMGLDCGPESSKKYAEAVTRAKQIVWNGPVGVFEWEAFARGTKALMDEVVKATSRGCITIIGGGDTATCCAKWNTEDKVSHVSTGGGASLELLEGKVLPGVDALSNI

SEQ ID NO: 57849 - protein, 417 aa, Homo sapiens
MSLSKKLTLDKLDVRGKRVIMRVDFNVPMKKNQITNNQRIKASIPSIKYCLDNGAKAVVLMSHLGRPDGVPMPDKYSLAPVAVELKSLLGKDVLFLKDCVGAEVEKACANPAPGSVILLENLRFHVEEEGKGQDPSGKKIKAEPDKIEAFRASLSKLGDVYVNDAFGTAHRAHSSMVGVNLPHKASGFLMKKELDYFAKALENPVRPFLAILGGAKVADKIQLIKNMLDKVNEMIIGGGMAYTFLKVLNNMEIGASLFDEEGAKIVKDIMAKAQKNGVRITFPVDFVTGDKFDENAQVGKATVASGISPGWMGLDCGPESNKNHAQVVAQARLIVWNGPLGVFEWDAFAKGTKALMDEIVKATSKGCITVIGGGDTATCCAKWNTEDKVSHVSTGGGASLELLEGKILPGVEALSNM

SEQ ID NO: 57850 - protein, 254 aa, Homo sapiens
MAAYKLVLIRHGESAWNLENRFSGWYDADLSPAGHEEAKRGGQALRDAGYEFDICFTSVQKRAIRTLWTVLDAIDQMWLPVVRTWRLNERHYGGLTGLNKAETAAKHGEAQVKIWRRSYDVPPPPMEPDHPFYSNISKDRRYADLTEDQLPSCESLKDTIARALPFWNEEIVPQIKEGKRVLIAAHGNSLRGIVKHLEGLSEEAIMELNLPTGIPIVYELDKNLKPIKPMQFLGDEETVRKAMEAVAAQGKAKK

SEQ ID NO: 57851 - protein, 144 aa, Homo sapiens
MPLIRCGCHDVPPPPMEPDHPFYSNISKDRRYADLTEDQLPSCESLKDTIARALPFWNEEIVPQIKEGKRVLIAAHGNSLRGIVKHLEGLSEEAIMELNLPTGIPIVYELDKNLKPIKPMQFLGDEETVRKAMEAVAAQGKAKK

SEQ ID NO: 57852 - protein, 253 aa, Homo sapiens
MATHRLVMVRHGESTWNQENRFCGWFDAELSEKGTEEAKRGAKAIKDAKMEFDICYTSVLKRAIRTLWAILDGTDQMWLPVVRTWRLNERHYGGLTGLNKAETAAKHGEEQVKIWRRSFDIPPPPMDEKHPYYNSISKERRYAGLKPGELPTCESLKDTIARALPFWNEEIVPQIKAGKRVLIAAHGNSLRGIVKHLEGMSDQAIMELNLPTGIPIVYELNKELKPTKPMQFLGDEETVRKAMEAVAAQGKAK

SEQ ID NO: 57853 - protein, 254 aa, Homo sapiens
MAAYKLVLIRHGESTWNLENRFSCWYDADLSPAGHEEAKRGGQALRDAGYEFDICLTSVQKRVIRTLWTVLDAIDQMWLPVVRTWRLNERHYGGLTGLNKAETAAKHGEAQVKIWRRSYDVPPPPMEPDHPFYSNISKDRRYADLTEDQLPSYESPKDTIARALPFWNEEIVPQIKEGKRVLIAAHGNSLQGIAKHVEGLSEEAIMELNLPTGIPIVYELDKNLKPIKPMQFLGDEETVCKAIEAVAAQGKAKK

SEQ ID NO: 57854 - protein, 321 aa, Homo sapiens
MAAAEAGGDDARCVRLSAERAQALLADVDTLLFDCDGVLWRGETAVPGAPEALRALRARGKRLGFITNNSSKTRAAYAEKLRRLGFGGPAGPGASLEVFGTAYCTALYLRQRLAGAPAPKAYVLGSPALAAELEAVGVASVGVGPEPLQGEGPGDWLHAPLEPDVRAVVVGFDPHFSYMKLTKALRYLQQPGCLLVGTNMDNRLPLENGRFIAGTGCLVRAVEMAAQRQADIIGKPSRFIFDCVSQEYGINPERTVMVGDRLDTDILLGATCGLKTILTLTGVSTLGDVKNNQESDCVSKKKMVPDFYVDSIADLLPALQG

SEQ ID NO: 57855 - protein, 125 aa, Homo sapiens
MAVADLALIPDVDIDSDGVFKYVLIRVHSAPRSGAPAAESKEIVRGYKWAEYHADIYDKVSGDMQKQGCDCECLGGGRISHQSQDKKIHVYGYSMAYGPAQHAISTEKIKAKYPDYEVTWANDGY

SEQ ID NO: 57856 - protein, 124 aa, Homo sapiens
MAVADLALIPDVDIDSDGVFKYVLIRVHSAPRSGAPAAESKEIVRGYKWAEYHADIYDKVSGDMQKQGCDCECLGGGRISHQSQDKKIHVYGYSMMRPTCVPLGASGPRIHHQGLWSCPARHFN

SEQ ID NO: 57857 - protein, 124 aa, Homo sapiens; identical to SEQ ID NO: 57856

SEQ ID NO: 57858 - protein, 451 aa, Homo sapiens
MATDDKTSPTLDSANDLPRSPTSPSHLTHFKPLTPDQDEPPFKSAYSSFVNLFRFNKERAEGGQGEQQPLSGSWTSPQLPSRTQSVRSPTPYKKQLNEELQRRSSALGDLRACTYCRKIALSYAHSTDSNSIGEDLNALSDSACSVSVLDPSEPRTPVGSRKASRNIFLEDDLAWQSLIHPDSSNTPLSTRLVSVQEDAGKSPARNRSASITNLSLDRSGSPMVPSYETSVSPQANRTYVRTETTEDERKILLDSVQLKDLWKKICHHSSGMEFQDHRYWLRTHPNCIVGKELVNWLIRNGHIATRAQAIAIGQAMVDGRWLDCVSHHDQLFRDEYALYRPLQSTEFSETPSPDSDSVNSVEGHSEPSWFKDIKFDDSDTEQIAEEGDDNLANSASPSKRTSVSSFQSTVDSDSAASISLNVELDNVNFHIKKPSKYPHVPPHPADQKGRR

SEQ ID NO: 57859 - protein, 548 aa, Homo sapiens
MATDDKTSPTLDSANDLPRSPTSPSHLTHFKPLTPDQDEPPFKSAYSSFVNLFRFNKERAEGGQGEQQPLSGSWTSPQLPSRTQSVRSPTPYKKQLNEELQRRSSALDTRRKAEPTFGGHDPRTAVQLRSLSTVLKRLKEIMEGKSQDSDLKQYWMPDSQCKECYDCSEKFTTFRRRHHCRLCGQIFCSRCCNQEIPGKFMGYTGDLRACTYCRKIALSYAHSTDSNSIGEDLNALSDSACSVSVLDPSEPRTPVGSRKASRNIFLEDDLAWQSLIHPDSSNTPLSTRLVSVQEDAGKSPARNRSASITNLSLDRSGSPMVPSYETSVSPQANRTYVRTETTEDERKILLDSVQLKDLWKKICHHSSGMEFQDHRYWLRTHPNCIVGKELVNWLIRNGHIATRAQAIAIGQAMVDGRWLDCVSHHDQLFRDEYALYRPLQSTEFSETPSPDSDSVNSVEGHSEPSWFKDIKFDDSDTEQIAEEGDDNLANSASPSKRTSVSSFQSTVDSDSAASISLNVELDNVNFHIKKPSKYPHVPPHPADQKGRR

SEQ ID NO: 57860 - protein, 2098 aa, Homo sapiens
MATDDKTSPTLDSANDLPRSPTSPSHLTHFKPLTPDQDEPPFKSAYSSFVNLFRFNKERAEGGQGEQQPLSGSWTSPQLPSRTQSVRSPTPYKKQLNEELQRRSSALDTRRKAEPTFGGHDPRTAVQLRSLSTVLKRLKEIMEGKSQDSDLKQYWMPDSQCKECYDCSEKFTTFRRRHHCRLCGQIFCSRCCNQEIPGKFMGYTGDLRACTYCRKIALSYAHSTDSNSIGEDLNALSDSACSVSVLDPSEPRTPVGSRKASRNIFLEDDLAWQSLIHPDSSNTPLSTRLVSVQEDAGKSPARNRSASITNLSLDRSGSPMVPSYETSVSPQANRTYVRTETTEDERKILLDSVQLKDLWKKICHHSSGMEFQDHRYWLRTHPNCIVGKELVNWLIRNGHIATRAQAIAIGQAMVDGRWLDCVSHHDQLFRDEYALYRPLQSTEFSETPSPDSDSVNSVEGHSEPSWFKDIKFDDSDTEQIAEEGDDNLANSASPSKRTSVSSFQSTVDSDSAASISLNVELDNVNFHIKKPSKYPHVPPHPADQKEYLISDTGGQQLSISDAFIKESLFNRRVEEKSKELPFTPLGWHHNNLELLREENGEKQAMERLLSANHNHMMALLQQLLHSDSLSSSWRDIIVSLVCQVVQTVRPDVKNQDDDMDIRQFVHIKKIPGGKKFDSVVVNGFVCTKNIAHKKMSSCIKNPKILLLKCSIEYLYREETKFTCIDPIVLQEREFLKNYVQRIVDVRPTLVLVEKTVSRIAQDMLLEHGITLVINVKSQVLERISRMTQGDLVMSMDQLLTKPHLGTCHKFYMQIFQLPNEQTKTLMFFEGCPQHLGCTIKLRGGSDYELARVKEILIFMICVAYHSQLEISFLMDEFAMPPTLMQNPSFHSLIEGRGHEGAVQEQYGGGSIPWDPDIPPESLPCDDSSLLELRIVFEKGEQENKNLPQAVASVKHQEHSTTACPAGLPCAFFAPVPESLLPLPVDDQQDALGSEQPETLQQTVVLQDPKSQIRAFRDPLQDDTGLYVTEEVTSSEDKRKTYSLAFKQELKDVILCISPVITFREPFLLTEKGMRCSTRDYFAEQVYWSPLLNKEFKEMENRRKKQLLRDLSGLQGMNGSIQAKSIQVLPSHELVSTRIAEHLGDSQSLGRMLADYRARGGRIQPKNSDPFAHSKDASSTSSGQSGSKNEGDEERGLILSDAVWSTKVDCLNPINHQRLCVLFSSSSAQSSNAPSACVSPWIVTMEFYGKNDLTLGIFLERYCFRPSYQCPSMFCDTPMVHHIRRFVHGQGCVQIILKELDSPVPGYQHTILTYSWCRICKQVTPVVALSNESWSMSFAKYLELRFYGHQYTRRANAEPCGHSIHHDYHQYFSYNQMVASFSYSPIRLLEVCVPLPKIFIKRQAPLKVSLLQDLKDFFQKVSQVYVAIDERLASLKTDTFSKTREEKMEDIFAQKEMEEGEFKNWIEKMQARLMSSSVDTPQQLQSVFESLIAKKQSLCEVLQAWNNRLQDLFQQEKGRKRPSVPPSPGRLRQGEESKISAMDASPRNISPGLQNGEKEDRFLTTLSSQSSTSSTHLQLPTPPEVMSEQSVGGPPELDTASSSEDVFDGHLLGSTDSQVKEKSTMKAIFANLLPGNSYNPIPFPFDPDKHYLMYEHERVPIAVCEKEPSSIIAFALSCKEYRNALEELSKATQWNSAEEGLPTNSTSDSRPKSSSPIRLPEMSGGQTNRTTETEPQPTKKASGMLSFFRGTAGKSPDLSSQKRETLRGADSAYYQVGQTGKEGTENQGVEPQDEVDGGDTQKKQLINPHVELQFSDANAKFYCRLYYAGEFHKMREVILDSSEEDFIRSLSHSSPWQARGGKSGAAFYATEDDRFILKQMPRLEVQSFLDFAPHYFNYITNAVQQKRPTALAKILGVYRIGYKNSQNNTEKKLDLLVMENLFYGRKMAQVFDLKGSLRNRNVKTDTGKESCDVVLLDENLLKMVRDNPLYIRSHSKAVLRTSIHSDSHFLSSHLIIDYSLLVGRDDTSNELVVGIIDYIRTFTWDKKLEMVVKSTGILGGQGKMPTVVSPELYRTRFCEAMDKYFLMVPDHWTGLGLNC

SEQ ID NO: 57861 - protein, 1016 aa, Homo sapiens
MEFQDHRYWLRTHPNCIVGKELVNWLIRNGHIATRAQAIAIGQAMVDGRWLDCVSHHDQLFRDEYALYRPLQSTEFSETPSPDSDSVNSVEGHSEPSWFKDIKFDDSDTEQIAEEGDDNLAKYLISDTGGQQLSISDAFIKESLFNRRVEEKSKELPFTPLGWHHNNLELLREENGEKQAMERLLSANHNHMMALLQQLLHSDSLSSSWRDIIVSLVCQVVQTVRPDVKNQDDDMDIRQFVHIKKIPGGKKFDSVVVNGFVCTKNIAHKKMSSCIKNPKILLLKCSIEYLYREETKFTCIDPIVLQEREFLKNYVQRIVDVRPTLVLVEKTVSRIAQDMLLEHGITLVINVKSQVLERISRMTQGDLVMSMDQLLTKPHLGTCHKFYMQIFQLPNEQTKTLMFFEGCPQHLGCTIKLRGGSDYELARVKEILIFMICVAYHSQLEISFLMDEFAMPPTLMQNPSFHSLIEGRGHEGAVQEQYGGGSIPWDPDIPPESLPCDDSSLLELRIVFEKGEQENKNLPQAVASVKHQEHSTTACPAGLPCAFFAPVPESLLPLPVDDQQDALGSEQPETLQQTVVLQDPKSQIRAFRDPLQDDTGLYVTEEVTSSEDKRKTYSLAFKQELKDVILCISPVITFREPFLLTEKGMRCSTRDYFAEQVYWSPLLNKEFKEMENRRKKQLLRDLSGLQGMNGSIQAKSIQVLPSHELVSTRIAEHLGDSQSLGRMLADYRARGGRIQPKNSDPFAHSKDASSTSSGQSGSKNEGDEERGLILSDAVWSTKVDCLNPINHQRLCVLFSSSSAQSSNAPSACVSPWIVTMEFYGKNDLTLGIFLERYCFRPSYQCPSMFCDTPMVHHIRRFVHGQGCVQIILKELDSPVPGYQHTILTYSWCRICKQVTPVVALSNESWSMSFAKYLELRFYGHQYTRRANAEPCGHSIHHDYHQYFSYNQMVASFSYSPIRLLEVCVPLPKIFIKRQAPLKVSLLQDLKDFFQKVSQVYVAIDERLASLKTDTFS

SEQ ID NO: 57862 - protein, 173 aa, Homo sapiens
MRPWSSPAQLVAGAQPAGRGDPLGPRPIPPPRFRRASSQREPPYPRPAEPALELAGSKCQPDTPAASLCPADSPSQHRVMPPGPASWANVGSRPHTVANGHELFEVSEERDEEVAAFCHMLDILRSGSDIQDYFLTGYVWSAVTPSPEHLGDEVNLKVTVLCDRLQEALTFTC

SEQ ID NO: 57863 - protein, 1634 aa, Homo sapiens
MSSTQGNGEHWKSLESVGISRKELAMAEALQMEYDALSRLRHDKEENRAKQNADPSLISWDEPGVDFYSKPAGRRTDLKLLRGLSGSDPTLNYNSLSPQEGPPNHSTSQGPQPGSDPWPKGSLSGDYLYIFDGSDGGVSSSPGPGDIEGSCKKLSPPPLPPRASIWDTPPLPPRKGSPSSSKISQPSDINTFSLVEQLPGKLLEHRILEEEEVLGGGGQGRLLGSVDYDGINDAITRLNLKSTYDAEMLRDATRGWKEGRGPLDFSKDTSGKPVARSKTMPPQVPPRTYASRYGNRKNATPGKNRRISAAPVGSRPHTVANGHELFEVSEERDEEVAAFCHMLDILRSGSDIQDYFLTGYVWSAVTPSPEHLGDEVNLKVTVLCDRLQEALTFTCNCSSTVDLLIYQTLCYTHDDLRNVDVGDFVLKPCGLEEFLQNKHALGSHEYIQYCRKFDIDIRLQLMEQKVVRSDLARTVNDDQSPSTLNYLVHLQERPVKQTISRQALSLLFDTYHNEVDAFLLADGDFPLKADRVVQSVKAICNALAAVETPEITSALNQLPPCPSRMQPKIQKDPSVLAVRENREKVVEALTAAILDLVELYCNTFNADFQTAVPGSRKHDLVQEACHFARSLAFTVYATHRIPIIWATSYEDFYLSCSLSHGGKELCSPLQTRRAHFSKYLFHLIVWDQQICFPVQVNRLPRETLLCATLYALPIPPPGSSSEANKQRRVPEALGWVTTPLFNFRQVLTCGRKLLGLWPATQENPSARWSAPNFHQPDSVILQIDFPTSAFDIKFTSPPGDKFSPRYEFGSLREEDQRKLKDIMQKESLYWLTDADKKRLWEKRYYCHSEVSSLPLVLASAPSWEWACLPDIYVLLKQWTHMNHQDALGLLHATFPDQEVRRMAVQWIGSLSDAELLDYLPQLVQALKYECYLDSPLVRFLLKRAVSDLRVTHYFFWLLKDGLKDSQFSIRYQYLLAALLCCCGKGLREEFNRQCWLVNALAKLAQQVREAAPSARQGILRTGLEEVKQFFALNGSCRLPLSPSLLVKGIVPRDCSYFNSNAVPLKLSFQNVDPLGENIRVIFKCGDDLRQDMLTLQMIRIMSKIWVQEGLDMRMVIFRCFSTGRGRGMVEMIPNAETLRKIQVEHGVTGSFKDRPLADWLQKHNPGEDEYEKAVENFIYSCAGCCVATYVLGICDRHNDNIMLKTTGHMFHIDFGRFLGHAQMFGNIKRDRAPFVFTSDMAYVINGGDKPSSRFHDFVDLCCQAYNLIRKHTHLFLNLLGLMLSCGIPELSDLEDLKYVYDALRPQDTEANATTYFTRLIESSLGSVATKLNFFIHNLAQMKFTGSDDRLTLSFASRTHTLKSSGRISDVFLCRHEKIFHPNKGYIYVVKVMRENTHEATYIQRTFEEFQELHNKLRLLFPSSHLPSFPSRFVIGRSRGEAVAERRREELNGYIWHLIHAPPEVAECDLVYTFFHPLPRDEKAMGTSPAPKSSDGTWARPVGKVGGEVKLSISYKNNKLFIMVMHIRGLQLLQDGNDPDPYVKIYLLPDPQKTTKRKTKVARKTCNPTYNEMLVYDGIPKGDLQQRELQLSVLSEQGFWENVLLGEVNIRLRELDLAQEKTGWFALGSRSHGTL

SEQ ID NO: 57864 - protein, 119 aa, Homo sapiens
MFGNIKRDRAPFVFTSDMAYVINGGDKPSSRFHDFVDLCCQAYNLIRKHTHLFLNLLGLMLSCGIPELSDLEDLKYVYDALRPQDTEANATTYFTRVILASVVGGRESKTCSAVSSSGD

SEQ ID NO: 57865 - protein, 131 aa, Homo sapiens
MSSTQGNGEHWKSLESVGISRKELAMAEALQMEYDALSRLRHDKEENRAKQNADPSLISWDEPGVDFYSKPAGRRTDLKLLRGLSGSDPTLNYNSLSPQEGPPNHSTSQGPQPGSDPWPKGSLSGDYLYIF

SEQ ID NO: 57866 - protein, 1606 aa, Homo sapiens
MSSTQGNGEHWKSLESVGISRKELAMAEALQMEYDALSRLRHDKEENRAKQNADPSLISWDEPGVDFYSKPAGRRTDLKLLRGLSGSDPTLNYNSLSPQEGPPNHSTSQGPQPGSDPWPKGSLSGDYLYIFDGSDGGVSSSPGPGDIEGSCKKLSPPPLPPRASIWDTPPLPPRKGSPSSSKISQPSDINTFSLVEQLPGKLLEHRILEEEEVLGGGGQGRLLGSVDYDGINDAITRLNLKSTYDAEMLRDATRGWKEGRGPLDFSKDTSGKPVARSKTMPPQVPPRTYASRYGNRKNATPGKNRRISAAPVGSRPHTVANGHELFEVSEERDEEVAAFCHMLDILRSGSDIQDYFLTGYVWSAVTPSPEHLGDEVNLKVTVLCDRLQEALTFTCNCSSTVDLLIYQTLCYTHDDLRNVDVGDFVLKPCGLEEFLQNKHALGSHEYIQYCRKFDIDIRLQLMEQKVVRSDLARTVNDDQSPSTLNYLVHLQERPVKQTISRQALSLLFDTYHNEVDAFLLADGDFPLKADRVVQSVKAICNALAAVETPEITSALNQLPPCPSRMQPKIQKDPSVLAVRENREKVVEALTAAILDLVELYCNTFNADFQTAVPGSRKHDLVQEACHFARSLAFTVYATHRIPIIWATSYEDFYLSCSLSHGGKELCSPLQTRRAHFSKYLFHLIVWDQQICFPVQVNRLPRETLLCATLYALPIPPPGSSSEANKQRRVPEALGWVTTPLFNFRQVLTCGRKLLGLWPATQENPSARWSAPNFHQPDSVILQIDFPTSAFDIKFTSPPGDKFSPRYEFGSLREEDQRKLKDIMQKESLYWLTDADKKRLWEKRYYCHSEWTHMNHQDALGLLHATFPDQEVRRMAVQWIGSLSDAELLDYLPQLVQALKYECYLDSPLVRFLLKRAVSDLRVTHYFFWLLKDGLKDSQFSIRYQYLLAALLCCCGKGLREEFNRQCWLVNALAKLAQQVREAAPSARQGILRTGLEEVKQFFALNGSCRLPLSPSLLVKGIVPRDCSYFNSNAVPLKLSFQNVDPLGENIRVIFKCGDDLRQDMLTLQMIRIMSKIWVQEGLDMRMVIFRCFSTGRGRGMVEMIPNAETLRKIQVEHGVTGSFKDRPLADWLQKHNPGEDEYEKAVENFIYSCAGCCVATYVLGICDRHNDNIMLKTTGHMFHIDFGRFLGHAQMFGNIKRDRAPFVFTSDMAYVINGGDKPSSRFHDFVDLCCQAYNLIRKHTHLFLNLLGLMLSCGIPELSDLEDLKYVYDALRPQDTEANATTYFTRLIESSLGSVATKLNFFIHNLAQMKFTGSDDRLTLSFASRTHTLKSSGRISDVFLCRHEKIFHPNKGYIYVVKVMRENTHEATYIQRTFEEFQELHNKLRLLFPSSHLPSFPSRFVIGRSRGEAVAERRREELNGYIWHLIHAPPEVAECDLVYTFFHPLPRDEKAMGTSPAPKSSDGTWARPVGKVGGEVKLSISYKNNKLFIMVMHIRGLQLLQDGNDPDPYVKIYLLPDPQKTTKRKTKVARKTCNPTYNEMLVYDGIPKGDLQQRELQLSVLSEQGFWENVLLGEVNIRLRELDLAQEKTGWFALGSRSHGTL

SEQ ID NO: 57867 - protein, 60 aa, Homo sapiens
MSSTQGNGEHWKSLESVGISRKELAMAEALQMEYDALSRLRHDKEENRAKQNADPSLISW

SEQ ID NO: 57868 - protein, 173 aa, Homo sapiens; identical to SEQ ID NO: 57862

SEQ ID NO: 57869 - protein, 1445 aa, Homo sapiens
MAYSWQTDPNPNESHEKQYEHQEFLFVNQPHSSSQVSLGFDQIVDEISGKIPHYESEIDENTFFVPTAPKWDSTGHSLNEAHQISLNEFTSKSRELSWHQVSKAPAIGFSPSVLPKPQNTNKECSWGSPIGKHHGADDSRFSILAPSFTSLDKINLEKELENENHNYHIGFESSIPPTNSSFSSDFMPKEENKRSGHVNIVEPSLMLLKGSLQPGMWESTWQKNIESIGCSIQLVEVPQSSNTSLASFCNKVKKIRERYHAADVNFNSGKIWSTTTAFPYQLFSKTKFNIHIFIDNSTQPLHFMPCANYLVKDLIAEILHFCTNDQLLPKDHILSVCGSEEFLQNDHCLGSHKMFQKDKSVIQLHLQKSREAPGKLSRKHEEDHSQFYLNQLLEFMHIWKVSRQCLLTLIRKYDFHLKYLLKTQENVYNIIEEVKKICSVLGCVETKQITDAVNELSLILQRKGENFYQSSETSAKGLIEKVTTELSTSIYQLINVYCNSFYADFQPVNVPRCTSYLNPGLPSHLSFTVYAAHNIPETWVHRINFPLEIKSLPRESMLTVKLFGIACATNNANLLAWTCLPLFPKEKSILGSMLFSMTLQSEPPVEMITPGVWDVSQPSPVTLQIDFPATGWEYMKPDSEENRSNLEEPLKECIKHIARLSQKQTPLLLSEEKKRYLWFYRFYCNNENCSLPLVLGSAPGWDERTVSEMHTILRRWTFSQPLEALGLLTSSFPDQEIRKVAVQQLDNLLNDELLEYLPQLVQAVKFEWNLESPLVQLLLHRSLQSIQVAHRLYWLLKNAENEAYFKSWYQKLLAALQFCAGKALNDEFSKEQKLIKILGDIGERVKSASDHQRQEVLKKEIGRLEEFFQDVNTCHLPLNPALCIKGIDHDACSYFTSNALPLKITFINANPMGKNISIIFKAGDDLRQDMLVLQLIQVMDNIWLQEGLDMQMIIYRCLSTGKDQGLVQMVPDAVTLAKIHRHSGLIGPLKENTIKKWFSQHNHLKADYEKALRNFFYSCAGWCVVTFILGVCDRHNDNIMLTKSGHMFHIDFGKFLGHAQTFGGIKRDRAPFIFTSEMEYFITEGGKNPQHFQDFVELCCRAYNIIRKHSQLLLNLLEMMLYAGLPELSGIQDLKYVYNNLRPQDTDLEATSHFTKKIKESLECFPVKLNNLIHTLAQMSAISPAKSTSQTFPQESCLLSTTRSIERATILGFSKKSSNLYLIQVTHSNNETSLTEKSFEQFSKLHSQLQKQFASLTLPEFPHWWHLPFTNSDHRRFRDLNHYMEQILNVSHEVTNSDCVLSFFLSEAVQQTVEESSPVYLGEKFPDKKPKVQLVISYEDVKLTILVKHMKNIHLPDGSAPSAHVEFYLLPYPSEVRRRKTKSVPKCTDPTYNEIVVYDEVTELQGHVLMLIVKSKTVFVGAINIRLCSVPLDKEKWYPLGNSII

SEQ ID NO: 57870 - protein, 1445 aa, Homo sapiens; identical to SEQ ID NO: 57869

SEQ ID NO: 57871 - protein, 1486 aa, Homo sapiens
MAYSWQTDPNPNESHEKQYEHQEFLFVNQPHSSSQVSLGFDQIVDEISGKIPHYESEIDENTFFVPTAPKWDSTGHSLNEAHQISLNEFTSKSRELSWHQVSKAPAIGFSPSVLPKPQNTNKECSWGSPIGKHHGADDSRFSILAPSFTSLDKINLEKELENENHNYHIGFESSIPPTNSSFSSDFMPKEENKRSGHVNIVEPSLMLLKGSLQPGMWESTWQKNIESIGCSIQLVEVPQSSNTSLASFCNKVKKIRERYHAADVNFNSGKIWSTTTAFPYQLFSKTKFNIHIFIDNSTQPLHFMPCANYLVKDLIAEILHFCTNDQLLPKDHILSVCGSEEFLQNDHCLGSHKMFQKDKSVIQLHLQKSREAPGKLSRKHEEDHSQFYLNQLLEFMHIWKVSRQCLLTLIRKYDFHLKYLLKTQENVYNIIEEVKKICSVLGCVETKQITDAVNELSLILQRKGENFYQSSETSAKGLIEKVTTELSTSIYQLINVYCNSFYADFQPVNVPRCTSYLNPGLPSHLSFTVYAAHNIPETWVHSYKAFSFTCWLTYAGKKLCQVRNYRNIPDKKLFFFLVNWNETINFPLEIKSLPRESMLTVKLFGIACATNNANLLAWTCLPLFPKEKSILGSMLFSMTLQSEPPVEMITPGVWDVSQPSPVTLQIDFPATGWEYMKPDSEENRSNLEEPLKECIKHIARLSQKQTPLLLSEEKKRYLWFYRFYCNNENCSLPLVLGSAPGWDERTVSEMHTILRRWTFSQPLEALGLLTSSFPDQEIRKVAVQQLDNLLNDELLEYLPQLVQAVKFEWNLESPLVQLLLHRSLQSIQVAHRLYWLLKNAENEAYFKSWYQKLLAALQFCAGKALNDEFSKEQKLIKILGDIGERVKSASDHQRQEVLKKEIGRLEEFFQDVNTCHLPLNPALCIKGIDHDACSYFTSNALPLKITFINANPMGKNISIIFKAGDDLRQDMLVLQLIQVMDNIWLQEGLDMQMIIYRCLSTGKDQGLVQMVPDAVTLAKIHRHSGLIGPLKENTIKKWFSQHNHLKADYEKALRNFFYSCAGWCVVTFILGVCDRHNDNIMLTKSGHMFHIDFGKFLGHAQTFGGIKRDRAPFIFTSEMEYFITEGGKNPQHFQDFVELCCRAYNIIRKHSQLLLNLLEMMLYAGLPELSGIQDLKYVYNNLRPQDTDLEATSHFTKKIKESLECFPVKLNNLIHTLAQMSAISPAKSTSQTFPQESCLLSTTRSIERATILGFSKKSSNLYLIQVTHSNNETSLTEKSFEQFSKLHSQLQKQFASLTLPEFPHWWHLPFTNSDHRRFRDLNHYMEQILNVSHEVTNSDCVLSFFLSEAVQQTVEESSPVYLGEKFPDKKPKVQLVISYEDVKLTILVKHMKNIHLPDGSAPSAHVEFYLLPYPSEVRRRKTKSVPKCTDPTYNEIVVYDEVTELQGHVLMLIVKSKTVFVGAINIRLCSVPLDKEKWYPLGNSII

SEQ ID NO: 57872 - protein, 137 aa, Homo sapiens
MTMETLPKVLEVDEKSPEAKDLLPSQTASSLCISSRSESVWTTTPRSNWEIYRKPIVIMSVGGAILLFGVVITCLAYTLKLSDKSLSILKMVGPGFLSLGLMMLVCGLVWVPIIKKKQKHRQKSNFLRSLKSFFLTR

SEQ ID NO: 57873 - protein, 137 aa, Homo sapiens; identical to SEQ ID NO: 57872

SEQ ID NO: 57874 - protein, 52 aa, Homo sapiens
MEKVQYLTRSAIRRASTIEMPQQARQKLQNLFINFCLILICLLLICIIVMLL

SEQ ID NO: 57875 - protein, 456 aa, Homo sapiens
MPPGPWESCFWVGGLILWLSVGSSGDAPPTPQPKCADFQSANLFEGTDLKVQFLLFVPSNPSCGQLVEGSSDLQNSGFNATLGTKLIIHGFRVLGTKPSWIDTFIRTLLRATNANVIAVDWIYGSTGVYFSAVKNVIKLSLEISLFLNKLLVLGVSESSIHIIGVSLGAHVGGMVGQLFGGQLGQITGLDPAGPEYTRASVEERLDAGDALFVEAIHTDTDNLGIRIPVGHVDYFVNGGQDQPGCPTFFYAGYSYLICDHMRAVHLYISALENSCPLMAFPCASYKAFLAGRCLDCFNPFLLSCPRIGLVEQGGVKIEPLPKEVKVYLLTTSSAPYCMHHSLVEFHLKELRNKDTNIEVTFLSSNITSSSKITIPKQQRYGKGIIAHATPQCQINQVKFKFQSSNRVWKKDRTTIIGKFCTALLPVNDREKMVCLPEPVNLQASVTVSCDLKIACV

SEQ ID NO: 57876 - protein, 440 aa, Homo sapiens
MPPGPWESCFWVGGLILWLSVGSSGDAPPTPQPKCADFQSANLFEGTDLKVQFLLFVPSNPSCGQLVEGSSDLQNSGFNATLGTKLIIHGFRVLGTKPSWIDTFIRTLLRATNANVIAVDWIYGSTGVYFSAVKNVLGVSESSIHIIGVSLGAHVGGMVGQLFGGQLGQITGLDPAGPEYTRASVEERLDAGDALFVEAIHTDTDNLGIRIPVGHVDYFVNGGQDQPGCPTFFYAGYSYLICDHMRAVHLYISALENSCPLMAFPCASYKAFLAGRCLDCFNPFLLSCPRIGLVEQGGVKIEPLPKEVKVYLLTTSSAPYCMHHSLVEFHLKELRNKDTNIEVTFLSSNITSSSKITIPKQQRYGKGIIAHATPQCQINQVKFKFQSSNRVWKKDRTTIIGKFCTALLPVNDREKMVCLPEPVNLQASVTVSCDLKIACV

SEQ ID NO: 57877 - protein, 283 aa, Homo sapiens
MVGQLFGGQLGQITGLDPAGPEYTRASVEERLDAGDALFVEAIHTDTDNLGIRIPVGHVDYFVNGGQDQPGCPTFFYAGYSYLICDHMRAVHLYISALENSCPLMAFPCASYKAFLAGRCLDCFNPFLLSCPRIGLVEQGGVKIEPLPKEVKVYLLTTSSAPYCMHHSLVEFHLKELRNKDTNIEVTFLSSNITSSSKITIPKQQRYGKGIIAHATPQCQINQVKFKFQSSNRVWKKDRTTIIGKFCTALLPVNDREKMVCLPEPVNLQASVTVSCDLKIACV

SEQ ID NO: 57878 - protein, 551 aa, Homo sapiens
MRTRPRPRLRRTENFLTAVHHGKKEEKAAVERRRLHVLKALKKLRIEADEAPVVAVLGSGGGLRAHIACLGVLSEMKEQGLLDAVTYLAGVSGSTWAISSLYTNDGDMEALEADLKHRFTRQEWDLAKSLQKTIQAARSENYSLTDFWAYMVISKQTRELPESHLSNMKKPVEEGTLPYPIFAAIDNDLQPSWQEARAPETWFEFTPHHAGFSALGAFVSITHFGSKFKKGRLVRTHPERDLTFLRGLWGSALGNTEVIREYIFDQLRNLTLKGLWRRAVANAKSIGHLIFARLLRLQESSQGEHPPPEDEGGEPEHTWLTEMLENWTRTSLEKQEQPHEDPERKGSLSNLMDFVKKTGICASKWEWGTTHNFLYKHGGIRDKIMSSRKHLHLVDAGLAINTPFPLVLPPTREVHLILSFDFSAGDPFETIRATTDYCRRHKIPFPQVEEAELDLWSKAPASCYILKGETGPVVMHFPLFNIDACGGDIEAWSDTYDTFKLADTYTLDVVVLLLALAKKNVRENKKKILRELMNVAGLYYPKDSARSCCLA

SEQ ID NO: 57879 - protein, 1463 aa, Homo sapiens
MLLSPSLLLLLLLGAPRGCAEGVAAALTPERLLEWQDKGIFVIQSESLKKCIQAGKSVLTLENCKQANKHMLWKWVSNHGLFNIGGSGCLGLNFSAPEQPLSLYECDSTLVSLRWRCNRKMITGPLQYSVQVAHDNTVVASRKYIHKWISYGSGGGDICEYLHKDLHTIKGNTHGMPCMFPFQYNHQWHHECTREGREDDLLWCATTSRYERDEKWGFCPDPTSAEVGCDTIWEKDLNSHICYQFNLLSSLSWSEAHSSCQMQGGTLLSITDETEENFIREHMSSKTVEVWMGLNQLDEHAGWQWSDGTPLNYLNWSPEVNFEPFVEDHCGTFSSFMPSAWRSRDCESTLPYICKKYLNHIDHEIVEKDAWKYYATHCEPGWNPYNRNCYKLQKEEKTWHEALRSCQADNSALIDITSLAEVEFLVTLLGDENASETWIGLSSNKIPVSFEWSNDSSVIFTNWHTLEPHIFPNRSQLCVSAEQSEGHWKVKNCEERLFYICKKAGHVLSDAESGCQEGWERHGGFCYKIDTVLRSFDQASSGYYCPPALVTITNRFEQAFITSLISSVVKMKDSYFWIALQDQNDTGEYTWKPVGQKPEPVQYTHWNTHQPRYSGGCVAMRGRHPLGRWEVKHCRHFKAMSLCKQPVENQEKAEYEERWPFHPCYLDWESEPGLASCFKVFHSEKVLMKRTWREAEAFCEEFGAHLASFAHIEEENFVNELLHSKFNWTEERQFWIGFNKRNPLNAGSWEWSDRTPVVSSFLDNTYFGEDARNCAVYKANKTLLPLHCGSKREWICKIPRDVKPKIPFWYQYDVPWLFYQDAEYLFHTFASEWLNFEFVCSWLHSDLLTIHSAHEQEFIHSKIKALSKYGASWWIGLQEERANDEFRWRDGTPVIYQNWDTGRERTVNNQSQRCGFISSITGLWGSEECSVSMPSICKRKKVWLIEKKKDTPKQHGTCPKGWLYFNYKCLLLNIPKDPSSWKNWTHAQHFCAEEGGTLVAIESEVEQAFITMNLFGQTTSVWIGLQNDDYETWLNGKPVVYSNWSPFDIINIPSHNTTEVQKHIPLCALLSSNPNFHFTGKWYFEDCGKEGYGFVCEKMQDTSGHGVNTSDMYPMPNTLEYGNRTYKIINANMTWYAAIKTCLMHKAQLVSITDQYHQSFLTVVLNRLGYAHWIGLFTTDNGLNFDWSDGTKSSFTFWKDEESSLLGDCVFADSNGRWHSTACESFLQGAICHVPPETRQSEHPELCSETSIPWIKFKSNCYSFSTVLDSMSFEAAHEFCKKEGSNLLTIKDEAENAFLLEELFAFGSSVQMVWLNAQFDGNNETIKWFDGTPTDQSNWGIRKPDTDYFKPHHCVALRIPEGLWQLSPCQEKKGFICKMEADIHTAEALPEKGPSHSIIPLAVVLTLIVIVAICTLSFCIYKHNGGFFRRLAGFRNPYYPATNFSTVYLEENILISDLEKSDQ

SEQ ID NO: 57880 - protein, 1324 aa, Homo sapiens
MLLSPSLLLLLLLGAPRGCAEGVAAALTPERLLEWQDKGIFVIQSESLKKCIQAGKSVLTLENCKQANKHMLWKWVSNHGLFNIGGSGCLGLNFSAPEQPLSLYECDSTLVSLRWRCNRKMITGPLQYSVQVAHDNTVVASRKYIHKWISYGSGGGDICEYLHKDLHTIKGNTHGMPCMFPFQYNHQWHHECTREGREDDLLWCATTSRYERDEKWGFCPDPTSAEVGCDTIWEKDLNSHICYQFNLLSSLSWSEAHSSCQMQGGTLLSITDETEENFIREHMSSKTVEVWMGLNQLDEHAGWQWSDGTPLNYLNWSPEVNFEPFVEDHCGTFSSFMPSAWRSRDCESTLPYICKKYLNHIDHEIVEKDAWKYYATHCEPGWNPYNRNCYKLQKEEKTWHEALRSCQADNSALIDITSLAEVEFLVTLLGDENASETWIGLSSNKIPVSFEWSNDSSVIFTNWHTLEPHIFPNRSQLCVSAEQSEGHWKVKNCEERLFYICKKAGHVLSDAESGCQEGWERHGGFCYKIDTVLRSFDQASSGYYCPPALVTITNRFEQAFITSLISSVVKMKDSYFWIALQDQNDTGEYTWKPVGQKPEPVQYTHWNTHQPRYSGGCVAMRGRHPLGRWEVKHCRHFKAMSLCKQPVENQEKAEYEERWPFHPCYLDWESEPGLASCFKVFHSEKVLMKRTWREAEAFCEEFGAHLASFAHIEEENFVNELLHSKFNWTEERQFWIGFNKRNPLNAGSWEWSDRTPVVSSFLDNTYFGEDARNCAVYKANKTLLPLHCGSKREWICKIPRDVKPKIPFWYQYDVPWLFYQDAEYLFHTFASEWLNFEFVCSWLHSDLLTIHSAHEQEFIHSKIKALSKYGASWWIGLQEERANDEFRWRDGTPVIYQNWDTGRERTVNNQSQRCGFISSITGLWGSEECSVSMPSICKRKKVWLIEKKKDTPKQHGTCPKGWLYFNYKCLLLNIPKDPSSWKNWTHAQHFCAEEGGTLVAIESEVEQAFITMNLFGQTTSVWIGLQNDDYETWLNGKPVVYSNWSPFDIINIPSHNTTEVQKHIPLCALLSSNPNFHFTGKWYFEDCGKEGYGFVCEKMQDTSGHGVNTSDMYPMPNTLEYGNRTYKIINANMTWYAAIKTCLMHKAQLVSITDQYHQSFLTVVLNRLGYAHWIGLFTTDNGLNFDWSDGTKSSFTFWKDEESSLLGDCVFADSNGRWHSTACESFLQGAICHVPPETRQSEHPELCSETSIPWIKFKSNCYSFSTVLDSMSFEAAHEFCKKEGSNLLTIKDEAENAFLLEELFAFGSSVQMVWLNAQFDGNSK

SEQ ID NO: 57881 - protein, 527 aa, Homo sapiens
MGSSEVSIIPGLQKEEKAAVERRRLHVLKALKKLRIEADEAPVVAVLGSGGGLRAHIACLGVLSEMKEQGLLDAVTYLAGVSGSTWAISSLYTNDGDMEALEADLKHRFTRQEWDLAKSLQKTIQAARSENYSLTDFWAYMVISKQTRELPESHLSNMKKPVEEGTLPYPIFAAIDNDLQPSWQEARAPETWFEFTPHHAGFSALGAFVSITHFGSKFKKGRLVRTHPERDLTFLRGLWGSALGNTEVIREYIFDQLRNLTLKGLWRRAVANAKSIGHLIFARLLRLQESSQGEHPPPEDEGGEPEHTWLTEMLENWTRTSLEKQEQPHEDPERKGSLSNLMDFVKKTGICASKWEWGTTHNFLYKHGGIRDKIMSSRKHLHLVDAGLAINTPFPLVLPPTREVHLILSFDFSAGDPFETIRATTDYCRRHKIPFPQVEEAELDLWSKAPASCYILKGETGPVVMHFPLFNIDACGGDIEAWSDTYDTFKLADTYTLDVVVLLLALAKKNVRENKKKILRELMNVAG

SEQ ID NO: 57882 - protein, 541 aa, Homo sapiens
MGSSEVSIIPGLQKEEKAAVERRRLHVLKALKKLRIEADEAPVVAVLGSGGGLRAHIACLGVLSEMKEQGLLDAVTYLAGVSGSTWAISSLYTNDGDMEALEADLKHRFTRQEWDLAKSLQKTIQAARSENYSLTDFWAYMVISKQTRELPESHLSNMKKPVEEGTLPYPIFAAIDNDLQPSWQEARAPETWFEFTPHHAGFSALGAFVSITHFGSKFKKGRLVRTHPERDLTFLRGLWGSALGNTEVIREYIFDQLRNLTLKGLWRRAVANAKSIGHLIFARLLRLQESSQGEHPPPEDEGGEPEHTWLTEMLENWTRTSLEKQEQPHEDPERKGSLSNLMDFVKKTGICASKWEWGTTHNFLYKHGGIRDKIMSSRKHLHLVDAGLAINTPFPLVLPPTREVHLILSFDFSAGDPFETIRATTDYCRRHKIPFPQVEEAELDLWSKAPASCYILKGETGPVVMHFPLFNIDACGGDIEAWSDTYDTFKLADTYTLDVVVLLLALAKKNVRENKKKILRELMNVAGLYYPKDSARSCCLA

SEQ ID NO: 57883 - protein, 818 aa, Homo sapiens
MESLSPGGPPGHPYQGEASTCWQLTVRVLEARNLRWADLLSEADPYVILQLSTAPGMKFKTKTLTDTSHPVWNEAFRFLIQSQVKNVLELSIYDEDSVTEDDICFKVLYDISEVLPGKLLRKTFSQSPQGEEELDVEFLMEETSDRPENLITNKVIVARELSCLDVHLDSTGSTAVVADQDKLELELVLKGSYEDTQTSFLGTASAFRFHYMAALETELSGRLRSSRSNGWNGDNSAGYLTVPLRPLTIGKEVTMDVPAPNAPGVRLQLKAEGCPEELAVHLGFNLCAEEQAFLSRRKQVVAKALKQALQLDRDLQEDEVPVVGIMATGGGARAMTSLYGHLLALQKLGLLDCVTYFSGISGSTWTMAHLYGDPEWSQRDLEGPIRYAREHLAKSKLEVFSPERLASYRRELELRAEQGHPTTFVDLWALVLESMLHGQVMDQKLSGQRAALERGQNPLPLYLSLNVKENNLETLDFKEWVEFSPYEVGFLKYGAFVPPELFGSEFFMGRLMRRIPEPRICFLEAIWSNIFSLNLLDAWYDLTSSGESWKQHIKDKTRSLEKEPLTTSGTSSRLEASWLQPGTALAQAFKGFLTGRPLHQRSPNFLQGLQLHQDYCSHKDFSTWADYQLDSMPSQLTPKEPRLCLVDAAYFINTSSPSMFRPGRRLDLILSFDYSLSAPFEALQQTELYCRARGLPFPRVEPSPQDQHQPRECHLFSDPACPEAPILLHFPLVNASFKDHSAPGVQRSPAELQGGQVDLTGATCPYTLSNMTYKEEDFERLLRLSDYNVQTSQGAILQALRTALKHRTLEARPPRAQT

SEQ ID NO: 57884 - protein, 441 aa, Homo sapiens
MVPPKLHVLFCLCGCLAVVYPFDWQYINPVAHMKSSAWVNKIQVLMAAASFGQTKIPRGNGPYSVGCTDLMFDHTNKGTFLRLYYPSQDNDRLDTLWIPNKEYFWGLSKFLGTHWLMGNILRLLFGSMTTPANWNSPLRPGEKYPLVVFSHGLGAFRTLYSAIGIDLASHGFIVAAVEHRDRSASATYYFKDQSAAEIGDKSWLYLRTLKQEEETHIRNEQVRQRAKECSQALSLILDIDHGKPVKNALDLKFDMEQLKDSIDREKIAVIGHSFGGATVIQTLSEDQRFRCGIALDAWMFPLGDEVYSRIPQPLFFINSEYFQYPANIIKMKKCYSPDKERKMITIRGSVHQNFADFTFATGKIIGHMLKLKGDIDSNVAIDLSNKASLAFLQKHLGLHKDFDQWDCLIEGDDENLIPGTNINTTNQHIMLQNSSGIEKYN

SEQ ID NO: 57885 - protein, 441 aa, Homo sapiens; identical to SEQ ID NO: 57884

SEQ ID NO: 57886 - protein, 219 aa, Homo sapiens
MAAASFGQTKIPRGNGPYSVGCTDLMFDHTNKGTFLRLYYPSQDNDRLDTLWIPNKEYFWGLSKFLGTHWLMGNILRLLFGSMTTPANWNSPLRPGEKYPLVVFSHGLGAFRTLYSAIGIDLASHGFIVAAVEHRDRSASATYYFKDQSAAEIGDKSWLYLRTLKQEEETHIRNEQVRQRAKECSQALSLILDIDHGKPVKNALDLKFDMEQLKVSYKK

SEQ ID NO: 57887 - protein, 137 aa, Homo sapiens
MTTPANWNSPLRPGEKYPLVVFSHGLGAFRTLYSAIGIDLASHGFIVAAVEHRDRSASATYYFKDQSAAEIGDKSWLYLRTLKQEEETHIRNEQVRQRAKECSQALSLILDIDHGKPVKNALDLKFDMEQLKVSYKK

SEQ ID NO: 57888 - protein, 162 aa, Homo sapiens
MRAPIPEPKPGDLIEIFRPFYRHWAIYVGDGYVVHLAPPSEVAGAGAASVMSALTDKAIVKKELLYDVAGSDKYQVNNKHDDKYSPLPCSKIIQRAEELVGQEVLYKLTSENCEHFVNELRYGVARSDQVRDVIIAASVAGMGLAAMSLIGVMFSRNKRQKQ

SEQ ID NO: 57889 - protein, 162 aa, Homo sapiens; identical to SEQ ID NO: 57888

SEQ ID NO: 57890 - protein, 1458 aa, Homo sapiens
MGLRPGIFLLELLLLLGQGTPQIHTSPRKSTLEGQLWPETLKNSPFPCNPNKLGVNMPSKSVHSLKPSDIKFVAAIGNLEIPPDPGTGDLEKQDWTERPQQVCMGVMTVLSDIIRYFSPSVPMPVCHTGKRVIPHDGAEDLWIQAQELVRNMKENLQLDFQFDWKLINVFFSNASQCYLCPSAQQNGLAAGGVDELMGVLDYLQQEVPRAFVNLVDLSEVAEVSRQYHGTWLSPAPEPCNCSEETTRLAKVVMQWSYQEAWNSLLASSRYSEQESFTVVFQPFFYETTPSLHSEDPRLQDSTTLAWHLWNRMMEPAGEKDEPLSVKHGRPMKCPSQESPYLFSYRNSNYLTRLQKPQDKLEVREGAEIRCPDKDPSDTVPTSVHRLKPADINVIGALGDSLTAGNGAGSTPGNVLDVLTQYRGLSWSVGGDENIGTVTTLANILREFNPSLKGFSVGTGKETSPNAFLNQAVAGGRAEDLPVQARRLVDLMKNDTRIHFQEDWKIITLFIGGNDLCDFCNDLVHYSPQNFTDNIGKALDILHAEVPRAFVNLVTVLEIVNLRELYQEKKVYCPRMILRSLCPCVLKFDDNSTELATLIEFNKKFQEKTHQLIESGRYDTREDFTVVVQPFFENVDMPKTSEGLPDNSFFAPDCFHFSSKSHSRAASALWNNMLEPVGQKTTRHKFENKINITCPNQVQPFLRTYKNSMQGHGTWLPCRDRAPSALHPTSVHALRPADIQVVAALGDSLTAGNGIGSKPDDLPDVTTQYRGLSYSAGGDGSLENVTTLPNILREFNRNLTGYAVGTGDANDTNAFLNQAVPGAKAEDLMSQVQTLMQKMKDDHRVNFHEDWKVITVLIGGSDLCDYCTDSNLYSAANFVHHLRNALDVLHREVPRVLVNLVDFLNPTIMRQVFLGNPDKCPVQQASVLCNCVLTLRENSQELARLEAFSRAYRSSMRELVGSGRYDTQEDFSVVLQPFFQNIQLPVLADGLPDTSFFAPDCIHPNQKFHSQLARALWTNMLEPLGSKTETLDLRAEMPITCPTQNEPFLRTPRNSNYTYPIKPAIENWGSDFLCTEWKASNSVPTSVHQLRPADIKVVAALGDSLTTAVGARPNNSSDLPTSWRGLSWSIGGDGNLETHTTLPNILKKFNPYLLGFSTSTWEGTAGLNVAAEGARARDMPAQAWDLVERMKNSPDINLEKDWKLVTLFIGVNDLCHYCENPEAHLATEYVQHIQQALDILSEELPRAFVNVVEVMELASLYQGQGGKCAMLAAQNNCTCLRHSQSSLEKQELKKVNWNLQHGISSFSYWHQYTQREDFAVVVQPFFQNTLTPLNERGDTDLTFFSEDCFHFSDRGHAEMAIALWNNMLEPVGRKTTSNNFTHSRAKLKCPSPESPYLYTLRNSRLLPDQAEEAPEVLYWAVPVAAGVGLVVGIIGTVVWRCRRGGRREDPPMSLRTVAL

SEQ ID NO: 57891 - protein, 488 aa, Homo sapiens
MEPAGEKDEPLSVKHGRPMKCPSQESPYLFSYRNSNYLTRLQKPQDKLEVREGAEIRCPDKDPSDTVPTSVHRLKPADINVIGALGDSLTAGNGAGSTPGNVLDVLTQYRGLSWSVGGDENIGTVTTLANILREFNPSLKGFSVGTGKETSPNAFLNQAVAGGRAEDLPVQARRLVDLMKNDTRIHFQEDWKIITLFIGGNDLCDFCNDLVHYSPQNFTDNIGKALDILHAEVPRAFVNLVTVLEIVNLRELYQEKKVYCPRMILRSLCPCVLKFDDNSTELATLIEFNKKFQEKTHQLIESGRYDTREDFTVVVQPFFENVDMPKTSEGLPDNSFFAPDCFHFSSKSHSRAASALWNNMLEPVGQKTTRHKFENKINITCPNQVQPFLRTYKNSMQGHGTWLPCRDRAPSALHPTSVHALRPADIQVVAALGDSLTAGNGIGSKPDDLPDVTTQYRGLSYRESKPGFLSDSWVSKSNRKCTRKAPNP

SEQ ID NO: 57892 - protein, 1447 aa, Homo sapiens
MGLRPGIFLLELLLLLGQGTPQIHTSPRKSTLEGQLWPETLKNSPFPCNPNKLGVNMPSKSVHSLKPSDIKFVAAIGNLEIPPDPGTGDLEKQDWTERPQQVCMGVMTVLSDIIRYFSPSVPMPVCHTGKRVIPHDGAEDLWIQAQELVRNMKENLQLDFQFDWKLINVFFSNASQCYLCPSAQQAPSLSTVLLSQNGLAAGGVDELMGVLDYLQQEVPRAFVNLVDLSEVAEVSRQYHGTWLSPAPEPCNCSEETTRLAKVVMQWSYQEAWNSLLASSRYSEQESFTVVFQPFFYETTPSLHSEDPRLQDSTTLAWHLWNRMMEPAGEKDEPLSVKHGRPMKCPSQESPYLFSYRNSNYLTRLQKPQDKLEVREGAEIRCPDKDPSDTVPTSVHRLKPADINVIGALGDSLTAGNGAGSTPGNVLDVLTQYRGLSWSVGGDENIGTVTTLANILREFNPSLKGFSVGTGKETSPNAFLNQAVAGGRAEDLPVQARRLVDLMKNDTRIHFQEDWKIITLFIGGNDLCDFCNDLVPRAFVNLVTVLEIVNLRELYQEKKVYCPRMILRSLCPCVLKFDDNSTELATLIEFNKKFQEKTHQLIESGRYDTREDFTVVVQPFFENVDMPKTSEGLPDNSFFAPDCFHFSSKSHSRAASALWNNMLEPVGQKTTRHKFENKINITCPNQVQPFLRTYKNSMQGHGTWLPCRDRAPSALHPTSVHALRPADIQVVAALGDSLTAGNGIGSKPDDLPDVTTQYRGLSYSAGGDGSLENVTTLPNILREFNRNLTGYAVGTGDANDTNAFLNQAVPGAKAEDLMSQVQTLMQKMKDDHRVNFHEDWKVITVLIGGSDLCDYCTDSNLYSAANFVHHLRNALDVLHREVPRVLVNLVDFLNPTIMRQVFLGNPDKCPVQQASVLCNCVLTLRENSQELARLEAFSRAYRSSMRELVGSGRYDTQEDFSVVLQPFFQNIQLPVLADGLPDTSFFAPDCIHPNQKFHSQLARALWTNMLEPLGSKTETLDLRAEMPITCPTQNEPFLRTPRNSNYTYPIKPAIENWGSDFLCTEWKASNSVPTSVHQLRPADIKVVAALGDSLTTAVGARPNNSSDLPTSWRGLSWSIGGDGNLETHTTLPNILKKFNPYLLGFSTSTWEGTAGLNVAAEGARARDMPAQAWDLVERMKNSPDINLEKDWKLVTLFIGVNDLCHYCENPEAHLATEYVQHIQQALDILSEELPRAFVNVVEVMELASLYQGQGGKCAMLAAQNNCTCLRHSQSSLEKQELKKVNWNLQHGISSFSYWHQYTQREDFAVVVQPFFQNTLTPLNERGDTDLTFFSEDCFHFSDRGHAEMAIALWNNMLEPVGRKTTSNNFTHSRAKLKCPSPESPYLYTLRNSRLLPDQAEEAPEVLYWAVPVAAGVGLVVGIIGTVVWRCRRGGRREDPPMSLRTVAL

SEQ ID NO: 57893 - protein, 423 aa, Homo sapiens
MPITCPTQNEPFLRTPRNSNYTYPIKPAIENWGSDFLCTEWKASNSVPTSVHQLRPADIKVVAALGDSLTTAVGARPNNSSDLPTSWRGLSWSIGGDGNLETHTTLPNILKKFNPYLLGFSTSTWEGTAGLNVAAEGARARDMPAQAWDLVERMKNSPDINLEKDWKLVTLFIGVNDLCHYCENPEAHLATEYVQHIQQALDILSEELPRAFVNVVEVMELASLYQGQGGKCAMLAAQNNCTCLRHSQSSLEKQELKKVNWNLQHGISSFSYWHQYTQREDFAVVVQPFFQNTLTPLNERGDTDLTFFSEDCFHFSDRGHAEMAIALWNNMLEPVGRKTTSNNFTHSRAKLKCPSPESPYLYTLRNSRLLPDQAEEAPEVLYWAVPVAAGVGLVVGIIGTVVWRCRRGGRREDPPMSLRTVAL

SEQ ID NO: 57894 - protein, 1167 aa, Homo sapiens
MAGAQPGVHALQLEPPTVVETLRRGSKFIKWDEEKLMTVVSGPDPVNTVFLNFMAVQDDTAKVWSEELFKLAMNILAQNASRNTFLRKAYTKLKLQVNQDGRIPVKNILKMFSADKKRVETALESCGLKFNRSESIRPDEFSLEIFERFLNKLCLRPDIDKILLEIGAKGKPYLTLEQLMDFINQKQRDPRLNEVLYPPLRPSQARLLIEKYEPNQQFLERDQMSMEGFSRYLGGEENGILPLEALDLSTDMTQPLSAYFINSSHNTYLTAGQLAGTSSVEMYRQALLWGCRCVELDVWKGRPPEEEPFITHGFTMTTEVPLRDVLEAIAETAFKTSPYPVILSFENHVDSAKQQAKMAEYCRSIFGDALLIEPLDKYPLAPGVPLPSPQDLMGRILVKNKKRHRPSAGGPDSAGRKRPLEQSNSALSESSAATEPSSPQLGSPSSDSCPGLSNGEEVGLEKPSLEPQKSLGDEGLNRGPYVLGPADREDEEEDEEEEEQTDPKKPTTDEGTASSEVNATEEMSTLVNYIEPVKFKSFEAARKRNKCFEMSSFVETKAMEQLTKSPMEFVEYNKQQLSRIYPKGTRVDSSNYMPQLFWNVGCQLVALNFQTLDVAMQLNAGVFEYNGRSGYLLKPEFMRRPDKSFDPFTEVIVDGIVANALRVKVISGQFLSDRKVGIYVEVDMFGLPVDTRRKYRTRTSQGNSFNPVWDEEPFDFPKVVLPTLASLRIAAFEEGGKFVGHRILPVSAIRSGYHYVCLRNEANQPLCLPALLIYTEASDYIPDDHQDYAEALINPIKHVSLMDQRARQLAALIGESEAQAGQETCQDTQSQQLGSQPSSNPTPSPLDASPRRPPGPTTSPASTSLSSPGQRDDLIASILSEVAPTPLDELRGHKALVKLRSRQERDLRELRKKHQRKAVTLTRRLLDGLAQAQAEGRCRLRPGALGGAADVEDTKEGEDEAKRYQEFQNRQVQSLLELREAQVDAEAQRRLEHLRQALQRLREVVLDANTTQFKRLKEMNEREKKELQKILDRKRHNSISEAKMRDKHKKEAELTEINRRHITESVNSIRRLEEAQKQRHDRLVAGQQQVLQQLAEEEPKLLAQLAQECQEQRARLPQEIRRSLLGEMPEGLGDGPLVACASNGHAPGSSGHLSGADSESQEENTQL

SEQ ID NO: 57895 - protein, 1216 aa, Homo sapiens
MAGAQPGVHALQLKPVCVSDSLKKGTKFVKWDDDSTIVTPIILRTDPQGFFFYWTDQNKETELLDLSLVKDARCGRHAKAPKDPKLRELLDVGNIGRLEQRMITVVYGPDLVNISHLNLVAFQEEVAKEWTNEVFSLATNLLAQNMSRDAFLEKAYTKLKLQVTPEGRIPLKNIYRLFSADRKRVETALEACSLPSSRNDSIPQEDFTPEVYRVFLNNLCPRPEIDNIFSEFGAKSKPYLTVDQMMDFINLKQRDPRLNEILYPPLKQEQVQVLIEKYEPNNSLARKGQISVDGFMRYLSGEENGVVSPEKLDLNEDMSQPLSHYFINSSHNTYLTAGQLAGNSSVEMYRQVLLSGCRCVELDCWKGRTAEEEPVITHGFTMTTEISFKEVIEAIAECAFKTSPFPILLSFENHVDSPKQQAKMAEYCRLIFGDALLMEPLEKYPLESGVPLPSPMDLMYKILVKNKKKSHKSSEGSGKKKLSEQASNTYSDSSSMFEPSSPGAGEADTESDDDDDDDDCKKSSMDEGTAGSEAMATEEMSNLVNYIQPVKFESFEISKKRNKSFEMSSFVETKGLEQLTKSPVEFVEYNKMQLSRIYPKGTRVDSSNYMPQLFWNAGCQMVALNFQTMDLAMQINMGMYEYNGKSGYRLKPEFMRRPDKHFDPFTEGIVDGIVANTLSVKIISGQFLSDKKVGTYVEVDMFGLPVDTRRKAFKTKTSQGNAVNPVWEEEPIVFKKVVLPTLACLRIAVYEEGGKFIGHRILPVQAIRPGYHYICLRNERNQPLTLPAVFVYIEVKDYVPDTYADVIEALSNPIRYVNLMEQRAKQLAALTLEDEEEVKKEADPGETPSEAPSEARTTPAENGVNHTTTLTPKPPSQALHSQPAPGSVKAPAKTEDLIQSVLTEVEAQTIEELKQQKSFVKLQKKHYKEMKDLVKRHHKKTTDLIKEHTTKYNEIQNDYLRRRAALEKSAKKDSKKKSEPSSPDHGSSTIEQDLAALDAEMTQKLIDLKDKQQQQLLNLRQEQYYSEKYQKREHIKLLIQKLTDVAEECQNNQLKKLKEICEKEKKELKKKMDKKRQEKITEAKSKDKSQMEEEKTEMIRSYIQEVVQYIKRLEEAQSKRQEKLVEKHKEIRQQILDEKPKLQVELEQEYQDKFKRLPLEILEFVQEAMKGKISEDSNHGSAPLSLSSDPGKVNHKTPSSEELGGDIPGKEFDTPL

SEQ ID NO: 57896 - protein, 223 aa, Homo sapiens
MRRPDKHFDPFTEGIVDGIVANTLSVKIISGQFLSDKKVGTYVEVDMFGLPVDTRRKAFKTKTSQGNAVNPVWEEEPIVFKKVVLPTLACLRIAVYEEGGKFIGHRILPVQAIRPGYHYICLRNERNQPLTLPAVFVYIEVKDYVPDTYADVIEALSNPIRYVNLMEQRAKQLAALTLEDEEEVKKEGGFLHDEIMRLTRNTLEKLMALPLTHVVPIQSKMLS

SEQ ID NO: 57897 - protein, 1173 aa, Homo sapiens
MAGAQPGVHALQLKPVCVSDSLKKGTKFVKWDDDSTIVTPIILRTDPQGFFFYWTDQNKETELLDLSLVKDARCGRHAKAPKDPKLRELLDVGNIGRLEQRMITVVYGPDLVNISHLNLVAFQEEVAKEWTNEVFSLATNLLAQNMSRDAFLEKAYTKLKLQVTPEGRIPLKNIYRLFSADRKRVETALEACSLPSSRNDSIPQEDFTPEVYRVFLNNLCPRPEIDNIFSEFGAKSKPYLTVDQMMDFINLKQRDPRLNEILYPPLKQEQVQVLIEKYEPNNSLARKGQISVDGFMRYLSGEENGVVSPEKLDLNEDMSQPLSHYFINSSHNTYLTAGQLAGNSSVEMYRQVLLSGCRCVELDCWKGRTAEEEPVITHGFTMTTEISFKEVIEAIAECAFKTSPFPILLSFENHVDSPKQQAKMAEYCRLIFGDALLMEPLEKYPLESGVPLPSPMDLMYKILVKNKKKSHKSSEGSGKKKLSEQASNTYSDSSSMFEPSSPGAGEADTESDDDDDDDDCKKSSMDEGTAGSEAMATEEMSNLVNYIQPVKFESFEISKKRNKSFEMSSFVETKGLEQLTKSPVEFVEYNKMQLSRIYPKGTRVDSSNYMPQLFWNAGCQMVALNFQTMDLAMQINMGMYEYNGKSGYRLKPEFMRRPDKHFDPFTEGIVDGIVANTLSVKIISGQFLSDKKVGTYVEVDMFGLPVDTRRKAFKTKTSQGNAVNPVWEEEPIVFKKVVLPTLACLRIAVYEEGGKFIGHRILPVQAIRPGYHYICLRNERNQPLTLPAVFVYIEVKDYVPDTYADVIEALSNPIRYVNLMEQRAKQLAALTLEDEEEVKKEADPGETPSEAPSEARTTPAENGVNHTTTLTPKPPSQALHSQPAPGSVKAPAKTEDLIQSVLTEVEAQTIEELKQQKSFVKLQKKHYKEMKDLVKRHHKKTTDLIKEHTTKYNEIQNDYLRRRAALEKSAKKDSKKKSEPSSPDHGSSTIEQDLAALDAEMTQKLIDLKDKQQQQLLNLRQEQYYSEKYQKREHIKLLIQKLTDVAEECQNNQLKKLKEICEKEKKELKKKMDKKRQEKITEAKSKDKSQMEEEKTEMIRSYIQEVVQYIKRLEEAQSKRQEKLVEKHKEIRQQILDEKPKGEGSSSFLSETCHEDPSVSPNFTPPNPQALKW

SEQ ID NO: 57898 - protein, 1173 aa, Homo sapiens; identical to SEQ ID NO: 57897

SEQ ID NO: 57899 - protein, 232 aa, Homo sapiens
AGAQPGVHALQLKPVCVSDSLKKGTKFVKWDDDSTIVTPIILRTDPQGFFFYWTDQNKETELLDLSLVKDARCGRHAKAPKDPKLRELLDVGNIGRLEQRMITVVYGPDLVNISHLNLVAFQEEVAKEWTNEVFSLATNLLAQNMSRDAFLEKAYTKLKLQVTPEGRIPLKNIYRLFSADRKRVETALEACSLPSSRVEKANEAAKSEQSCGKAPPKHFHLHFIKQNKMLEP

SEQ ID NO: 57900 - protein, 30 aa, Homo sapiens
EEAQSKRQEKLVEKHKEIRQQILDEKPKVP

SEQ ID NO: 57901 - protein, 196 aa, Homo sapiens
IISGQFLSDKKVGTYVEVDMFGLPVDTRRKAFKTKTSQGNAVNPVWEEEPIVFKKVVLPTLACLRIAVYEEGGKFIGHRILPVQAIRPGYHYICLRNERNQPLTLPAVFVYIEVKDYVPDTYADVIEALSNPIRYVNLMEQRAKQLAALTLEDEEEVKKEGGFLHDEIMRLTRNTLEKLMALPLTHVVPIQSKMLS

SEQ ID NO: 57902 - protein, 1136 aa, Homo sapiens [sequence omitted]

SEQ ID NO: 57903 - protein, 1093 aa, Homo sapiens [sequence omitted]

SEQ ID NO: 57904 - protein, 1185 aa, Homo sapiens
MSLLNPVLLPPKVKAYLSQGERFIKWDDETTVASPVILRVDPKGYYLYWTYQSKEMEFLDITSIRDTRFGKFAKMPKSQKLRDVFNMDFPDNSFLLKTLTVVSGPDMVDLTFHNFVSYKENVGKAWAEDVLALVKHPLTANASRSTFLDKILVKLKMQLNSEGKIPVKNFFQMFPADRKRVEAALSACHLPKGKNDAINPEDFPEPVYKSFLMSLCPRPEIDEIFTSYHAKAKPYMTKEHLTKFINQKQRDSRLNSLLFPPARPDQVQGLIDKYEPSGINAQRGQLSPEGMVWFLCGPENSVLAQDKLLLHHDMTQPLNHYFINSSHNTYLTAGQFSGLSSAEMYRQVLLSGCRCVELDCWKGKPPDEEPIITHGFTMTTDIFFKEAIEAIAESAFKTSPYPIILSFENHVDSPRQQAKMAEYCRTIFGDMLLTEPLEKFPLKPGVPLPSPEDLRGKILIKNKKNQFSGPTSSSKDTGGEAEGSSPPSAPAGEGTVWAGEEGTELEEEEVEEEEEEESGNLDEEEIKKMQSDEGTAGLEVTAYEEMSSLVNYIQPTKFVSFEFSAQKNRSYVISSFTELKAYDLLSKASVQFVDYNKRQMSRIYPKGTRMDSSNYMPQMFWNAGCQMVALNFQTMDLPMQQNMAVFEFNGQSGYLLKHEFMRRPDKQFNPFSVDRIDVVVATTLSITVISGQFLSERSVRTYVEVELFGLPGDPKRRYRTKLSPSTNSINPVWKEEPFVFEKILMPELASLRVAVMEEGNKFLGHRIIPINALNSGYHHLCLHSESNMPLTMPALFIFLEMKDYIPGAWADLTVALANPIKFFSAHDTKSVKLKEAMGGLPEKPFPLASPVASQVNGALAPTSNGSPAARAGAREEAMKEAAEPRTASLEELRELKGVVKLQRRHEKELRELERRGARRWEELLQRGAAQLAELGPPGVGGVGACKLGPGKGSRKKRSLPREESAGAAPGEGPEGVDGRVRELKDRLELELLRQGEEQYECVLKRKEQHVAEQISKMMELAREKQAAELKALKETSENDTKEMKKKLETKRLERIQGMTKVTTDKMAQERLKREINNSHIQEVVQVIKQMTENLERHQEKLEEKQAACLEQIREMEKQFQKEALAEYEARMKGLEAEVKESVRACLRTCFPSEAKDKPERACECPPELCEQDPLIAKADAQESRL

SEQ ID NO: 57905 - protein, 1181 aa, Homo sapiens
MSLLNPVLLPPKVKAYLSQGERFIKWDDETTVASPVILRVDPKGYYLYWTYQSKEMEFLDITSIRDTRFGKFAKMPKSQKLRDVFNMDFPDNSFLLKTLTVVSGPDMVDLTFHNFVSYKENVGKAWAEDVLALVKHPLTANASRSTFLDKILVKLKMQLNSEGKIPVKNFFQMFPADRKRVEAALSACHLPKGKNDAINPEDFPEPVYKSFLMSLCPRPEIDEIFTSYHAKAKPYMTKEHLTKFINQKQRDSRLNSLLFPPARPDQVQGLIDKYEPSGINAQRGQLSPEGMVWFLCGPENSVLAQDKLLLHHDMTQPLNHYFINSSHNTYLTAGQFSGLSSAEMYRQVLLSGCRCVELDCWKGKPPDEEPIITHGFTMTTDIFFKEAIEAIAESAFKTSPYPIILSFENHVDSPRQQAKMAEYCRTIFGDMLLTEPLEKFPLKPGVPLPSPEDLRGKILIKNKKNQFSGPTSSSKDTGGEAEGSSPPSAPAVWAGEEGTELEEEEVEEEEEEESGNLDEEEIKKMQSDEGTAGLEVTAYEEMSSLVNYIQPTKFVSFEFSAQKNRSYVISSFTELKAYDLLSKASVQFVDYNKRQMSRIYPKGTRMDSSNYMPQMFWNAGCQMVALNFQTMDLPMQQNMAVFEFNGQSGYLLKHEFMRRPDKQFNPFSVDRIDVVVATTLSITVISGQFLSERSVRTYVEVELFGLPGDPKRRYRTKLSPSTNSINPVWKEEPFVFEKILMPELASLRVAVMEEGNKFLGHRIIPINALNSGYHHLCLHSESNMPLTMPALFIFLEMKDYIPGAWADLTVALANPIKFFSAHDTKSVKLKEAMGGLPEKPFPLASPVASQVNGALAPTSNGSPAARAGAREEAMKEAAEPRTASLEELRELKGVVKLQRRHEKELRELERRGARRWEELLQRGAAQLAELGPPGVGGVGACKLGPGKGSRKKRSLPREESAGAAPGEGPEGVDGRVRELKDRLELELLRQGEEQYECVLKRKEQHVAEQISKMMELAREKQAAELKALKETSENDTKEMKKKLETKRLERIQGMTKVTTDKMAQERLKREINNSHIQEVVQVIKQMTENLERHQEKLEEKQAACLEQIREMEKQFQKEALAEYEARMKGLEAEVKESVRACLRTCFPSEAKDKPERACECPPELCEQDPLIAKADAQESRL

SEQ ID NO: 57906 - protein, 1234 aa, Homo sapiens
MAGAQPGVHALQLEPPTVVETLRRGSKFIKWDEETSSRNLVTLRVDPNGFFLYWTGPNMEVDTLDISSIRDTRTGRYARLPKDPKIREVLGFGGPDARLEEKLMTVVSGPDPVNTVFLNFMAVQDDTAKVWSEELFKLAMNILAQNASRNTFLRKAYTKLKLQVNQDGRIPVKNILKMFSADKKRVETALESCGLKFNRSESIRPDEFSLEIFERFLNKLCLRPDIDKILLEIGAKGKPYLTLEQLMDFINQKQRDPRLNEVLYPPLRPSQARLLIEKYEPNQQFLERDQMSMEGFSRYLGGEENGILPLEALDLSTDMTQPLSAYFINSSHNTYLTAGQLAGTSSVEMYRQALLWGCRCVELDVWKGRPPEEEPFITHGFTMTTEVPLRDVLEAIAETAFKTSPYPVILSFENHVDSAKQQAKMAEYCRSIFGDALLIEPLDKYPLAPGVPLPSPQDLMGRILVKNKKRHRPSAGGPDSAGRKRPLEQSNSALSESSAATEPSSPQLGSPSSDSCPGLSNGEEVGLEKPSLEPQKSLGDEGLNRGPYVLGPADREDEEEDEEEEEQTDPKKPTTDEGTASSEVNATEEMSTLVNYIEPVKFKSFEAARKRNKCFEMSSFVETKAMEQLTKSPMEFVEYNKQQLSRIYPKGTRVDSSNYMPQLFWNVGCQLVALNFQTLDVAMQLNAGVFEYNGRSGYLLKPEFMRRPDKSFDPFTEVIVDGIVANALRVKVISGQFLSDRKVGIYVEVDMFGLPVDTRRKYRTRTSQGNSFNPVWDEEPFDFPKVVLPTLASLRIAAFEEGGKFVGHRILPVSAIRSGYHYVCLRNEANQPLCLPALLIYTEASDYIPDDHQDYAEALINPIKHVSLMDQRARQLAALIGESEAQAGQETCQDTQSQQLGSQPSSNPTPSPLDASPRRPPGPTTSPASTSLSSPGQRDDLIASILSEVAPTPLDELRGHKALVKLRSRQERDLRELRKKHQRKAVTLTRRLLDGLAQAQAEGRCRLRPGALGGAADVEDTKEGEDEAKRYQEFQNRQVQSLLELREAQVDAEAQRRLEHLRQALQRLREVVLDANTTQFKRLKEMNEREKKELQKILDRKRHNSISEAKMRDKHKKEAELTEINRRHITESVNSIRRLEEAQKQRHDRLVAGQQQVLQQLAEEEPKLLAQLAQECQEQRARLPQEIRRSLLGEMPEGLGDGPLVACASNGHAPGSSGHLSGADSESQEENTQL

SEQ ID NO: 57907 - protein, 1234 aa, Homo sapiens; identical to SEQ ID NO: 57906

SEQ ID NO: 57908 - protein, 1175 aa, Homo sapiens
MAKPYEFNWQKEVPSFLQEGAVFDRYEEESFVFEPNCLFKVDEFGFFLTWRSEGKEGQVLECSLINSIRSGAIPKDPKILAALEAVGKSENDLEGRIVCVCSGTDLVNISFTYMVAENPEVTKQWVEGLRSIIHNFRANNVSPMTCLKKHWMKLAFMTNTNGKIPVRSITRTFASGKTEKVIFQALKELGLPSGKNDEIEPTAFSYEKFYELTQKICPRTDIEDLFKKINGDKTDYLTVDQLVSFLNEHQRDPRLNEILFPFYDAKRAMQIIEMYEPDEDLKKKGLISSDGFCRYLMSDENAPVFLDRLELYQEMDHPLAHYFISSSHNTYLTGRQFGGKSSVEMYRQVLLAGCRCVELDCWDGKGEDQEPIITHGKAMCTDILFKDVIQAIKETAFVTSEYPVILSFENHCSKYQQYKMSKYCEDLFGDLLLKQALESHPLEPGRALPSPNDLKRKILIKNKRLKPEVEKKQLEALRSMMEAGESASPANILEDDNEEEIESADQEEEAHPEFKFGNELSADDLGHKEAVANSVKKGLVTVEDEQAWMASYKYVGATTNIHPYLSTMINYAQPVKFQGFHVAEERNIHYNMSSFNESVGLGYLKTHAIEFVNYNKRQMSRIYPKGGRVDSSNYMPQIFWNAGCQMVSLNYQTPDLAMQLNQGKFEYNGSCGYLLKPDFMRRPDRTFDPFSETPVDGVIAATCSVQVISGQFLSDKKIGTYVEVDMYGLPTDTIRKEFRTRMVMNNGLNPVYNEESFVFRKVILPDLAVLRIAVYDDNNKLIGQRILPLDGLQAGYRHISLRNEGNKPLSLPTIFCNIVLKTYVPDGFGDIVDALSDPKKFLSITEKRADQMRAMGIETSDIADVPSDTSKNDKKGKANTAKANVTPQSSSELRPTTTAALASGVEAKKGIELIPQVRIEDLKQMKAYLKHLKKQQKELNSLKKKHAKEHSTMQKLHCTQVDKIVAQYDKEKSTHEKILEKAMKKKGGSNCLEMKKETEIKIQTLTSDHKSKVKEIVAQHTKEWSEMINTHSAEEQEIRDLHLSQQCELLKKLLINAHEQQTQQLKLSHDRESKEMRAHQAKISMENSKAISQDKSIKNKAERERRVRELNSSNTKKFLEERKRLAMKQSKEMDQLKKVQLEHLEFLEKQNEQAKEMQQMVKLEAEMDRRPATVV

SEQ ID NO: 57909 - protein, 1194 aa, Homo sapiens
MAKPYEFNWQKEVPSFLQEGAVFDRYEEESFVFEPNCLFKVDEFGFFLTWRSEGKEGQVLECSLINSIRSGAIPKDPKILAALEAVGKSENDLEGRIVCVCSGTDLVNISFTYMVAENPEVTKQWVEGLRSIIHNFRANNVSPMTCLKKHWMKLAFMTNTNGKIPVRSITRTFASGKTEKVIFQALKELGLPSGKNDEIEPTAFSYEKFYELTQKICPRTDIEDLFKKINGDKTDYLTVDQLVSFLNEHQRDPRLNEILFPFYDAKRAMQIIEMYEPDEDLKKKGLISSDGFCRYLMSDENAPVFLDRLELYQEMDHPLAHYFISSSHNTYLTGRQFGGKSSVEMYRQVLLAGCRCVELDCWDGKGEDQEPIITHGKAMCTDILFKDVIQAIKETAFVTSEYPVILSFENHCSKYQQYKMSKYCEDLFGDLLLKQALESHPLEPGRALPSPNDLKRKILIKNKRLKPEVEKKQLEALRSMMEAGESASPANILEDDNEEEIESADQEEEAHPEFKFGNELSADDLGHKEAVANSVKKGLVTVEDEQAWMASYKYVGATTNIHPYLSTMINYAQPVKFQGFHVAEERNIHYNMSSFNESVGLGYLKTHAIEFVNYNKRQMSRIYPKGGRVDSSNYMPQIFWNAGCQMVSLNYQTPDLAMQLNQGKFEYNGSCGYLLKPDFMRRPDRTFDPFSETPVDGVIAATCSVQVISGQFLSDKKIGTYVEVDMYGLPTDTIRKEFRTRMVMNNGLNPVYNEESFVFRKVILPDLAVLRIAVYDDNNKLIGQRILPLDGLQAGYRHISLRNEGNKPLSLPTIFCNIVLKTYVPDGFGDIVDALSDPKKFLSITEKRADQMRAMGIETSDIADVPSDTSKNDKKGKANTAKANVTPQSSSELRPTTTAALASGVEAKKGIELIPQVRIEDLKQMKAYLKHLKKQQKELNSLKKKHAKEHSTMQKLHCTQVDKIVAQYDKEKSTHEKILEKAMKKKGGSNCLEMKKETEIKIQTLTSDHKSKVKEIVAQHTKEWSEMINTHSAEEQEIRDLHLSQQCELLKKLLINAHEQQTQQLKLSHDRESKEMRAHQAKISMENSKAISQDKSIKNKAERERRVRELNSSNTKKFLEERKRLAMKQSKEMDQLKKVQLEHLEFLEKQNEQLLKSCHAVSQTQGEGDAADGEIGSRDGPQTSNSSMKLQNAN

SEQ ID NO: 57910 - protein, 1187 aa, Homo sapiens
MAKPYEFNWQKEVPSFLQEGAVFDRYEEESFVFEPNCLFKVDEFGFFLTWRSEGKEGQVLECSLINSIRSGAIPKDPKILAALEAVGKSENDLEGRIVCVCSGTDLVNISFTYMVAENPEVTKQWVEGLRSIIHNFRANNVSPMTCLKKHWMKLAFMTNTNGKIPVRSITRTFASGKTEKVIFQALKELGLPSGKNDEIEPTAFSYEKFYELTQKICPRTDIEDLFKKINGDKTDYLTVDQLVSFLNEHQRDPRLNEILFPFYDAKRAMQIIEMYEPDEDLKKKGLISSDGFCRYLMSDENAPVFLDRLELYQEMDHPLAHYFISSSHNTYLTGRQFGGKSSVEMYRQVLLAGCRCVELDCWDGKGEDQEPIITHGKAMCTDILFKDVIQAIKETAFVTSEYPVILSFENHCSKYQQYKMSKYCEDLFGDLLLKQALESHPLEPGRALPSPNDLKRKILIKNKRLKPEVEKKQLEALRSMMEAGESASPANILEDDNEEEIESADQEEEAHPEFKFGNELSADDLGHKEAVANSVKKASDDLEHENNKKGLVTVEDEQAWMASYKYVGATTNIHPYLSTMINYAQPVKFQGFHVAEERNIHYNMSSFNESVGLGYLKTHAIEFVNYNKRQMSRIYPKGGRVDSSNYMPQIFWNAGCQMVSLNYQTPDLAMQLNQGKFEYNGSCGYLLKPDFMRRPDRTFDPFSETPVDGVIAATCSVQVISGQFLSDKKIGTYVEVDMYGLPTDTIRKEFRTRMVMNNGLNPVYNEESFVFRKVILPDLAVLRIAVYDDNNKLIGQRILPLDGLQAGYRHISLRNEGNKPLSLPTIFCNIVLKTYVPDGFGDIVDALSDPKKFLSITEKRADQMRAMGIETSDIADVPSDTSKNDKKGKANTAKANVTPQSSSELRPTTTAALASGVEAKKGIELIPQVRIEDLKQMKAYLKHLKKQQKELNSLKKKHAKEHSTMQKLHCTQVDKIVAQYDKEKSTHEKILEKAMKKKGGSNCLEMKKETEIKIQTLTSDHKSKVKEIVAQHTKEWSEMINTHSAEEQEIRDLHLSQQCELLKKLLINAHEQQTQQLKLSHDRESKEMRAHQAKISMENSKAISQDKSIKNKAERERRVRELNSSNTKKFLEERKRLAMKQSKEMDQLKKVQLEHLEFLEKQNEQAKEMQQMVKLEAEMDRRPATVV

SEQ ID NO: 57911 - protein, 1175 aa, Homo sapiens; identical to SEQ ID NO: 57908

SEQ ID NO: 57912 - protein, 1194 aa, Homo sapiens; identical to SEQ ID NO: 57909

SEQ ID NO: 57913 - protein, 113 aa, Homo sapiens
MAKPYEFNWQKEVPSFLQEGAVFDRYEEESFVFEPNCLFKVDEFGFFLTWRSEGKEGQVLECSLINSIRSGAIPKDPKILAALEAVGKSENDLEGRIVCVCSGTDLVNISFTY

SEQ ID NO: 57914 - protein, 1023 aa, Homo sapiens
PVRSITRTFASGKTEKVIFQALKELGLPSGKNDEIEPTAFSYEKFYELTQKICPRTDIEDLFKKINGDKTDYLTVDQLVSFLNEHQRDPRLNEILFPFYDAKRAMQIIEMYEPDEDLKKKGLISSDGFCRYLMSDENAPVFLDRLELYQEMDHPLAHYFISSSHNTYLTGRQFGGKSSVEMYRQVLLAGCRCVELDCWDGKGEDQEPIITHGKAMCTDILFKDVIQAIKETAFVTSEYPVILSFENHCSKYQQYKMSKYCEDLFGDLLLKQALESHPLEPGRALPSPNDLKRKILIKNKRLKPEVEKKQLEALRSMMEAGESASPANILEDDNEEEIESADQEEEAHPEFKFGNELSADDLGHKEAVANSVKKASDDLEHENNKKGLVTVEDEQAWMASYKYVGATTNIHPYLSTMINYAQPVKFQGFHVAEERNIHYNMSSFNESVGLGYLKTHAIEFVNYNKRQMSRIYPKGGRVDSSNYMPQIFWNAGCQMVSLNYQTPDLAMQLNQGKFEYNGSCGYLLKPDFMRRPDRTFDPFSETPVDGVIAATCSVQVISGQFLSDKKIGTYVEVDMYGLPTDTIRKEFRTRMVMNNGLNPVYNEESFVFRKVILPDLAVLRIAVYDDNNKLIGQRILPLDGLQAGYRHISLRNEGNKPLSLPTIFCNIVLKTYVPDGFGDIVDALSDPKKFLSITEKRADQMRAMGIETSDIADVPSDTSKNDKKGKANTAKANVTPQSSSELRPTTTAALASGVEAKKGIELIPQVRIEDLKQMKAYLKHLKKQQKELNSLKKKHAKEHSTMQKLHCTQVDKIVAQYDKEKSTHEKILEKAMKKKGGSNCLEMKKETEIKIQTLTSDHKSKVKEIVAQHTKEWSEMINTHSAEEQEIRDLHLSQQCELLKKLLINAHEQQTQQLKLSHDRESKEMRAHQAKISMENSKAISQDKSIKNKAERERRVRELNSSNTKKFLEERKRLAMKQSKEMDQLKKVQLEHLEFLEKQNEQAKEMQQMVKLEAEMDRRPATVV

SEQ ID NO: 57915 - protein, 60 aa, Homo sapiens
MAKPYEFNWQKEVPSFLQEGAVFDRYEEESFVFEPNCLFKVDEFGFFLTWRSEGKEGQVL

SEQ ID NO: 57916 - protein, 81 aa, Homo sapiens
MAKPYEFNWQKEVPSFLQEGAVFDRYEEESFVFEPNCLFKVDEFGFFLTWRSEGKEGQVLECSLINSIRSGAIPKDPKILA

SEQ ID NO: 57917 - protein, 110 aa, Homo sapiens
MAKPYEFNWQKEVPSFLQEGAVFDRYEEESFVFEPNCLFKVDEFGFFLTWRSEGKEGQVLECSLINSIRSGAIPKDPKILAALEAVGKSENDLEGRIVCVCSGTDLVNIS

SEQ ID NO: 57918 - protein, 756 aa, Homo sapiens
MDSGRDFLTLHGLQDDEDLQALLKGSQLLKVKSSSWRRERFYKLQEDCKTIWQESRKVMRTPESQLFSIEDIQEVRMGHRTEGLEKFARDVPEDRCFSIVFKDQRNTLDLIAPSPADAQHWVLGLHKIIHHSGSMDQRQKLQHWIHSCLRKADKNKDNKMSFKELQNFLKELNIQVDDSYARKIFRECDHSQTDSLEDEEIEAFYKMLTQRVEIDRTFAEAAGSGETLSVDQLVTFLQHQQREEAAGPALALSLIERYEPSETAKAQRQMTKDGFLMYLLSADGSAFSLAHRRVYQDMGQPLSHYLVSSSHNTYLLEDQLAGPSSTEAYIRALCKGCRCLELDCWDGPNQEPIIYHGYTFTSKILFCDVLRAIRDYAFKASPYPVILSLENHCTLEQQRVMARHLHAILGPMLLNRPLDGVTNSLPSPEQLKGKILLKGKKLGGLLPPGGEGGPEATVVSDEDEAAEMEDEAVRSRVQHKPKEDKLRLAQELSDMVIYCKSVHFGGFSSPGTPGQAFYEMASFSENRALRLLQESGNGFVRHNVGHLSRIYPAGWRTDSSNYSPVEMWNGGCQIVALNFQTPGPEMDVYQGRFQDNGACGYVLKPAFLRDPNGTFNPRALAQGPWWARKRLNIRVISGQQLPKVNKNKNSIVDPKVTVEIHGVSRDVASRQTAVITNNGFNPWWDTEFAFEVVVPDLALIRFLVEDYDASSKNDFIGQSTIPLNSLKQGYRHVHLMSKNGDQHPSATLFVKISLQD

SEQ ID NO: 57919 - protein, 777 aa, Homo sapiens
MQCLGIRSRSRSRELYLQERSLKVAALNGRRLGLQDDEDLQALLKGSQLLKVKSSSWRRERFYKLQEDCKTIWQESRKVMRTPESQLFSIEDIQEVRMGHRTEGLEKFARDVPEDRCFSIVFKDQRNTLDLIAPSPADAQHWVLGLHKIIHHSGSMDQRQKLQHWIHSCLRKADKNKDNKMSFKELQNFLKELNIQVDDSYARKIFRECDHSQTDSLEDEEIEAFYKMLTQRVEIDRTFAEAAGSGETLSVDQLVTFLQHQQREEAAGPALALSLIERYEPSETAKAQRQMTKDGFLMYLLSADGSAFSLAHRRVYQDMGQPLSHYLVSSSHNTYLLEDQLAGPSSTEAYIRALCKGCRCLELDCWDGPNQEPIIYHGYTFTSKILFCDVLRAIRDYAFKASPYPVILSLENHCTLEQQRVMARHLHAILGPMLLNRPLDGVTNSLPSPEQLKGKILLKGKKLGGLLPPGGEGGPEATVVSDEDEAAEMEDEAVRSRVQHKPKEDKLRLAQELSDMVIYCKSVHFGGFSSPGTPGQAFYEMASFSENRALRLLQESGNGFVRHNVGHLSRIYPAGWRTDSSNYSPVEMWNGGCQIVALNFQTPGPEMDVYQGRFQDNGACGYVLKPAFLRDPNGTFNPRALAQGPWWARKRLNIRVISGQQLPKVNKNKNSIVDPKVTVEIHGVSRDVASRQTAVITNNGFNPWWDTEFAFEVVVPDLALIRFLVEDYDASSKNDFIGQSTIPLNSLKQGYRHVHLMSKNGDQHPSATLFVKISLQD

SEQ ID NO: 57920 - protein, 2302 aa, Homo sapiens
MTSEEMTASVLIPVTQRKVVSAQSAADESSEKVSDINISKAHTVRRSGETSHTISQLNKLKEEPSGSNLPKILSIAREKIVSDENSNEKCWEKIMPDSAKNLNINCNNILRNHQHGLPQRQFYEMYNSVAEEDLCLETGIPSPLERKVFPGIQLELDRPSMGISPLGNQSVIIETGRAHPDSRRAVFHFHYEVDRRMSDTFCTLSENLILDDCGNCVPLPGGEEKQKKNYVAYTCKLMELAKNCDNKNEQLQCDHCDTLNDKYFCFEGSCEKVDMVYSGDSFCRKDFTDSQAAKTFLSHFEDFPDNCDDVEEDAFKSKKERSTLLVRRFCKNDREVKKSVYTGTRAIVRTLPSGHIGLTAWSYIDQKRNGPLLPCGRVMEPPSTVEIRQDGSQRLSEAQWYPIYNAVRREETENTVGSLLHFLTKLPASETAHGRISVGPCLKQCVRDTVCEYRATLQRTSISQYITGSLLEATTSLGARSGLLSTFGGSTGRMMLKERQPGPSVANSNALPSSSAGISKELIDLQPLIQFPEEVASILMEQEQTIYRRVLPVDYLCFLTRDLGTPECQSSLPCLKASISASILTTQNGEHNALEDLVMRFNEVSSWVTWLILTAGSMEEKREVFSYLVHVAKCCWNMGNYNAVMEFLAGLRSRKVLKMWQFMDQSDIETMRSLKDAMAQHESSCEYRKVVTRALHIPGCKVVPFCGVFLKELCEVLDGASGLMKLCPRYNSQEETLEFVADYSGQDNFLQRVGQNGLKNSEKESTVNSIFQVIRSCNRSLETDEEDSPSEGNSSRKSSLKDKSRWQFIIGDLLDSDNDIFEQSKEYDSHGSEDSQKAFDHGTELIPWYVLSIQADVHQFLLQGATVIHYDQDTHLSARCFLQLQPDNSTLTWVKPTTASPASSKAKLGVLNNTAEPGKFPLLGNAGLSSLTEGVLDLFAVKAVYMGHPGIDIHTVCVQNKLGSMFLSETGVTLLYGLQTTDNRLLHFVAPKHTAKMLFSGLLELTRAVRKMRKFPDQRQQWLRKQYVSLYQEDGRYEGPTLAHAVELFGGRRWSARNPSPGTSAKNAEKPNMQRNNTLGISTTKKKKKILMRGESGEVTDDEMATRKAKMHKECRSRSGSDPQDINEQEESEVNAIANPPNPLPSRRAHSLTTAGSPNLAAGTSSPIRPVSSPVLSSSNKSPSSAWSSSSWHGRIKGGMKGFQSFMVSDSNMSFVEFVELFKSFSVRSRKDLKDLFDVYAVPCNRSGSESAPLYTNLTIDENTSDLQPDLDLLTRNVSDLGLFIKSKQQLSDNQRQISDAIAAASIVTNGTGIESTSLGIFGVGILQLNDFLVNCQGEHCTYDEILSIIQKFEPSISMCHQGLMSFEGFARFLMDKENFASKNDESQENIKELQLPLSYYYIESSHNTYLTGHQLKGESSVELYSQVLLQGCRSVELDCWDGDDGMPIIYHGHTLTTKIPFKEVVEAIDRSAFINSDLPIIISIENHCSLPQQRKMAEIFKTVFGEKLVTKFLFETDFSDDPMLPSPDQLRKKVLLKNKKLKAHQTPVDILKQKAHQLASMQVQAYNGGNANPRPANNEEEEDEEDEYDYDYESLSDDNILEDRPENKSCNDKLQFEYNEEIPKRIKKADNSACNKGKVYDMELGEEFYLDQNKKESRQIAPELSDLVIYCQAVKFPGLSTLNASGSSRGKERKSRKSIFGNNPGRMSPGETASFNKTSGKSSCEGIRQTWEESSSPLNPTTSLSAIIRTPKCYHISSLNENAAKRLCRRYSQKLTQHTACQLLRTYPAATRIDSSNPNPLMFWLHGIQLVALNYQTDDLPLHLNAAMFEANGGCGYVLKPPVLWDKNCPMYQKFSPLERDLDSMDPAVYSLTIVSGQNVCPSNSMGSPCIEVDVLGMPLDSCHFRTKPIHRNTLNPMWNEQFLFHVHFEDLVFLRFAVVENNSSAVTAQRIIPLKALKRGYRHLQLRNLHNEVLEISSLFINSRRMEENSSGNTMSASSMFNTEERKCLQTHRVTVHGVPGPEPFTVFTINGGTKAKQLLQQILTNEQDIKPVTTDYFLMEEKYFISKEKNECRKQPFQRAIGPEEEIMQILSSWFPEEGYMGRIVLKTQQENLEEKNIVQDDKEVILSSEEESFFVQVHDVSPEQPRTVIKAPRVSTAQDVIQQTLCKAKYSYSILSNPNPSDYVLLEEVVKDTTNKKTTTPKSSQRVLLDQECVFQAQSKWKGAGKFILKLKEQVQASREDKKKGISFASELKKLTKSTKQPRGLTSPSQLLTSESIQTKEEKPVGGLSSSDTMDYRQ

SEQ ID NO: 57921 - protein, 1994 aa, Homo sapiens
MVSEGSAAGRDFAGMEEVRQLHVRFCKGIKIWHQAWFLCSLLGREPQEREAGCQLWLCTLSAVLKVGWLFPLSEVPNFTLLKDGCGCWRLKEDQIYNAVRREETENTVGSLLHFLTKLPASETAHGRISVGPCLKQCVRDTVCEYRATLQRTSISQYITGSLLEATTSLGARSGLLSTFGGSTGRMMLKERQPGPSVANSNALPSSSAGISKELIDLQPLIQFPEEVASILMEQEQTIYRRVLPVDYLCFLTRDLGTPECQSSLPCLKASISASILTTQNGEHNALEDLVMRFNEVSSWVTWLILTAGSMEEKREVFSYLVHVAKCCWNMGNYNAVMEFLAGLRSRKVLKMWQFMDQSDIETMRSLKDAMAQHESSCEYRKVVTRALHIPGCKVVPFCGVFLKELCEVLDGASGLMKLCPRYNSQEETLEFVADYSGQDNFLQRVGQNGLKNSEKESTVNSIFQVIRSCNRSLETDEEDSPSEGNSSRKSSLKDKSRWQFIIGDLLDSDNDIFEQSKEYDSHGSEDSQKAFDHGTELIPWYVLSIQADVHQFLLQGATVIHYDQDTHLSARCFLQLQPDNSTLTWVKPTTASPASSKAKLGVLNNTAEPGKFPLLGNAGLSSLTEGVLDLFAVKAVYMGHPGIDIHTVCVQNKLGSMFLSETGVTLLYGLQTTDNRLLHFVAPKHTAKMLFSGLLELTRAVRKMRKFPDQRQQWLRKQYVSLYQEDGRYEGPTLAHAVELFGGRRWSARNPSPGTSAKNAEKPNMQRNNTLGISTTKKKKKILMRGESGEVTDDEMATRKAKMHKECRSRSGSDPQDINEQEESEVNAIANPPNPLPSRRAHSLTTAGSPNLAAGTSSPIRPVSSPVLSSSNKSPSSAWSSSSWHGRIKGGMKGFQSFMVSDSNMSFVEFVELFKSFSVRSRKDLKDLFDVYAVPCNRSGSESAPLYTNLTIDENTSDLQPDLDLLTRNVSDLGLFIKSKQQLSDNQRQISDAIAAASIVTNGTGIESTSLGIFGVGILQLNDFLVNCQGEHCTYDEILSIIQKFEPSISMCHQGLMSFEGFARFLMDKENFASKNDESQENIKELQLPLSYYYIESSHNTYLTGHQLKGESSVELYSQVLLQGCRSVELDCWDGDDGMPIIYHGHTLTTKIPFKEVVEAIDRSAFINSDLPIIISIENHCSLPQQRKMAEIFKTVFGEKLVTKFLFETDFSDDPMLPSPDQLRKKVLLKNKKLKAHQTPVDILKQKAHQLASMQVQAYNGGNANPRPANNEEEEDEEDEYDYDYESLSDDNILEDRPENKSCNDKLQFEYNEEIPKRIKKADNSACNKGKVYDMELGEEFYLDQNKKESRQIAPELSDLVIYCQAVKFPGLSTLNASGSSRGKERKSRKSIFGNNPGRMSPGETASFNKTSGKSSCEGIRQTWEESSSPLNPTTSLSAIIRTPKCYHISSLNENAAKRLCRRYSQKLTQHTACQLLRTYPAATRIDSSNPNPLMFWLHGIQLVALNYQTDDLPLHLNAAMFEANGGCGYVLKPPVLWDKNCPMYQKFSPLERDLDSMDPAVYSLTIVSGQNVCPSNSMGSPCIEVDVLGMPLDSCHFRTKPIHRNTLNPMWNEQFLFHVHFEDLVFLRFAVVENNSSAVTAQRIIPLKALKRGYRHLQLRNLHNEVLEISSLFINSRRMEENSSGNTMSASSMFNTEERKCLQTHRVTVHGVPGPEPFTVFTINGGTKAKQLLQQILTNEQDIKPVTTDYFLMEEKYFISKEKNECRKQPFQRAIGPEEEIMQILSSWFPEEGYMGRIVLKTQQENLEEKNIVQDDKEVILSSEEESFFVQVHDVSPEQPRTVIKAPRVSTAQDVIQQTLCKAKYSYSILSNPNPSDYVLLEEVVKDTTNKKTTTPKSSQRVLLDQECVFQAQSKWKGAGKFILKLKEQVQASREDKKKGISFASELKKLTKSTKQPRGLTSPSQLLTSESIQTKEEKPVGGLSSSDTMDYRQ

SEQ ID NO: 57922 - protein, 2312 aa, Homo sapiens
MTSEEMTASVLIPVTQRKVVSAQSAADESSEKVSDINISKAHTVRRSGETSHTISQLNKLKEEPSGSNLPKILSIAREKIVSDENSNEKCWEKIMPDSAKNLNINCNNILRNHQHGLPQRQFYEMYNSVAEEDLCLETGIPSPLERKVFPGIQLELDRPSMGISPLGNQSVIIETGRAHPDSRRAVFHFHYEVDRRMSDTFCTLSENLILDDCGNCVPLPGGEEKQKKNYVAYTCKLMELAKNCDNKNEQLQCDHCDTLNDKYFCFEGSCEKVDMVYSGDSFCRKDFTDSQAAKTFLSHFEDFPDNCDDVEEDAFKSKKERSTLLVRRFCKNDREVKKSVYTGTRAIVRTLPSGHIGLTAWSYIDQKRNGPLLPCGRVMEPPSTVEIRQDGSQRLSEAQWYPIYNAVRREETENTVGSLLHFLTKLPASETAHGRISVGPCLKQCVRDTVCEYRATLQRTSISQYITGSLLEATTSLGARSGLLSTFGGSTGRMMLKERQPGPSVANSNALPSSSAGISKELIDLQPLIQFPEEVASILMEQEQTIYRRVLPVDYLCFLTRDLGTPECQSSLPCLKASISASILTTQNGEHNALEDLVMRFNEVSSWVTWLILTAGSMEEKREVFSYLVHVAKCCWNMGNYNAVMEFLAGLRSRKVLKMWQFMDQSDIETMRSLKDAMAQHESSCEYRKVVTRALHIPGCKVVPFCGVFLKELCEVLDGASGLMKLCPRYNSQEETLEFVADYSGQDNFLQRVGQNGLKNSEKESTVNSIFQVIRSCNRSLETDEEDSPSEGNSSRKSSLKDKSRWQFIIGDLLDSDNDIFEQSKEYDSHGSEDSQKAFDHGTELIPWYVLSIQADVHQFLLQGATVIHYDQDTHLSARCFLQLQPDNSTLTWVKPTTASPASSKAKLGVLNNTAEPGKFPLLGNAGLSSLTEGVLDLFAVKAVYMGHPGIDIHTVCVQNKLGSMFLSETGVTLLYGLQTTDNRLLHFVAPKHTAKMLFSGLLELTRAVRKMRKFPDQRQQWLRKQYVSLYQEDGRYEGPTLAHAVELFGGRRWSARNPSPGTSAKNAEKPNMQRNNTLGISTTKKKKKILMRGESGEVTDDEMATRKAKMHKECRSRSGSDPQDINEQEESEVNAIANPPNPLPSRRAHSLTTAGSPNLAAGTSSPIRPVSSPVLSSSNKSPSSAWSSSSWHGRIKGGMKGFQSFMVSDSNMSFVEFVELFKSFSVRSRKDLKDLFDVYAVPCNRSGSESAPLYTNLTIDENTSDLQPDLDLLTRNVSDLGLFIKSKQQLSDNQRQISDAIAAASIVTNGTGIESTSLGIFGVGILQLNDFLVNCQGEHCTYDEILSIIQKFEPSISMCHQGLMSFEGFARFLMDKENFASKNDESQENIKELQLPLSYYYIESSHNTYLTGHQLKGESSVELYSQVLLQGCRSVELDCWDGDDGMPIIYHGHTLTTKIPFKEVVEAIDRSAFINSDLPIIISIENHCSLPQQRKMAEIFKTVFGEKLVTKFLFETDFSDDPMLPSPDQLRKKVLLKNKKLKAHQTPVDILKQKAHQLASMQVQAYNGGNANPRPANNEEEEDEEDEYDYDYESLSDDNILEDRPENKSCNDKLQFEYNEEIPKRIKKADNSACNKGKVYDMELGEEFYLDQNKKESRQIAPELSDLVIYCQAVKFPGLSTLNASGSSRGKERKSRKSIFGNNPGRMSPGETASFNKTSGKSSCEGIRQTWEESSSPLNPTTSLSAIIRTPKCYHISSLNENAAKRLCRRYSQKLTQHTACQLLRTYPAATRIDSSNPNPLMFWLHGIQLVALNYQTDDLPLHLNAAMFEANGGCGYVLKPPVLWDKNCPMYQKFSPLERDLDSMDPAVYSLTIVSGQNVCPSNSMGSPCIEVDVLGMPLDSCHFRTKPIHRNTLNPMWNEQFLFHVHFEDLVFLRFAVVENNSSAVTAQRIIPLKALKRGYRHLQLRNLHNEVLEISSLFINSRRMEENSSGNTMSASSMFNTEERKCLQTHRVTVHGVPGPEPFTVFTINGGTKAKQLLQQILTNEQDIKPVTTDYFLMEEKYFISKEKNECRKQPFQRAIGPEEEIMQILSSWFPEEGYMGRIVLKTQQENLEEKNIVQDDKEVILSSEEESFFVQVHDVSPEQPRTVIKAPRVSTAQDVIQQTLCKAKYSYSILSNPNPSDYVLLEEVVKDTTNKKTTTPKSSQRVLLDQECVFQAQSKWKGAGKFILKLKEQVQASREDKKKGISFASELKKLTKSTKQPRGLTSPSQLLTSESIQTKEEKPVGGLSSSDTMDYRQVKIFKQEVKE

SEQ ID NO: 57923 - protein, 1994 aa, Homo sapiens; identical to SEQ ID NO: 57921

SEQ ID NO: 57924 - protein, 1655 aa, Homo sapiens
MSVMQSGTQMIKLKRGTKGLVRLFYLDEHRTRLRWRPSRKSEKAKILIDSIYKVTEGRQSEIFHRQAEGNFDPSCCFTIYHGNHMESLDLITSNPEEARTWITGLKYLMAGISDEDSLAKRQRTHDQWVKQTFEEADKNGDGLLNIEEIHQLMHKLNVNLPRRKVRQMFQEADTDENQGTLTFEEFCVFYKMMSLRRDLYLLLLSYSDKKDHLTVEELAQFLKVEQKMNNVTTDYCLDIIKKFEVSEENKVKNVLGIEGFTNFMRSPACDIFNPLHHEVYQDMDQPLCNYYIASSHNTYLTGDQLLSQSKVDMYARVLQEGCRCVEVDCWDGPDGEPVVHHGYTLTSKILFRDVVETINKHAFVKNEFPVILSIENHCSIQQQRKIAQYLKGIFGDKLDLSSVDTGECKQLPSPQSLKGKILVKGKKLPYHLGDDAEEGEVSDEDSADEIEDECKFKLHYSNGTTEHQVESFIRKKLESLLKESQIRDKEDPDSFTVRALLKATHEGLNAHLKQSPDVKESGKKSHGRSLMTNFGKHKKTTKSRSKSYSTDDEEDTQQSTGKEGGQLYRLGRRRKTMKLCRELSDLVVYTNSVAAQDIVDDGTTGNVLSFSETRAHQVVQQKSEQFMIYNQKQLTRIYPSAYRIDSSNFNPLPYWNAGCQLVALNYQSEGRMMQLNRAKFKANGNCGYVLKPQQMCKGTFNPFSGDPLPANPKKQLILKVISGQQLPKPPDSMFGDRGEIIDPFVEVEIIGLPVDCCKDQTRVVDDNGFNPVWEETLTFTVHMPEIALVRFLVWDHDPIGRDFVGQRTVTFSSLVPGYRHVYLEGLTEASIFVHITINEIYGKNRQLQGLKGLFNKNPRHSSSENNSHYVRKRSIGDRILRRTASAPAKGRKKSKMGFQEMVEIKDSVSEATRDQDGVLRRTTRSLQARPVSMPVDRNLLGALSLPVSETAKDIEGKENSLAEDKDGRRKGKASIKDPHFLNFNKKLSSSSSALLHKDTSQGDTIVSTAHMSVTGEQLGMSSPRGGRTTSNATSNCQENPCPSKSLSPKQHLAPDPVVNPTQDLHGVKIKEKGNPEDFVEGKSILSGSVLSHSNLEIKNLEGNRGKGRAATSFSLSDVSMLCSDIPDLHSTAILQESVISHLIDNVTLTNENEPGSSISALIGQFDETNNQALTVVSHLHNTSVMSGHCPLPSLGLKMPIKHGFCKGKSKSSFLCSSPELIALSSSETTKHATNTVYETTCTPISKTKPDDDLSSKAKTAALESNLPGSPNTSRGWLPKSPTKGEDWETLKSCSPASSPDLTLEDVIADPTLCFNSGESSLVEIDGESENLSLTTCEYRREGTSQLASPLKLKYNQGVVEHFQRGLRNGYCKETLRPSVPEIFNNIQDVKTQSISYLAYQGAGFVHNHFSDSDAKMFQTCVPQQSSAQDMHVPVPKQLAHLPLPALKLPSPCKSKSLGDLTSEDIACNFESKYQCISKSFVTTGIRDKKGVTVKTKSLEPIDALTEQLRKLVSFDQEDNCQVLYSKQDANQLPRALVRKLSSRSQSRVRNIASRAKEKQEANKQKVPNPSNGAGVVLRNKPSAPTPAVNRHSTGSYIAGYLKNTKGGGLEGRGIPEGACTALHYGHVDQFCSDNSVLQTEPSSDDKPEIYFLLRL

SEQ ID NO: 57925 - protein, 1693 aa, Homo sapiens
MADLEVYKNLSPEKVERCMSVMQSGTQMIKLKRGTKGLVRLFYLDEHRTRLRWRPSRKSEKAKILIDSIYKVTEGRQSEIFHRQAEGNFDPSCCFTIYHGNHMESLDLITSNPEEARTWITGLKYLMAGISDEDSLAKRQRTHDQWVKQTFEEADKNGDGLLNIEEIHQLMHKLNVNLPRRKVRQMFQEADTDENQGTLTFEEFCVFYKMMSLRRDLYLLLLSYSDKKDHLTVEELAQFLKVEQKMNNVTTDYCLDIIKKFEVSEENKVKNVLGIEGFTNFMRSPACDIFNPLHHEVYQDMDQPLCNYYIASSHNTYLTGDQLLSQSKVDMYARVLQEGCRCVEVDCWDGPDGEPVVHHGYTLTSKILFRDVVETINKHAFVKNEFPVILSIENHCSIQQQRKIAQYLKGIFGDKLDLSSVDTGECKQLPSPQSLKGKILVKGKKLPYHLGDDAEEGEVSDEDSADEIEDECKFKLHYSNGTTEHQVESFIRKKLESLLKESQIRDKEDPDSFTVRALLKATHEGLNAHLKQSPDVKESGKKSHGRSLMTNFGKHKKTTKSRSKSYSTDDEEDTQQSTGKEGGQLYRLGRRRKTMKLCRELSDLVVYTNSVAAQDIVDDGTTGNVLSFSETRAHQVVQQKSEQFMIYNQKQLTRIYPSAYRIDSSNFNPLPYWNAGCQLVALNYQSEGRMMQLNRAKFKANGNCGYVLKPQQMCKGTFNPFSGDPLPANPKKQLILKVISGQQLPKPPDSMFGDRGEIIDPFVEVEIIGLPVDCCKDQTRVVDDNGFNPVWEETLTFTVHMPEIALVRFLVWDHDPIGRDFVGQRTVTFSSLVPGYRHVYLEGLTEASIFVHITINEIYGKWSPLILNPSYTILHFLGATKNRQLQGLKGLFNKNPRHSSSENNSHYVRKRSIGDRILRRTASAPAKGRKKSKMGFQEMVEIKDSVSEATRDQDGVLRRTTRSLQARPVSMPVDRNLLGALSLPVSETAKDIEGKENSLAEDKDGRRKGKASIKDPHFLNFNKKLSSSSSALLHKDTSQGDTIVSTAHMSVTGEQLGMSSPRGGRTTSNATSNCQENPCPSKSLSPKQHLAPDPVVNPTQDLHGVKIKEKGNPEDFVEGKSILSGSVLSHSNLEIKNLEGNRGKGRAATSFSLSDVSMLCSDIPDLHSTAILQESVISHLIDNVTLTNENEPGSSISALIGQFDETNNQALTVVSHLHNTSVMSGHCPLPSLGLKMPIKHGFCKGKSKSSFLCSSPELIALSSSETTKHATNTVYETTCTPISKTKPDDDLSSKAKTAALESNLPGSPNTSRGWLPKSPTKGEDWETLKSCSPASSPDLTLEDVIADPTLCFNSGESSLVEIDGESENLSLTTCEYRREGTSQLASPLKLKYNQGVVEHFQRGLRNGYCKETLRPSVPEIFNNIQDVKTQSISYLAYQGAGFVHNHFSDSDAKMFQTCVPQQSSAQDMHVPVPKQLAHLPLPALKLPSPCKSKSLGDLTSEDIACNFESKYQCISKSFVTTGIRDKKGVTVKTKSLEPIDALTEQLRKLVSFDQEDNCQVLYSKQDANQLPRALVRKLSSRSQSRVRNIASRAKEKQEANKQKVPNPSNGAGVVLRNKPSAPTPAVNRHSTGSYIAGYLKNTKGGGLEGRGIPEGACTALHYGHVDQFCSDNSVLQTEPSSDDKPEIYFLLRL

SEQ ID NO: 57926 - protein, 1655 aa, Homo sapiens; identical to SEQ ID NO: 57924

SEQ ID NO: 57927 - protein, 1002 aa, Homo sapiens
MADLEVYKNLSPEKVERCMSVMQSGTQMIKLKRGTKGLVRLFYLDEHRTRLRWRPSRKSEKAKILIDSIYKVTEGRQSEIFHRQAEGNFDPSCCFTIYHGNHMESLDLITSNPEEARTWITGLKYLMAGISDEDSLAKRQRTHDQWVKQTFEEADKNGDGLLNIEEIHQLMHKLNVNLPRRKVRQMFQEADTDENQGTLTFEEFCVFYKMMSLRRDLYLLLLSYSDKKDHLTVEELAQFLKVEQKMNNVTTDYCLDIIKKFEVSEENKVKNVLGIEGFTNFMRSPACDIFNPLHHEVYQDMDQPLCNYYIASSHNTYLTGDQLLSQSKVDMYARVLQEGCRCVEVDCWDGPDGEPVVHHGYTLTSKILFRDVVETINKHAFVKNEFPVILSIENHCSIQQQRKIAQYLKGIFGDKLDLSSVDTGECKQLPSPQSLKGKILVKGKKLPYHLGDDAEEGEVSDEDSADEIEDECKFKLHYSNGTTEHQVESFIRKKLESLLKESQIRDKEDPDSFTVRALLKATHEGLNAHLKQSPDVKESGKKSHGRSLMTNFGKHKKTTKSRSKSYSTDDEEDTQQSTGKEGGQLYRLGRRRKTMKLCRELSDLVVYTNSVAAQDIVDDGTTGNVLSFSETRAHQVVQQKSEQFMIYNQKQLTRIYPSAYRIDSSNFNPLPYWNAGCQLVALNYQSEGRMMQLNRAKFKANGNCGYVLKPQQMCKGTFNPFSGDPLPANPKKQLILKVISGQQLPKPPDSMFGDRGEIIDPFVEVEIIGLPVDCCKDQTRVVDDNGFNPVWEETLTFTVHMPEIALVRFLVWDHDPIGRDFVGQRTVTFSSLVPGYRHVYLEGLTEASIFVHITINEIYGKWSPLILNPSYTILHFLGATKNRQLQGLKGLFNKNPRHSSSENNSHYVRKRSIGDRILRRTASAPAKGRKKSKMGFQEMVEIKDSVSEATRDQDGVLRRTTRSLQARPVSMPVDRNLLGALSLPVSETAKDIEGKENSLVQI

SEQ ID NO: 57928 - protein, 1655 aa, Homo sapiens; identical to SEQ ID NO: 57924

SEQ ID NO: 57929 - protein, 1014 aa, Homo sapiens
MADLEVYKNLSPEKVERCMSVMQSGTQMIKLKRGTKGLVRLFYLDEHRTRLRWRPSRKSEKAKILIDSIYKVTEGRQSEIFHRQAEGNFDPSCCFTIYHGNHMESLDLITSNPEEARTWITGLKYLMAGISDEDSLAKRQRTHDQWVKQTFEEADKNGDGLLNIEEIHQLMHKLNVNLPRRKVRQMFQEADTDENQGTLTFEEFCVFYKMMSLRRDLYLLLLSYSDKKDHLTVEELAQFLKVEQKMNNVTTDYCLDIIKKFEVSEENKVKNVLGIEGFTNFMRSPACDIFNPLHHEVYQDMDQPLCNYYIASSHNTYLTGDQLLSQSKVDMYARVLQEGCRCVEVDCWDGPDGEPVVHHGYTLTSKILFRDVVETINKHAFVKNEFPVILSIENHCSIQQQRKIAQYLKGIFGDKLDLSSVDTGECKQLPSPQSLKGKILVKGKKLPYHLGDDAEEGEVSDEDSADEIEDECKFKLHYSNGTTEHQVESFIRKKLESLLKESQIRDKEDPDSFTVRALLKATHEGLNAHLKQSPDVKESGKKSHGRSLMTNFGKHKKTTKSRSKSYSTDDEEDTQQSTGKEGGQLYRLGRRRKTMKLCRELSDLVVYTNSVAAQDIVDDGTTGNVLSFSETRAHQVVQQKSEQFMIYNQKQLTRIYPSAYRIDSSNFNPLPYWNAGCQLVALNYQSEGRMMQLNRAKFKANGNCGYVLKPQQMCKGTFNPFSGDPLPANPKKQLILKVISGQQLPKPPDSMFGDRGEIIDPFVEVEIIGLPVDCCKDQTRVVDDNGFNPVWEETLTFTVHMPEIALVRFLVWDHDPIGRDFVGQRTVTFSSLVPGYRHVYLEGLTEASIFVHITINEIYGKNRQLQGLKGLFNKNPRHSSSENNSHYVRKRSIGDRILRRTASAPAKGRKKSKMGFQEMVEIKDSVSEATRDQDGVLRRTTRSLQARPVSMPVDRNLLGALSLPVSETAKDIEGKENSLDSSFCRPTEQAKAEMCKVPFPRQLECVMKMEISET

SEQ ID NO: 57930 - protein, 1168 aa, Homo sapiens
MFREADTDDHQGTLGFEEFCAFYKMMSTRRDLYLLMLTYSNHKDHLDAASLQRFLQVEQKMAGVTLESCQDIIEQFEPCPENKSKGLLGIDGFTNYTRSPAGDIFNPEHHHVHQDMTQPLSHYFITSSHNTYLVGDQLMSQSRVDMYAWVLQAGCRCVEVDCWDGPDGEPIVHHGYTLTSKILFKDVIETINKYAFIKNEYPVILSIENHCSVIQQKKMAQYLTDILGDKLDLSSVSSEDATTLPSPQMLKGKILVKGKKLPANISEDAEEGEVSDEDSADEIDDDCKLLNGDASTNRKRVENTAKRKLDSLIKESKIRDCEDPNNFSVSTLSPSGKLGRKSKAEEDVESGEDAGASRRNGRLVVGSFSRRKKKGSKLKKAASVEEGDEGQDSPGGQSRGATRQKKTMKLSRALSDLVKYTKSVATHDIEMEAASSWQVSSFSETKAHQILQQKPAQYLRFNQQQLSRIYPSSYRVDSSNYNPQPFWNAGCQMGVFNPNSEDPLPGQLKKQLVLRIISGQQLPKPRDSMLGDRGEIIDPFVEVEIIGLPVDCSREQTRVVDDNGFNPTWEETLVFMVHMPEIALVRFLVWDHDPIGRDFIGQRTLAFSSMMPGYRHVYLEGMEEASIFVHVAVSDISGKVKQALGLKGLFLRGPKPGSLDSHAAGRPPARPSVSQRILRRTASAPTKSQKPGRRGFPELVLGTRDTGSKGVADDVVPPGPGPAPEAPAQEGPGSGSPRDTRPLSTQRPLPPLCSLETIAEEPAPGPGPPPPAAVPTSSSQGRPPYPTGPGANVASPLEDTEEPRDSRPRPCNGEGAGGAYERAPGSQTDGRSQPRTLGHLPVIRRVKSEGQVPTEPLGGWRPLAAPFPAPAVYSDATGSDPLWQRLEPCGHRDSVSSSSSMSSSDTVIDLSLPSLGLGRSRENLAGAHMGRLPPRPHSASAARPDLPPVTKSKSNPNLRATGQRPPIPDELQPRSLAPRMAGLPFRPPWGCLSLVGVQDCPVAAKSKSLGDLTADDFAPSFEGGSRRLSHSLGLPGGTRRVSGPGVRRDTLTEQLRWLTVFQQAGDITSPTSLGPAGEGVAGGPGFVRRSSSRSHSRVRAIASRARQAQERQQRLQGLGRQGPPEEERGTPEGACSVGHEGSVDAPAPSKGALGPASAAAENLVLLRL

SEQ ID NO: 57931 - protein, 499 aa, Homo sapiens
MGAMQEGMQMVKLRGGSKGLVRFYYLDEHRSCIRWRPSRKNEKAKISIDSIQEVSEGRQSEVFQRYPDGSFIIDPFVEVEIIGLPVDCSREQTRVVDDNGFNPTWEETLVFMVHMPEIALVRFLVWDHDPIGRDFIGQRTLAFSSMMPGYRHVYLEGMEEASIFVHVAVSDISGKVKQALGLKGLFLRGPKPGSLDSHAAGRPPARPSVSQRILRRTASAPTKSQKPGRRGFPELVLGTRDTGSKGVADDVVPPGPGPAPEAPAQEGPGSGSPRGKAPAAVAEKSPVRVRPPRVLDGPGPAGMAATCMKCVVGSCAGVNTGGLQRERPPSPGPASRQAAIRQQPRARADSLGAPCCGLDPHAIPGRSREAPKGPGAWRQGPGGSGSMSSDSSSPDSPGIPERSPRWPEGACRQPGALQGEMSALFAQKLEEIRSKSPMFSAGKPLLPCVVLPHAPGMAGPGSPAAASAWTVSPRVLVLVALYPWHCLRGTLLPWLACGP

SEQ ID NO: 57932 - protein, 1058 aa, Homo sapiens
MAGISDEDSLARRQRTRDQWLKQTFDEADKNGDGSLSIGEVLQLLHKLNVNLPRQRVKQMFREADTDDHQGTLGFEEFCAFYKMMSTRRDLYLLMLTYSNHKDHLDAASLQRFLQVEQKMAGVTLESCQDIIEQFEPCPENKSKGLLGIDGFTNYTRSPAGDIFNPEHHHVHQDMTQPLSHYFITSSHNTYLVGDQLMSQSRVDMYAWVLQAGCRCVEVDCWDGPDGEPIVHHGYTLTSKILFKDVIETINKYAFIKNEYPVILSIENHCSVIQQKKMAQYLTDILGDKLDLSSVSSEDATTLPSPQMLKGKILVKGKKLPANISEDAEEGEVSDEDSADEIDDDCKLLNGDASTNRKRVENTAKRKLDSLIKESKIRDCEDPNNFSVSTLSPSGKLGRKSKAEEDVESGEDAGASRRNGRLVVGSFSRRKKKGSKLKKAASVEEGDEGQDSPGGQSRGATRQKKTMKLSRALSDLVKYTKSVATHDIEMEAASSWQVSSFSETKAHQILQQKPAQYLRFNQQQLSRIYPSSYRVDSSNYNPQPFWNAGCQMVALNYQSEGRMLQLNRAKFSANGGCGYVLKPGCMCQGVFNPNSEDPLPGQLKKQLVLRIISGQQLPKPRDSMLGDRGEIIDPFVEVEIIGLPVDCSREQTRVVDDNGFNPTWEETLVFMVHMPEIALVRFLVWDHDPIGRDFIGQRTLAFSSMMPGYRHVYLEGMEEASIFVHVAVSDISGKVKQALGLKGLFLRGPKPGSLDSHAAGRPPARPSVSQRILRRTASAPTKSQKPGRRGFPELVLGTRDTGSKGVADDVVPPGPGPAPEAPAQEGPGSGSPRGKAPAAVAEKSPVRVRPPRVLDGPGPAGMAATCMKCVVGSCAGVNTGGLQRERPPSPGPASRQAAIRQQPRARADSLGAPCCGLDPHAIPGRSREAPKGPGAWRQGPGGSGSMSSDSSSPDSPGIPERSPRWPEGACRQPGALQGEMSALFAQKLEEIRSKSPMFSAGKPLLPCVVLPHAPGMAGPGSPAAASAWTVSPRVLVLVALYPWHCLRGTLLPWLACGP

SEQ ID NO: 57933 - protein, 497 aa, Homo sapiens
MGAMQEGMQMVKLRGGSKGLVRFYYLDEHRSCIRWRPSRKNEKAKISIDSIQEVSEGRQSEVFQRYPDGSFDPFVEVEIIGLPVDCSREQTRVVDDNGFNPTWEETLVFMVHMPEIALVRFLVWDHDPIGRDFIGQRTLAFSSMMPGYRHVYLEGMEEASIFVHVAVSDISGKVKQALGLKGLFLRGPKPGSLDSHAAGRPPARPSVSQRILRRTASAPTKSQKPGRRGFPELVLGTRDTGSKGVADDVVPPGPGPAPEAPAQEGPGSGSPRGKAPAAVAEKSPVRVRPPRVLDGPGPAGMAATCMKCVVGSCAGVNTGGLQRERPPSPGPASRQAAIRQQPRARADSLGAPCCGLDPHAIPGRSREAPKGPGAWRQGPGGSGSMSSDSSSPDSPGIPERSPRWPEGACRQPGALQGEMSALFAQKLEEIRSKSPMFSAGKPLLPCVVLPHAPGMAGPGSPAAASAWTVSPRVLVLVALYPWHCLRGTLLPWLACGP

SEQ ID NO: 57934 - protein, 1416 aa, Homo sapiens
MSGPWPSPDSRTKGTVAWLAEVLLWVGGSVVLSSEWQLGPLVERCMGAMQEGMQMVKLRGGSKGLVRFYYLDEHRSCIRWRPSRKNEKAKISIDSIQEVSEGRQSEVFQRYPDGSFDPNCCFSIYHGSHRESLDLVSTSSEVARTWVTGLRYLMAGISDEDSLARRQRTRDQWLKQTFDEADKNGDGSLSIGEVLQLLHKLNVNLPRQRVKQMFREADTDDHQGTLGFEEFCAFYKMMSTRRDLYLLMLTYSNHKDHLDAASLQRFLQVEQKMAGVTLESCQDIIEQFEPCPENKSKGLLGIDGFTNYTRSPAGDIFNPEHHHVHQDMTQPLSHYFITSSHNTYLVGDQLMSQSRVDMYAWVLQAGCRCVEVDCWDGPDGEPIVHHGYTLTSKILFKDVIETINKYAFIKNEYPVILSIENHCSVIQQKKMAQYLTDILGDKLDLSSVSSEDATTLPSPQMLKGKILVKGKKLPANISEDAEEGEVSDEDSADEIDDDCKLLNGDASTNRKRVENTAKRKLDSLIKESKIRDCEDPNNFSVSTLSPSGKLGRKSKAEEDVESGEDAGASRRNGRLVVGSFSRRKKKGSKLKKAASVEEGDEGQDSPGGQSRGATRQKKTMKLSRALSDLVKYTKSVATHDIEMEAASSWQVSSFSETKAHQILQQKPAQYLRFNQQQLSRIYPSSYRVDSSNYNPQPFWNAGCQMVALNYQSEGRMLQLNRAKFSANGGCGYVLKPGCMCQGVFNPNSEDPLPGQLKKQLVLRIISGQQLPKPRDSMLGDRGEIIDPFVEVEIIGLPVDCSREQTRVVDDNGFNPTWEETLVFMVHMPEIALVRFLVWDHDPIGRDFIGQRTLAFSSMMPGYRHVYLEGMEEASIFVHVAVSDISGKVKQALGLKGLFLRGPKPGSLDSHAAGRPPARPSVSQRILRRTASAPTKSQKPGRRGFPELVLGTRDTGSKGVADDVVPPGPGPAPEAPAQEGPGSGSPRDTRPLSTQRPLPPLCSLETIAEEPAPGPGPPPPAAVPTSSSQGRPPYPTGPGANVASPLEDTEEPRDSRPRPCNGEGAGGAYERAPGSQTDGRSQPRTLGHLPVIRRVKSEGQVPTEPLGGWRPLAAPFPAPAVYSDATGSDPLWQRLEPCGHRDSVSSSSSMSSSDTVIDLSLPSLGLGRSRENLAGAHMGRLPPRPHSASAARPDLPPVTKSKSNPNLRATGQRPPIPDELQPRSLAPRMAGLPFRPPWGCLSLVGVQDCPVAAKSKSLGDLTADDFAPSFEGGSRRLSHSLGLPGGTRRVSGPGVRRDTLTEQLRWLTVFQQAGDITSPTSLGPAGEGVAGGPGFVRRSSSRSHSRVRAIASRARQAQERQQRLQGLGRQGPPEEERGTPEGACSVGHEGSVDAPAPSKGALGPASAAAENLVLLRL

SEQ ID NO: 57935 - protein, 1380 aa, Homo sapiens
MSGPWPSPDSRTKGTVAWLAEVLLWVGGSVVLSSEWQLGPLVERCMGAMQEGMQMVKLRGGSKGLVRFYYLDEHRSCIRWRPSRKNEKAKISIDSIQEVSEGRQSEVFQRYPDGSFDPNCCFSIYHGSHRESLDLVSTSSEVARTWVTGLRYLMAGISDEDSLARRQRTRDQWLKQTFDEADKNGDGSLSIGEVLQLLHKLNVNLPRQRVKQMFREADTDDHQGTLGFEEFCAFYKMMSTRRDLYLLMLTYSNHKDHLDAASLQRFLQVEQKMAGVTLESCQDIIEQFEPCPENKSKGLLGIDGFTNYTRSPAGDIFNPEHHHVHQDMTQPLSHYFITSSHNTYLVGDQLMSQSRVDMYAWVLQAGCRCVEVDCWDGPDGEPIVHHGYTLTSKILFKDVIETINKYAFIKNEYPVILSIENHCSVIQQKKMAQYLTDILGDKLDLSSVSSEDATTLPSPQMLKGKILVKGKKLPANISEDAEEGEVSDEDSADEIDDDCKLLNGDASTNRKRVENTAKRKLDSLIKESKIRDCEDPNNFSVSTLSPSGKLGRKSKAEEDVESGEDAGASRRNGRLVVGSFSRRKKKGSKLKKAASVEEGDEGQDSPGGQSRGATRQKKTMKLSRALSDLVKYTKSVATHDIEMEAASSWQVSSFSETKAHQILQQKPAQYLRFNQQQLSRIYPSSYRVDSSNYNPQPFWNAGCQMGVFNPNSEDPLPGQLKKQLVLRIISGQQLPKPRDSMLGDRGEIIDPFVEVEIIGLPVDCSREQTRVVDDNGFNPTWEETLVFMVHMPEIALVRFLVWDHDPIGRDFIGQRTLAFSSMMPGYRHVYLEGMEEASIFVHVAVSDISGKVKQALGLKGLFLRGPKPGSLDSHAAGRPPARPSVSQRILRRTASAPTKSQKPGRRGFPELVLGTRDTGSKGVADDVVPPGPGPAPEAPAQEGPGSGSPRDTRPLSTQRPLPPLCSLETIAEEPAPGPGPPPPAAVPTSSSQGRPPYPTGPGANVASPLEDTEEPRDSRPRPCNGEGAGGAYERAPGSQTDGRSQPRTLGHLPVIRRVKSEGQVPTEPLGGWRPLAAPFPAPAVYSDATGSDPLWQRLEPCGHRDSVSSSSSMSSSDTVIDLSLPSLGLGRSRENLAGAHMGRLPPRPHSASAARPDLPPVTKSKSNPNLRATGQRPPIPDELQPRSLAPRMAGLPFRPPWGCLSLVGVQDCPVAAKSKSLGDLTADDFAPSFEGGSRRLSHSLGLPGGTRRVSGPGVRRDTLTEQLRWLTVFQQAGDITSPTSLGPAGEGVAGGPGFVRRSSSRSHSRVRAIASRARQAQERQQRLQGLGRQGPPEEERGTPEGACSVGHEGSVDAPAPSKGALGPASAAAENLVLLRL

SEQ ID NO: 57936 - protein, 711 aa, Homo sapiens
  VARIANT 1: note = MOD_RES - Any amino acid
XALNYQSEGRMLQLNRAKFSANGGCGYVLKPGCMCQGVFNPNSEDPLPGQLKKQLVLRIISGQQLPKPRDSMLGDRGEIIDPFVEVEIIGLPVDCSREQTRVVDDNGFNPTWEETLVFMVHMPEIALVRFLVWDHDPIGRDFIGQRTLAFSSMMPGYRHVYLEGMEEASIFVHVAVSDISGKVKQALGLKGLFLRGPKPGSLDSHAAGRPPARPSVSQRILRRTASAPTKSQKPGRRGFPELVLGTRDTGSKGVADDVVPPGPGPAPEAPAQEGPGSGSPRDTRPLSTQRPLPPLCSLETIAEEPAPGPGPPPPAAVPTSSSQGRPPYPTGPGANVASPLEDTEEPRDSRPRPCNGEGAGGAYERAPGSQTDGRSQPRTLGHLPVIRRVKSEGQVPTEPLGGWRPLAAPFPAPAVYSDATGSDPLWQRLEPCGHRDSVSSSSSMSSSDTVIDLSLPSLGLGRSRENLAGAHMGRLPPRPHSASAARPDLPPVTKSKSNPNLRATGQRPPIPDELQPRSLAPRMAGLPFRPPWGCLSLVGVQDCPVAAKSKSLGDLTADDFAPSFEGGSRRLSHSLGLPGGTRRVSGPGVRRDTLTEQLRWLTVFQQAGDITSPTSLGPAGEGVAGGPGFVRRSSSRSHSRVRAIASRARQAQERQQRLQGLGRQGPPEEERGTPEGACSVGHEGSVDAPAPSKGALGPASAAAENLVLLRL

SEQ ID NO: 57937 - protein, 1129 aa, Homo sapiens
MEEPGPPGGLSQDQVERCMGAMQEGMQMVKLRGGSKGLVRFYYLDEHRSCIRWRPSRKNEKAKISIDSIQEVSEGRQSEVFQRYPDGSFDPNCCFSIYHGSHRESLDLVSTSSEVARTWVTGLRYLMAGISDEDSLARRQRTRDQWLKQTFDEADKNGDGSLSIGEVLQLLHKLNVNLPRQRVKQMFREADTDDHQGTLGFEEFCAFYKMMSTRRDLYLLMLTYSNHKDHLDAASLQRFLQVEQKMAGVTLESCQDIIEQFEPCPENKSKGLLGIDGFTNYTRSPAGDIFNPEHHHVHQDMTQPLSHYFITSSHNTYLVGDQLMSQSRVDMYAWVLQAGCRCVEVDCWDGPDGEPIVHHGYTLTSKILFKDVIETINKYAFIKNEYPVILSIENHCSVIQQKKMAQYLTDILGDKLDLSSVSSEDATTLPSPQMLKGKILVKGKKLPANISEDAEEGEVSDEDSADEIDDDCKLLNGDASTNRKRVENTAKRKLDSLIKESKIRDCEDPNNFSVSTLSPSGKLGRKSKAEEDVESGEDAGASRRNGRLVVGSFSRRKKKGSKLKKAASVEEGDEGQDSPGGQSRGATRQKKTMKLSRALSDLVKYTKSVATHDIEMEAASSWQVSSFSETKAHQILQQKPAQYLRFNQQQLSRIYPSSYRVDSSNYNPQPFWNAGCQMVALNYQSEGRMLQLNRAKFSANGGCGYVLKPGCMCQGVFNPNSEDPLPGQLKKQLVLRIISGQQLPKPRDSMLGDRGEIIDPFVEVEIIGLPVDCSREQTRVVDDNGFNPTWEETLVFMVHMPEIALVRFLVWDHDPIGRDFIGQRTLAFSSMMPGYRHVYLEGMEEASIFVHVAVSDISGKVKQALGLKGLFLRGPKPGSLDSHAAGRPPARPSVSQRILRRTASAPTKSQKPGRRGFPELVLGTRDTGSKGVADDVVPPGPGPAPEAPAQEGPGSGSPRGKAPAAVAEKSPVRVRPPRVLDGPGPAGMAATCMKCVVGSCAGVNTGGLQRERPPSPGPASRQAAIRQQPRARADSLGAPCCGLDPHAIPGRSREAPKGPGAWRQGPGGSGSMSSDSSSPDSPGIPERSPRWPEGACRQPGALQGEMSALFAQKLEEIRSKSPMFSAVRN

SEQ ID NO: 57938 - protein, 608 aa, Homo sapiens
MEMRWFLSKIQDDFRGGKINLEKTQRLLEKLDIRCSYIHVKQIFKDNDRLKQGRITIEEFRAIYRIITHREEIIEIFNTYSENRKILLASNLAQFLTQEQYAAEMSKAIAFEIIQKYEPIEEVRKAHQMSLEGFTRYMDSRECLLFKNECRKVYQDMTHPLNDYFISSSHNTYLVSDQLLGPSDLWGYVSALVKGCRCLEIDCWDGAQNEPVVYHGYTLTSKLLFKTVIQAIHKYAFMTSDYPVVLSLENHCSTAQQEVMADNLQATFGESLLSDMLDDFPDTLPSPEALKFKILVKNKKIGTLKETHERKGSDKRGDNQDKETGVKKLPGVMLFKKKKTRKLKIALALSDLVIYTKAEKFKSFQHSRLYQQFNENNSIGETQARKLSKLRVHEFIFHTRKFITRIYPKATRADSSNFNPQEFWNIGCQMVALNFQTPGLPMDLQNGKFLDNGGSGYILKPHFLRESKSYFNPSNIKEGMPITLTIRLISGIQLPLTHSSSNKGDSLVIIEVFGVPNDQMKQQTRVIKKNAFSPRWNETFTFIIHVPELALIRFVVEGQGLIAGNEFLGQYTLPLLCMNKGYRRIPLFSRMGESLEPASLFVYVWYVR

SEQ ID NO: 57939 - protein, 413 aa, Homo sapiens
MRWFLSKIQDDFRGGKINLEKTQRLLEKLDIRCSYIHVKQIFKTSDYPVVLSLENHCSTAQQEVMADNLQATFGESLLSDMLDDFPDTLPSPEALKFKILVKNKKIGTLKETHERKGSDKRGDNQDKETGVKKLPGVMLFKKKKTRKLKIALALSDLVIYTKAEKFKSFQHSRLYQQFNENNSIGETQARKLSKLRVHEFIFHTRKFITRIYPKATRADSSNFNPQEFWNIGCQMVALNFQTPGLPMDLQNGKFLDNGGSGYILKPHFLRESKSYFNPSNIKEGMPITLTIRLISGIQLPLTHSSSNKGDSLVIIEVFGVPNDQMKQQTRVIKKNAFSPRWNETFTFIIHVPELALIRFVVEGQGLIAGNEFLGQYTLPLLCMNKGYRRIPLFSRMGESLEPASLFVYVWYVR

SEQ ID NO: 57940 - protein, 606 aa, Homo sapiens
MRWFLSKIQDDFRGGKINLEKTQRLLEKLDIRCSYIHVKQIFKDNDRLKQGRITIEEFRAIYRIITHREEIIEIFNTYSENRKILLASNLAQFLTQEQYAAEMSKAIAFEIIQKYEPIEEVRKAHQMSLEGFTRYMDSRECLLFKNECRKVYQDMTHPLNDYFISSSHNTYLVSDQLLGPSDLWGYVSALVKGCRCLEIDCWDGAQNEPVVYHGYTLTSKLLFKTVIQAIHKYAFMTSDYPVVLSLENHCSTAQQEVMADNLQATFGESLLSDMLDDFPDTLPSPEALKFKILVKNKKIGTLKETHERKGSDKRGDNQDKETGVKKLPGVMLFKKKKTRKLKIALALSDLVIYTKAEKFKSFQHSRLYQQFNENNSIGETQARKLSKLRVHEFIFHTRKFITRIYPKATRADSSNFNPQEFWNIGCQMVALNFQTPGLPMDLQNGKFLDNGGSGYILKPHFLRESKSYFNPSNIKEGMPITLTIRLISGIQLPLTHSSSNKGDSLVIIEVFGVPNDQMKQQTRVIKKNAFSPRWNETFTFIIHVPELALIRFVVEGQGLIAGNEFLGQYTLPLLCMNKGYRRIPLFSRMGESLEPASLFVYVWYVR

SEQ ID NO: 57941 - protein, 415 aa, Homo sapiens
MEMRWFLSKIQDDFRGGKINLEKTQRLLEKLDIRCSYIHVKQIFKTSDYPVVLSLENHCSTAQQEVMADNLQATFGESLLSDMLDDFPDTLPSPEALKFKILVKNKKIGTLKETHERKGSDKRGDNQDKETGVKKLPGVMLFKKKKTRKLKIALALSDLVIYTKAEKFKSFQHSRLYQQFNENNSIGETQARKLSKLRVHEFIFHTRKFITRIYPKATRADSSNFNPQEFWNIGCQMVALNFQTPGLPMDLQNGKFLDNGGSGYILKPHFLRESKSYFNPSNIKEGMPITLTIRLISGIQLPLTHSSSNKGDSLVIIEVFGVPNDQMKQQTRVIKKNAFSPRWNETFTFIIHVPELALIRFVVEGQGLIAGNEFLGQYTLPLLCMNKGYRRIPLFSRMGESLEPASLFVYVWYVR

SEQ ID NO: 57942 - protein, 403 aa, Homo sapiens
MDSRECLLFKNECRKVYQDMTHPLNDYFISSSHNTYLVSDQLLGPSDLWGYVSALVKGCRCLEIDCWDGAQNEPVVYHGYTLTSKLLFKTVIQAIHKYAFMTSDYPVVLSLENHCSTAQQEVMADNLQATFGESLLSDMLDDFPDTLPSPEALKFKILVKNKKIGTLKETHERKGSDKRGDNQDKETGVKKLPGVMLFKKKKTRKLKIALALSDLVIYTKAEKFKSFQHSRLYQQFNENNSIGETQARKLSKLRVHEFIFHTRKFITRIYPKATRADSSNFNPQEFWNIGCQMVALNFQTPGLPMDLQNGKFLDNGGSGYILKPHFLRESKSYFNPSNIKEGMPITLTIRLISGIQLPLTHSSSNKGDSLVIIEVFGVPNDQMKQQTRVIKKNGQGNMVIIPA

SEQ ID NO: 57943 - protein, 1128 aa, Homo sapiens
MADCVRGWAAVGGALPTSPGPSLGAKGALKAGVGEDGVGGGRLVHGRARYDSGGVSNGDCSLGVSGDEARASPTRGPRGVALAPTPSAVVCTLPRESKPGGLPRRSSIIKDGTKQKRERKKTVSFSSMPTEKKISSASDCINSMVEGSELKKVRSNSRIYHRYFLLDADMQSLRWEPSKKDSEKAKIDIKSIKEVRTGKNTDIFRSNGISDQISEDCAFSVIYGENYESLDLVANSADVANIWVTGLRYLISYGKHTLDMLESSQDNMRTSWVSQMFSEIDVDNLGHITLCNAVQCIRNLNPGLKTSKIELKFKELHKSKDKAGTEVTKEEFIEVFHELCTRPEIYFLLVQFSSNKEFLDTKDLMMFLEAEQGVAHINEEISLEIIHKYEPSKEGQEKGWLSIDGFTNYLMSPDCYIFDPEHKKVCQDMKQPLSHYFINSSHNTYLIEDQFRGPSDITGYIRALKMGCRSVELDVWDGPDNEPVIYTGHTMTSQIVFRSVIDIINKYAFFASEYPLILCLENHCSIKQQKVMVQHMKKLLGDKLYTTSPNVEESYLPSPDVLKGKILIKAKKLSSNCSGVEGDVTDEDEGAEMSQRMGKENMEQPNNVPVKRFQLCKELSELVSICKSVQFKEFQVSFQVQKYWEVCSFNEVLASKYANENPGDFVNYNKRFLARVFPSPMRIDSSNMNPQDFWKCGCQIVAMNFQTPGLMMDLNIGWFRQNGNCGYVLRPAIMREEVSFFSANTKDSVPGVSPQLLHIKIISGQNFPKPKGSGAKGDVVDPYVYVEIHGIPADCAEQRTKTVHQNGDAPIFDESFEFQINLPELAMVRFVVLDDDYIGDEFIGQYTIPFECLQTGYRHVPLQSLTGEVLAHASLFVHVAITNRRGGGKPHKRGLSVRKGKKSREYASLRTLWIKTVDEVFKNAQPPIRDATDLRENMQNAVVSFKELCGLSSVANLMQCMLAVSPRFLGPDNTPLVVLNLSEQYPTMELQGIVPEVLKKIVTTYDMMIQSLKALIENADAVYEKIVHCQKAAMEFHEHLHSIGTKEGLKERKLQKAVESFTWNITILKGQADLLKYAKNETLENLKQIHFAAVSCGLNKPGTENADVQKPRRSLEVIPEKANDETGE

SEQ ID NO: 57944 - protein, 960 aa, Homo sapiens
MPTEKKISSASDCINSMVEGSELKKVRSNSRIYHRYFLLDADMQSLRWEPSKKDSEKAKIDIKSIKEVRTGKNTDIFRSNGISDQISEDCAFSVIYGENYESLDLVANSADVANIWVTGLRYLISYGKHTLDMLESSQDNMRTSWVSQMFSEIDVDNLGHITLCNAVQCIRNLNPGLKTSKIELKFKELHKSKDKAGTEVTKEEFIEVFHELCTRPEIYFLLVQFSSNKEFLDTKDLMMFLEAEQGVAHINEEISLEIIHKYEPSKEGQEKGWLSIDGFTNYLMSPDCYIFDPEHKKVCQDMKQPLSHYFINSSHNTYLIEDQFRGPSDITGYIRALKMGCRSVELDVWDGPDNEPVIYTGHTMTSQIVFRSVIDIINKYAFFASEYPLILCLENHCSIKQQKVMVQHMKKLLGDKLYTTSPNVEESYLPSPDVLKGKILIKAKKLSSNCSGVEGDVTDEDEGAEMSQRMGKENMEQPNNVPVKRFQLCKELSELVSICKSVQFKEFQVSFQVQKYWEVCSFNEVLASKYANENPGDFVNYNKRFLARVFPSPMRIDSSNMNPQDFWKCGCQIVAMNFQTPGLMMDLNIGWFRQNGNCGYVLRPAIMREEVSFFSANTKDSVPGVSPQLLHIKIISGQNFPKPKGSGAKGDVVDPYVYVEIHGIPADCAEQRTKTVHQNGDAPIFDESFEFQINLPELAMVRFVVLDDDYIGDEFIGQYTIPFECLQTGYRHVPLQSLTGEVLAHASLFVHVAITNRRGGGKPHKRGLSVRKGKKSREYASLRTLWIKTVDEVFKNAQPPIRDATDLRENMQNAVVSFKELCGLSSVANLMQCMLAVSPRFLGPDNTPLVVLNLSEQYPTMELQGIVPEVLKKIVTTYDMMIQSLKALIENADAVYEKIVHCQKAAMEFHEHLHSIGTKEGLKERKLQKAVESFTWNITILKIRKTGRRSIFVPQTPIMV

SEQ ID NO: 57945 - protein, 1001 aa, Homo sapiens
MPTEKKISSASDCINSMVEGSELKKVRSNSRIYHRYFLLDADMQSLRWEPSKKDSEKAKIDIKSIKEVRTGKNTDIFRSNGISDQISEDCAFSVIYGENYESLDLVANSADVANIWVTGLRYLISYGKHTLDMLESSQDNMRTSWVSQMFSEIDVDNLGHITLCNAVQCIRNLNPGLKTSKIELKFKELHKSKDKAGTEVTKEEFIEVFHELCTRPEIYFLLVQFSSNKEFLDTKDLMMFLEAEQGVAHINEEISLEIIHKYEPSKEGQEKGWLSIDGFTNYLMSPDCYIFDPEHKKVCQDMKQPLSHYFINSSHNTYLIEDQFRGPSDITGYIRALKMGCRSVELDVWDGPDNEPVIYTGHTMTSQIVFRSVIDIINKYAFFASEYPLILCLENHCSIKQQKVMVQHMKKLLGDKLYTTSPNVEESYLPSPDVLKGKILIKAKKLSSNCSGVEGDVTDEDEGAEMSQRMGKENMEQPNNVPVKRFQLCKELSELVSICKSVQFKEFQVSFQVQKYWEVCSFNEVLASKYANENPGDFVNYNKRFLARVFPSPMRIDSSNMNPQDFWKCGCQIVAMNFQTPGLMMDLNIGWFRQNGNCGYVLRPAIMREEVSFFSANTKDSVPGVSPQLLHIKIISGQNFPKPKGSGAKGDVVDPYVYVEIHGIPADCAEQRTKTVHQNGDAPIFDESFEFQINLPELAMVRFVVLDDDYIGDEFIGQYTIPFECLQTGYRHVPLQSLTGEVLAHASLFVHVAITNRRGGGKPHKRGLSVRKGKKSREYASLRTLWIKTVDEVFKNAQPPIRDATDLRENMQNAVVSFKELCGLSSVANLMQCMLAVSPRFLGPDNTPLVVLNLSEQYPTMELQGIVPEVLKKIVTTYDMMIQSLKALIENADAVYEKIVHCQKAAMEFHEHLHSIGTKEGLKERKLQKAVESFTWNITILKGQADLLKYAKNETLENLKQIHFAAVSCGLNKPGTENADVQKPRRSLEVIPEKANDETGE

SEQ ID NO: 57946 - protein, 1001 aa, Homo sapiens; identical to SEQ ID NO: 57945

SEQ ID NO: 57947 - protein, 933 aa, Homo sapiens
MTATPESLFPTGDELDSSQLQMESDEVDTLKEGEDPADRMHPFLAIYELQSLKVHPLVFAPGVPVTAQVVGTERYTSGSKVGTCTLYSVRLTHGDFSWTTKKKYRHFQELHRDLLRHKVLMSLLPLARFAVAYSPARDAGNREMPSLPRAGPEGSTRHAASKQKYLENYLNRLLTMSFYRNYHAMTEFLEVSQLSFIPDLGRKGLEGMIRKRSGGHRVPGLTCCGRDQVCYRWSKRWLVVKDSFLLYMCLETGAISFVQLFDPGFEVQVGKRSTEARHGVRIDTSHRSLILKCSSYRQARWWAQEITELAQGPGRDFLQLHRHDSYAPPRPGTLARWFVNGAGYFAAVADAILRAQEEIFITDWWLSPEVYLKRPAHSDDWRLDIMLKRKAEEGVRVSILLFKEVELALGINSGYSKRALMLLHPNIKVMRHPDQVTLWAHHEKLLVVDQVVAFLGGLDLAYGRWDDLHYRLTDLGDSSESAASQPPTPRPDSPATPDLSHNQFFWLGKDYSNLITKDWVQLDRPFEDFIDRETTPRMPWRDVGVVVHGLPARDLARHFIQRWNFTKTTKAKYKTPTYPYLLPKSTSTANQLPFTLPGGQCTTVQVLRSVDRWSAGTLENSILNAYLHTIRESQHFLYIENQFFISCSDGRTVLNKVGDEIVDRILKAHKQGWCYRVYVLLPLLPGFEGDISTGGGNSIQAILHFTYRTLCRGEYSILHRLKAAMGTAWRDYISICGLRTHGELGGHPVSELIYIHSKVLIADDRTVIIGSANINDRSLLGKRDSELAVLIEDTETEPSLMNGAEYQAGRFALSLRKHCFGVILGANTRPDLDLRDPICDDFFQLWQDMAESNANIYEQIFRCLPSNATRSLRTLREYVAVEPLATVSPPLARSELTQVQGHLVHFPLKFLEDESLLPPLGSKEGMIPLEVWT

SEQ ID NO: 57948 - protein, 922 aa, Homo sapiens
MTATPESLFPTGDELDSSQLQMESDEVDTLKEGEDPADRMHPFLAIYELQSLKVHPLVFAPGVPVTAQVVGTERYTSGSKVGTCTLYSVRLTHGDFSWTTKKKYRHFQELHRDLLRHKVLMSLLPLARFAVAYSPARDAGNREMPSLPRAGPEGSTRHAASKQKYLENYLNRLLTMSFYRNYHAMTEFLEVSQLSFIPDLGRKGLEGMIRKRSGGHRVPGLTCCGRDQVCYRWSKRWLVVKDSFLLYMCLETGAISFVQLFDPGFEVQVGKRSTEARHGVRIDTSHRSLILKCSSYRQARWWAQEITELAQGPGRDFLQLHRHDSYAPPRPGTLARWFVNGAGYFAAVADAILRAQEEIFITDWWLSPEVYLKRPAHSDDWRLDIMLKRKAEEGVRVSILLFKEVELALGINSGYSKRALMLLHPNIKVMRHPDQVTLWAHHEKLLVVDQVVAFLGGLDLAYGRWDDLHYRLTDLGDSSESAASQPPTPRPDSPATPDLSHNQFFWLGKDYSNLITKDWVQLDRPFEDFIDRETTPRMPWRDVGVVVHGLPARDLARHFIQRWNFTKTTKAKYKTPTYPYLLPKSTSTANQLPFTLPGGQCTTVQVLRSVDRWSAGTLENSILNAYLHTIRESQHFLYIENQFFISCSDGRTVLNKVGDEIVDRILKAHKQGWCYRVYVLLPLLPGFEGDISTGGGNSIQAILHFTYRTLCRGEYSILHRLKAAMGTAWRDYISICGLRTHGELGGHPVSELIYIHSKVLIADDRTVIIGSANINDRSLLGKRDSELAVLIEDTETEPSLMNGAEYQAGSVILGANTRPDLDLRDPICDDFFQLWQDMAESNANIYEQIFRCLPSNATRSLRTLREYVAVEPLATVSPPLARSELTQVQGHLVHFPLKFLEDESLLPPLGSKEGMIPLEVWT

SEQ ID NO: 57949 - protein, 318 aa, Homo sapiens
MDKQNSQMNASHPETNLPVGYPPQYPPTAFQGPPGYSGYPGPQVSYPPPPAGHSGPGPAGFPVPNQPVYNQPVYNQPVGAAGVPWMPAPQPPLNCPPGLEYLSQIDQILIHQQIELLEVLTGFETNNKYEIKNSFGQRVYFAAEDTDCCTRNCCGPSRPFTLRIIDNMGQEVITLERPLRCSSCCCPCCLQEIEIQAPPGVPIGYVIQTWHPCLPKFTIQNEKREDVLKISGPCVVCSCCGDVDFEIKSLDEQCVVGKISKHWTGILREAFTDADNFGIQFPLDLDVKMKAVMIGACFLIDFMFFESTGSQEQKSGVW

SEQ ID NO: 57950 - protein, 30 aa, Homo sapiens
MKAVMIGACFLIDFMFFESTGSQEQKSGVW

SEQ ID NO: 57951 - protein, 249 aa, Homo sapiens
MDKQNSQMNASHPETNLPVGYPPQYPPTAFQGPPGYSGYPGPQVSYPPPPAGHSGPGPAGFPVPNQPVYNQPVYNQPVGAAGVPWMPAPQPPLNCPPGLEYLSQIDQILIHQQIELLEVLTGFETNNKYEIKNSFGQRVYFAAEDTDCCTRNCCGPSRPFTLRIIDNMGQEVITLERPLRCSSCCCPCCLQEIEIQAPPGVPIGYVIQTWHPCLPKFTIQNEKREDVLKISGPCVVCSCCGDVDFEIKS

SEQ ID NO: 57952 - protein, 224 aa, Homo sapiens
MPAPPPPLNCPPGLEYLSQIDMILIHQQIELLEVLFSFESSNMYEIKNSFGQRIYFAAEDTNFCIRNCCGRSRPFTLRITDNVGREVITLERPLRCNCCCCPCCLQEIEIQAPPGVPVGYVTQTWHPCLTKFTIKNQKREDVLKISGPCIVCSCIAGVDFEITSLDEQIVVGRISKHWSGFLREAFTDADNFGIQFPRDLDVKMKAVMIGACFLIDYMFFERTR

SEQ ID NO: 57953 - protein, 161 aa, Homo sapiens
MPAPPPPLNCPPGLEYLSQIDMILIHQQIELLEVLFSFESSNMYEIKNSFGQRIYFAAEDTNFCIRNCCGRSRPFTLRITDNVGREVITLERPLRCNCCCCPCCLQEIEIQAPPGVPVGYVTQTWHPCLTKFTIKNQKREDVLKISGPCIVCSCIAGVDFE

SEQ ID NO: 57954 - protein, 297 aa, Homo sapiens
MRSWNSLFCLNSSRPPGHIVYPKHQAGHTGKQADHLGSQAFYPGRQHDYLVPPAGTAGIPVQNQPGRPEGVPWMPAPPPPLNCPPGLEYLSQIDMILIHQQIELLEVLFSFESSNMYEIKNSFGQRIYFAAEDTNFCIRNCCGRSRPFTLRITDNVGREVITLERPLRCNCCCCPCCLQEIEIQAPPGVPVGYVTQTWHPCLTKFTIKNQKREDVLKISGPCIVCSCIAGVDFEITSLDEQIVVGRISKHWSGFLREAFTDADNFGIQFPRDLDVKMKAVMIGACFLIDYMFFERTR

SEQ ID NO: 57955 - protein, 316 aa, Homo sapiens
VSAHLRFFLAIILRDSGLWAEWRMKPFQIHLPGPPGHIVYPKHQAGHTGKQADHLGSQAFYPGRQHDYLVPPAGTAGIPVQNQPGRPEGVPWMPAPPPPLNCPPGLEYLSQIDMILIHQQIELLEVLFSFESSNMYEIKNSFGQRIYFAAEDTNFCIRNCCGRSRPFTLRITDNVGREVITLERPLRCNCCCCPCCLQEIEIQAPPGVPVGYVTQTWHPCLTKFTIKNQKREDVLKISGPCIVCSCIAGVDFEITSLDEQIVVGRISKHWSGFLREAFTDADNFGIQFPRDLDVKMKAVMIGACFLIDYMFFERTR

SEQ ID NO: 57956 - protein, 295 aa, Homo sapiens
MAGYLPPKGYAPSPPPPYPVTPGYPEPALHPGPGQAPVPAQVPAPAPGFALFPSPGPVALGSAAPFLPLPGVPSGLEFLVQIDQILIHQKAERVETFLGWETCNRYELRSGAGQPLGQAAEESNCCARLCCGARRPLRVRLADPGDREVLRLLRPLHCGCSCCPCGLQEMEVQAPPGTTIGHVLQTWHPFLPKFSIQDADRQTVLRVVGPCWTCGCGTDTNFEVKTRDESRSVGRISKQWGGLVREALTDADDFGLQFPLDLDVRVKAVLLGATFLIDYMFFEKRGGAGPSAVTS

SEQ ID NO: 57957 - protein, 223 aa, Homo sapiens
MAGYLPPKGYAPSPPPPYPVTPGYPEPALHPGPGQAPVPAQVPAPAPGFALFPSPGPVALGSAAPFLPLPGVPSGLEFLVQIDQILIHQKAERVETFLGWRPVIGMNCALGPGSPWVRRPRRATAAPVCAVAPAGRCVSAWPTPGTVRCCVCSARCTVAAAAAPVASRRWKYRLHQAPPLATCYRPGIPSSPSSPSRMPIARQSCEWWGPAGPVAVAQTPTLR

SEQ ID NO: 57958 - protein, 295 aa, Homo sapiens; identical to SEQ ID NO: 57956

SEQ ID NO: 57959 - protein, 295 aa, Homo sapiens; identical to SEQ ID NO: 57956

SEQ ID NO: 57960 - protein, 329 aa, Homo sapiens
MSGVVPTAPEQPAGEMENQTKPPDPRPDAPPEYNSHFLPGPPGTAVPPPTGYPGGLPMGYYSPQQPSTFPLYQPVGGIHPVRYQPGKYPMPNQSVPITWMPGPTPMANCPPGLEYLVQLDNIHVLQHFEPLEMMTCFETNNRYDIKNNSDQMVYIVTEDTDDFTRNAYRTLRPFVLRVTDCMGREIMTMQRPFRCTCCCFCCPSARQELEVQCPPGVTIGFVAEHWNLCRAVYSIQNEKKENVMRVRGPCSTYGCGSDSVFEVKSLDGISNIGSIIRKWNGLLSAMADADHFDIHFPLDLDVKMKAMIFGACFLIDFMYFERSPPQRSR

SEQ ID NO: 57961 - protein, 239 aa, Homo sapiens
MSGVVPTAPEQPAGEMENQTKPPDPRPDAPPEYNSHFLPGPPGTAVPPPTGYPGGLPMGYYSPQQPSTFPLYQPVGGIHPVRYQPGKYPMPNQSVPITWMPGPTPMANCPPGLEYLVQLEVQCPPGVTIGFVAEHWNLCRAVYSIQNEKKENVMRVRGPCSTYGCGSDSVFEVKSLDGISNIGSIIRKWNGLLSAMADADHFDIHFPLDLDVKMKAMIFGACFLIDFMYFERSPPQRSR

SEQ ID NO: 57962 - protein, 329 aa, Homo sapiens; identical to SEQ ID NO: 57960

SEQ ID NO: 57963 - protein, 262 aa, Homo sapiens
MSGVVPTAPEQPAGEMENQTKPPDPRPDAPPEYNSHFLPGPPGTAVPPPTGYPGGLPMGYYSPQQPSTFPLYQPVGGIHPVRYQPGKYPMPNQSVPITWMPGPTPMANCPPGLEYLVQLDNIHVLQHFEPLEMMTCFETNNRYDIKNNSDQMVYIVTEDTDDFTRNAYRTLRPFVLRVTDCMGREIMTMQRPFRCTCCCFCCPSARQELEVQCPPGVTIGFVAEHWNLCRAVYSIQNEKKENVMRVRGPCSTYGCGSDSVFE

SEQ ID NO: 57964 - protein, 208 aa, Homo sapiens
MSGVVPTAPEQPAGEMENQTKPPDPRPDAPPEYNSHFLPGPPGTAVPPPTGYPGGLPMGYYSPQQPSTFPLYQPVGGIHPVRYQPGKYPMPNQSVPITWMPGPTPMANCPPGLEYLVQLDNIHVLQHFEPLEMMTCFETNNRYDIKNNSDQMVYIVTEDTDDFTRNAYRTLRPFVLRVTDCMGREIMTMQRPFRCTCCCFCCPSARQE

SEQ ID NO: 57965 - protein, 142 aa, Homo sapiens
MSGVVPTAPEQPAGEMENQTKPPDPRPDAPPEYNSHFLPGPPGTAVPPPTGYPGGLPMGYYSPQQPSTFPLYQPVGGIHPVRYQPGKYPMPNQSVPITWMPGPTPMANCPPGLEYLVQLDNIHVLQHFEPLEMMTCFETNNR

SEQ ID NO: 57966 - protein, 329 aa, Homo sapiens; identical to SEQ ID NO: 57960

SEQ ID NO: 57967 - protein, 98 aa, Homo sapiens
MSGVVPTAPEQPAGEMENQTKPPDPRPDAPPEYNSHFLPGPPGTAVPPPTGYPGGLPMGYYSPQQPSTFPLYQPVGGIHPVRYQPGKYPMPNQSVPIT

SEQ ID NO: 57968 - protein, 224 aa, Homo sapiens
MENQTKPPDPRPDAPPEYNSHFLPGPPGTAVPPPTGYPGGLPMGYYSPQQPSTFPLYQPVGGIHPVRYQPGKYPMPNQSVPITWMPGPTPMANCPPGLEYLVQLEVQCPPGVTIGFVAEHWNLCRAVYSIQNEKKENVMRVRGPCSTYGCGSDSVFEVKSLDGISNIGSIIRKWNGLLSAMADADHFDIHFPLDLDVKMKAMIFGACFLIDFMYFERSPPQRSR

SEQ ID NO: 57969 - protein, 441 aa, Homo sapiens
MALFGALFLALLAGAHAEFPGCKIRVTSKALELVKQEGLRFLEQELETITIPDLRGKEGHFYYNISEVKVTELQLTSSELDFQPQQELMLQITNASLGLRFRRQLLYWFLKVYDFLSTFITSGMRFLLNQQICPVLYHAGTVLLNSLLDTVPVRSSVDELVGIDYSLMKDPVASTSNLDMDFRGAFFPLTERNWSLPNRAVEPQLQEEERMVYVAFSEFFFDSAMESYFRAGALQLLLVGDKVPHDLDMLLRATYFGSIVLLSPAVIDSPLKLELRVLAPPRCTIKPSGTTISVTASVTIALVPPDQPEVQLSSMTMDARLSAKMALRGKALRTQLDLRRFRIYSNHSALESLALIPLQAPLKTMLQIGVMPMLNERTWRGVQIPLPEGINFVHEVVTNHAGFLTIGADLHFAKGLREVIEKNRPADVRASTAPTPSTAAV

SEQ ID NO: 57970 - protein, 493 aa, Homo sapiens
MALFGALFLALLAGAHAEFPGCKIRVTSKALELVKQEGLRFLEQELETITIPDLRGKEGHFYYNISEVKVTELQLTSSELDFQPQQELMLQITNASLGLRFRRQLLYWFFYDGGYINASAEGVSIRTGLELSRDPAGRMKVSNVSCQASVSRMHAAFGGTFKKVYDFLSTFITSGMRFLLNQQICPVLYHAGTVLLNSLLDTVPVRSSVDELVGIDYSLMKDPVASTSNLDMDFRGAFFPLTERNWSLPNRAVEPQLQEEERMVYVAFSEFFFDSAMESYFRAGALQLLLVGDKVPHDLDMLLRATYFGSIVLLSPAVIDSPLKLELRVLAPPRCTIKPSGTTISVTASVTIALVPPDQPEVQLSSMTMDARLSAKMALRGKALRTQLDLRRFRIYSNHSALESLALIPLQAPLKTMLQIGVMPMLNERTWRGVQIPLPEGINFVHEVVTNHAGFLTIGADLHFAKGLREVIEKNRPADVRASTAPTPSTAAV

SEQ ID NO: 57971 - protein, 493 aa, Homo sapiens; identical to SEQ ID NO: 57970

SEQ ID NO: 57972 - protein, 513 aa, Homo sapiens
MGLSGSDNSCDPTPPPGPLAMALFGALFLALLAGAHAEFPGCKIRVTSKALELVKQEGLRFLEQELETITIPDLRGKEGHFYYNISEVKVTELQLTSSELDFQPQQELMLQITNASLGLRFRRQLLYWFFYDGGYINASAEGVSIRTGLELSRDPAGRMKVSNVSCQASVSRMHAAFGGTFKKVYDFLSTFITSGMRFLLNQQICPVLYHAGTVLLNSLLDTVPVRSSVDELVGIDYSLMKDPVASTSNLDMDFRGAFFPLTERNWSLPNRAVEPQLQEEERMVYVAFSEFFFDSAMESYFRAGALQLLLVGDKVPHDLDMLLRATYFGSIVLLSPAVIDSPLKLELRVLAPPRCTIKPSGTTISVTASVTIALVPPDQPEVQLSSMTMDARLSAKMALRGKALRTQLDLRRFRIYSNHSALESLALIPLQAPLKTMLQIGVMPMLNERTWRGVQIPLPEGINFVHEVVTNHAGFLTIGADLHFAKGLREVIEKNRPADVRASTAPTPSTAAV

SEQ ID NO: 57973 - protein, 405 aa, Homo sapiens
MLQITNASLGLRFRRQLLYWFFYDGGYINASAEGVSIRTGLELSRDPAGRMKVSNVSCQASVSRMHAAFGGTFKKVYDFLSTFITSGMRFLLNQQICPVLYHAGTVLLNSLLDTVPVRSSVDELVGIDYSLMKDPVASTSNLDMDFRGAFFPLTERNWSLPNRAVEPQLQEEERMVYVAFSEFFFDSAMESYFRAGALQLLLVGDKVPHDLDMLLRATYFGSIVLLSPAVIDSPLKLELRVLAPPRCTIKPSGTTISVTASVTIALVPPDQPEVQLSSMTMDARLSAKMALRGKALRTQLDLRRFRIYSNHSALESLALIPLQAPLKTMLQIGVMPMLNERTWRGVQIPLPEGINFVHEVVTNHAGFLTIGADLHFAKGLREVIEKNRPADVRASTAPTPSTAAV

SEQ ID NO: 57974 - protein, 398 aa, Homo sapiens
MALFGALFLALLAGAHAEFPGCKIRVTSKALELVKQEGLRFLEQELETITIPDLRGKEGHFYYNISEKVYDFLSTFITSGMRFLLNQQICPVLYHAGTVLLNSLLDTVPVRSSVDELVGIDYSLMKDPVASTSNLDMDFRGAFFPLTERNWSLPNRAVEPQLQEEERMVYVAFSEFFFDSAMESYFRAGALQLLLVGDKVPHDLDMLLRATYFGSIVLLSPAVIDSPLKLELRVLAPPRCTIKPSGTTISVTASVTIALVPPDQPEVQLSSMTMDARLSAKMALRGKALRTQLDLRRFRIYSNHSALESLALIPLQAPLKTMLQIGVMPMLNERTWRGVQIPLPEGINFVHEVVTNHAGFLTIGADLHFAKGLREVIEKNRPADVRASTAPTPSTAAV

SEQ ID NO: 57975 - protein, 262 aa, Homo sapiens
MAVTAQAARRKERVLCLFDVDGTLTPARQKIDPEVAAFLQKLRSRVQIGVVGGSDYCKIAEQLGDGDEVIEKFDYVFAENGTVQYKHGRLLSKQTIQNHLGEELLQDLINFCLSYMALLRLPKKRGTFIEFRNGMLNISPIGRSCTLEERIEFSELDKKEKIREKFVEALKTEFAGKGLRFSRGGMISFDVFPEGWDKRYCLDSLDQDSFDTIHFFGNETSPGGNDFEIFADPRTVGHSVVSPQDTVQRCREIFFPETAHEA

SEQ ID NO: 57976 - protein, 246 aa, Homo sapiens
MAAPGPALCLFDVDGTLTAPRQKITKEMDDFLQKLRQKIKIGVVGGSDFEKVQEQLGNDVVEKYDYVFPENGLVAYKDGKLLCRQNIQSHLGEALIQDLINYCLSYIAKIKLPKKRGTFIEFRNGMLNVSPIGRSCSQEERIEFYELDKKENIRQKFVADLRKEFAGKGLTFSIGGQISFDVFPDGWDKRYCLRHVENDGYKTIYFFGDKTMPGGNDHEIFTDPRTMGYSVTAPEDTRRICELLFS

SEQ ID NO: 57977 - protein, 121 aa, Homo sapiens
MLNVSPIGRSCSQEERIEFYELDKKENIRQKFVADLRKEFAGKGLTFSIGGQISFDVFPDGWDKRYCLRHVENDGYKTIYFFGDKTMPGGNDHEIFTDPRTMGYSVTAPEDTRRICELLFS

SEQ ID NO: 57978 - protein, 163 aa, Homo sapiens
MMNIQSHLGEALIQDLINYCLSYIAKIKLPKKRGTFIEFRNGMLNVSPIGRSCSQEERIEFYELDKKENIRQKFVADLRKEFAGKGLTFSIGGQISFDVFPDGWDKRYCLRHVENDGYKTIYFFGDKTMPGGNDHEIFTDPRTMGYSVTAPEDTRRICELLFS

SEQ ID NO: 57979 - protein, 192 aa, Homo sapiens
MAPLGGAPRLVLLFSGKRKSGKDFVTEALQSRLGADVCAVLRLSGPLKEQYAQEHGLNFQRLLDTSTYKEAFRKDMIRWGEEKRQADPGFFCRKIVEGISQPIWLVSDTRRVSDIQWFREAYGAVTQTVRVVALEQSRQQRGWVFTPGVDDAESECGLDNFGDFDWVIENHGVEQRLEEQLENLIEFIRSRL

SEQ ID NO: 57980 - protein, 204 aa, Homo sapiens
MEPKASCPAAAPLMERKFHVLVGVTGSVAALKLPLLVSKLLDIPGLEVAVVTTERAKHFYSPQDIPVTLYSDADEWEIWKSRSDPVLHIDLRRWADLLLVAPLDANTLGKVASGICDNLLTCVMRAWDRSKPLLFCPAMNTAMWEHPITAQQVDQLKAFGYVEIPCVAKKLVCGDEGLGAMAEVGTIVDKVKEVLFQHSGFQQS

SEQ ID NO: 57981 - protein, 56 aa, Homo sapiens
MAEMDPVAEFPQPPGAARWAEALLRCFTWLRLCQISMFLSLKCLNTRSSHLGAHCR

SEQ ID NO: 57982 - protein, 213 aa, Homo sapiens
MAEMDPVAEFPQPPGAARWAEVMARFAARLGAQGRRVVLVTSGGTKVPLEARPVRFLDNFSSGRRGATSAEAFLAAGYGVLFLYRARSAFPYAHRFPPQTWLSALRPSGPALSGLLSLEAEENALPGFAEALRSYQEAAAAGTFLAVEFTTLADYLHLLQAAAQALNPLGPSAMFYLAAAVSDFYVPVSEMPEHKIQSSGGPLQVMGASLPEI

SEQ ID NO: 57983 - protein, 311 aa, Homo sapiens
MAEMDPVAEFPQPPGAARWAEVMARFAARLGAQGRRVVLVTSGGTKVPLEARPVRFLDNFSSGRRGATSAEAFLAAGYGVLFLYRARSAFPYAHRFPPQTWLSALRPSGPALSGLLSLEAEENALPGFAEALRSYQEAAAAGTFLAVEFTTLADYLHLLQAAAQALNPLGPSAMFYLAAAVSDFYVPVSEMPEHKIQSSGGPLQITMKMVPKLLSPLVKDWAPKAFIISFKLETDPAIVINRARKALEIYQHQVVVANILESRQSFVFIVTKDSETKLLLSEEEIEKGVEIEEKIVDNLQSRHTAFIGDRN

SEQ ID NO: 57984 - protein, 138 aa, Homo sapiens
MFYLAAAVSDFYVPVSEMPEHKIQSSGGPLQITMKMVPKLLSPLVKDWAPKAFIISFKLETDPAIVINRARKALEIYQHQVVVANILESRQSFVFIVTKDSETKLLLSEEEIEKGVEIEEKIVDNLQSRHTAFIGDRN

SEQ ID NO: 57985 - protein, 138 aa, Homo sapiens; identical to SEQ ID NO: 57984

SEQ ID NO: 57986 - protein, 130 aa, Homo sapiens
MAEYGTLLQDLTNNITLEDLEQLKSACKEDIPSEKSEEITTGSAWFSFLESHNKLDKDNLSYIEHIFEISRRPDLLTMVVDYRTRVLKISEEDELDTKLTRIPSAKKYKDIIRQPSEEEIIKLAPPPKKA

SEQ ID NO: 57987 - protein, 151 aa, Homo sapiens
MEDEGNKLCQAPPWPGQTSPVMAEYGTLLQDLTNNITLEDLEQLKSACKEDIPSEKSEEITTGSAWFSFLESHNKLDKDNLSYIEHIFEISRRPDLLTMVVDYRTRVLKISEEDELDTKLTRIPSAKKYKDIIRQPSEEEIIKLAPPPKKA

SEQ ID NO: 57988 - protein, 108 aa, Homo sapiens
MAEYGTLLQDLTNNITLEDLEQLKSACKEDIPSEKNNLSYIEHIFEISRRPDLLTMVVDYRTRVLKISEEDELDTKLTRIPSAKKYKDIIRQPSEEEIIKLAPPPKKA

SEQ ID NO: 57989 - protein, 517 aa, Homo sapiens
MELEELGIREECGVFGCIASGEWPTQLDVPHVITLGLVGLQHRGQESAGIVTSDGSSVPTFKSHKGMGLVNHVFTEDNLKKLYVSNLGIGHTRYATTGKCELENCQPFVVETLHGKIAVAHNGELVNAARLRKKLLRHGIGLSTSSDSEMITQLLAYTPPQEQDDTPDWVARIKNLMKEAPTAYSLLIMHRDVIYAVRDPYGNRPLCIGRLIPVSDINDKEKKTSETEGWVVSSESCSFLSIGARYYREVLPGEIVEISRHNVQTLDIISRSEGNPVAFCIFEYVYFARPDSMFEDQMVYTVRYRCGQQLAIEAPVDADLVSTVPESATPAALAYAGKCGLPYVEVLCKNRYVGRTFIQPNMRLRQLGVAKKFGVLSDNFKGKRIVLVDDSIVRGNTISPIIKLLKESGAKEVHIRVASPPIKYPCFMGINIPTKEELIANKPEFDHLAEYLGANSVVYLSVEGLVSSVQEGIKFKKQKEKKHDIMIQENGNGLECFEKSGHCTACLTGKYPVELEW

SEQ ID NO: 57990 - protein, 218 aa, Homo sapiens
MELLIMINACKIASASRVTAVIPCFPYARQDKKDKGFFDIPVDNLYAEPAVLKWIRENISEWRNCTIVSPDAGGAKRVTSIADRLNVDFALIHKERKKANEVDRMVLVGDVKDRVAILVDDMADTCGTICHAADKLLSAGATRVYAILTHGIFSGPAISRINNACFEAVVVTNTIPQEDKMKHCSKIQVIDISMILAEAIRRTHNGESVSYLFSHVPL

SEQ ID NO: 57991 - protein, 168 aa, Homo sapiens
MPNIKIFSGSSHQDLSQKIADRLGLELGKVVTKKFSNQETCVEIGESVRGEDVYIVQSGCGEINDNLMELLIMINACKIASASRVTAVIPCFPYARQDKKDKSRAPISAKLVANMLSVAGADHIITMDLHASQIQVSVEAKYWCLKGGRKGLMMLKTAEKPKIMPKYI

SEQ ID NO: 57992 - protein, 251 aa, Homo sapiens
MELLIMINACKIASASRVTAVIPCFPYARQDKKDKSRAPISAKLVANMLSVAGADHIITMDLHASQIQGFFDIPVDNLYAEPAVLKWIRENISEWRNCTIVSPDAGGAKRVTSIADRLNVDFALIHKERKKANEVDRMVLVGDVKDRVAILVDDMADTCGTICHAADKLLSAGATRVYAILTHGIFSGPAISRINNACFEAVVVTNTIPQEDKMKHCSKIQVIDISMILAEAIRRTHNGESVSYLFSHVPL

SEQ ID NO: 57993 - protein, 318 aa, Homo sapiens
MPNIKIFSGSSHQDLSQKIADRLGLELGKVVTKKFSNQETCVEIGESVRGEDVYIVQSGCGEINDNLMELLIMINACKIASASRVTAVIPCFPYARQDKKDKSRAPISAKLVANMLSVAGADHIITMDLHASQIQGFFDIPVDNLYAEPAVLKWIRENISEWRNCTIVSPDAGGAKRVTSIADRLNVDFALIHKERKKANEVDRMVLVGDVKDRVAILVDDMADTCGTICHAADKLLSAGATRVYAILTHGIFSGPAISRINNACFEAVVVTNTIPQEDKMKHCSKIQVIDISMILAEAIRRTHNGESVSYLFSHVPL

SEQ ID NO: 57994 - protein, 318 aa, Homo sapiens; identical to SEQ ID NO: 57993

SEQ ID NO: 57995 - protein, 318 aa, Homo sapiens
TPNIKIFSGSSHQDLSQKIADRLGLELGKVVTKKFSNQETCVEIDESVRGEDVYIVQSGCGEINDSLMELLIMINACKIASASRVTAVIPCFPYARQDKKDKSRSPISAKLVANMLSIAGADHIITMDLHASQIQGFFDIPVDNLYAEPTVLKWIRENIPEWKNCIIVSPDAGGAKRVTSIADQLNVDFALIHKERKKANEVDCIVLVGDVNDRVAILVDDMADTCVTICLAADKLLSAGATRVYAILTHGIFSGPAISRINTACFEAVVVTNTIPQDEKMKHCSKIRVIDISMILAEAIRRTHNGESVSYLFSHVPL

SEQ ID NO: 57996 - protein, 318 aa, Homo sapiens
MPNIVLFSGSSHQDLSQRVADRLGLELGKVVTKKFSNQETSVEIGESVRGEDVYIIQSGCGEINDNLMELLIMINACKIASSSRVTAVIPCFPYARQDKKDKSRAPISAKLVANMLSVAGADHIITMDLHASQIQGFFDIPVDNLYAEPAVLQWIRENIAEWKNCIIVSPDAGGAKRVTSIADRLNVEFALIHKERKKANEVDRMVLVGDVKDRVAILVDDMADTCGTICHAADKLLSAGATKVYAILTHGIFSGPAISRINNAAFEAVVVTNTIPQEDKMKHCTKIQVIDISMILAEAIRRTHNGESVSYLFSHVPL

SEQ ID NO: 57997 - protein, 321 aa, Homo sapiens
MPNIVLFSGSSHQDLSQRVADRLGLELGKVVTKKFSNQETSVEIGESVRGEDVYIIQSGCGEINDNLMELLIMINACKIASSSRVTAVIPCFPYARQDKKDKVGESRAPISAKLVANMLSVAGADHIITMDLHASQIQGFFDIPVDNLYAEPAVLQWIRENIAEWKNCIIVSPDAGGAKRVTSIADRLNVEFALIHKERKKANEVDRMVLVGDVKDRVAILVDDMADTCGTICHAADKLLSAGATKVYAILTHGIFSGPAISRINNAAFEAVVVTNTIPQEDKMKHCTKIQVIDISMILAEAIRRTHNGESVSYLFSHVPL

SEQ ID NO: 57998 - protein, 282 aa, Homo sapiens
MELLIMAYALKTACARNIIGVIPYFPYSKQSKMRKRGSIVCKLLASMLAKAGLTHIITMDLHQKEIQGFFSFPVDNLRASPFLLQYIQEEIPNYRNAVIVAKSPDAAKRAQSYAERLRLGLAVIHGEAQCTELDMDDGRHSPPMVKNATVHPGLELPLMMAKEKPPITVVGDVGGRIAIIVDDIIDDVESFVAAAEILKERGAYKIYVMATHGILSAEAPRLIEESSVDEVVVTNTVPHEVQKLQCPKIKTVDISLILSEAIRRIHNGESMAYLFRNITVDD

SEQ ID NO: 57999 - protein, 385 aa, Homo sapiens
MPKKLLLLPPPSASSAFRVPRARPVPPPAMNAARTGYRVFSANSTAACTELAKRITERLGAELGKSVVYQETNGETRVEIKESVRGQDIFIIQTIPRDVNTAVMELLIMAYALKTACARNIIGVIPYFPYSKQSKMRKRGSIVCKLLASMLAKAGLTHIITMDLHQKEIQGFFSFPVDNLRASPFLLQYIQEEIPNYRNAVIVAKSPDAAKRAQSYAERLRLGLAVIHGEAQCTELDMDDGRHSPPMVKNATVHPGLELPLMMAKEKPPITVVGDVGGRIAIIVDDIIDDVESFVAAAEILKERGAYKIYVMATHGILSAEAPRLIEESSVDEVVVTNTVPHEVQKLQCPKIKTVDISLILSEAIRRIHNGESMAYLFRNITVDD

SEQ ID NO: 58000 - protein, 369 aa, Homo sapiens
MFCVTPPELETKMNITKGGLVLFSANSNSSCMELSKKIAERLGVEMGKVQVYQEPNRETRVQIQESVRGKDVFIIQTVSKDVNTTIMELLIMVYACKTSCAKSIIGVIPYFPYSKQCKMRKRGSIVSKLLASMMCKAGLTHLITMDLHQKEIQGFFNIPVDNLRASPFLLQYIQEEIPDYRNAVIVAKSPASAKRAQSFAERLRLGIAVIHGEAQDAESDLVDGRHSPPMVRSVAAIHPSLEIPMLIPKEKPPITVVGDVGGRIAIIVDDIIDDVDSFLAAAETLKERGAYKIFVMATHGLLSSDAPRRIEESAIDEVVVTNTIPHEVQKLQCPKIKTVDISMILSEAIRRIHNGESMSYLFRNIGLDD

SEQ ID NO: 58001 - protein, 369 aa, Homo sapiens; identical to SEQ ID NO: 58000

SEQ ID NO: 58002 - protein, 268 aa, Homo sapiens
MFCVTPPELETKMNITKGGLVLFSANSNSSCMELSKKIAERLGVEMGKVQVYQEPNRETRVQIQESVRGKDVFIIQTVSKDVNTTIMELLIMVYACKTSCAKSIIGVIPYFPYSKQCKMRKRGSIVSKLLASMMCKAGLTHLITMDLHQKEIQGFFNIPVDNLRASPFLLQYIQEEIPDYRNAVIVAKSPASAKRAQSFAERLRLGIAVIHGEAQDAESDLVDGRHSPPMVRSVAAIHPSLEIPMLIPKEKPPITVVGDVGGRIAIIV

SEQ ID NO: 58003 - protein, 194 aa, Homo sapiens
MFCVTPPELETKMNITKGGLVLFSANSNSSCMELSKKIAERLGVEMGKVQVYQEPNRETRVQIQESVRGKDVFIIQTVSKDVNTTIMELLIMVYACKTSCAKSIIGVIPYFPYSKQCKMRKRGSIVSKLLASMMCKAGLTHLITMDLHQKEIQGFFNIPVDNLRASPFLLQYIQEEIPDYRNAVIVAKSPASAK

SEQ ID NO: 58004 - protein, 329 aa, Homo sapiens
MFCVTPPELETKMNITKGGLVLFSANSNSSCMELSKKIAEDVNTTIMELLIMVYACKTSCAKSIIGVIPYFPYSKQCKMRKRGSIVSKLLASMMCKAGLTHLITMDLHQKEIQGFFNIPVDNLRASPFLLQYIQEEIPDYRNAVIVAKSPASAKRAQSFAERLRLGIAVIHGEAQDAESDLVDGRHSPPMVRSVAAIHPSLEIPMLIPKEKPPITVVGDVGGRIAIIVDDIIDDVDSFLAAAETLKERGAYKIFVMATHGLLSSDAPRRIEESAIDEVVVTNTIPHEVQKLQCPKIKTVDISMILSEAIRRIHNGESMSYLFRNIGLDD

SEQ ID NO: 58005 - protein, 176 aa, Homo sapiens
MFCVTPPELETKMNITKGGLVLFSANSNSSCMELSKKIAERLGVEMGKVQVYQEPNRETRVQIQESVRGKDVFIIQTVSKDVNTTIMELLIMVYACKTSCAKSIIGVIPYFPYSKQCKMRKRGSIVSKLLASMMCKAGLTHLITMDLHQKEIQGFFNIPVDNLRASPFLLQYIQEE

SEQ ID NO: 58006 - protein, 244 aa, Homo sapiens
MFCVTPPELETKMNITKGGLVLFSANSNSSCMELSKKIAERLGVEMGKVQVYQEPNRETRVQIQESVRGKDVFIIQTVSKDVNTTIMELLIMVYACKTSCAKSIIGVIPYFPYSKQCKMRKRGSIVSKLLASMMCKAGLTHLITMDLHQKEIQGFFNIPVDNLRASPFLLQYIQEEIPDYRNAVIVAKSPASAKRAQSFAERLRLGIAVIHGEAQDAESDLVDGRHSPPMVRSVAAIHPSLEIP

SEQ ID NO: 58007 - protein, 44 aa, Homo sapiens
MFCVTPPELETKMNITKGGLVLFSANSNSSCMELSKKIAERLGV

SEQ ID NO: 58008 - protein, 268 aa, Homo sapiens; identical to SEQ ID NO: 58002

SEQ ID NO: 58009 - protein, 140 aa, Homo sapiens
MFCVTPPELETKMNITKGGLVLFSANSNSSCMELSKKIAERLGVEMGKVQVYQEPNRETRVQIQESVRGKDVFIIQTVSKDVNTTIMELLIMVYACKTSCAKSIIGVIPYFPYSKQCKMRKRGSIVSKLLASMMCKAGLT

SEQ ID NO: 58010 - protein, 268 aa, Homo sapiens; identical to SEQ ID NO: 58002

SEQ ID NO: 58011 - protein, 283 aa, Homo sapiens
MELLIMVYACKTSCAKSIIGVIPYFPYSKQCKMRKRGSIVSKLLASMMCKAGLTHLITMDLHQKEIQGFFNIPVDNLRASPFLLQYIQEEIPDYRNAVIVAKSPASAKRAQSFAERLRLGIAVIHGEAQDAESDLVDGRHSPPMVRSVAAIHPSLEIPMLIPKEKPPITVVGDVGGRIAIIVDDIIDDVDSFLAAAETLKERGAYKIFVMATHGLLSSDAPRRIEESAIDEVVVTNTIPHEVQKLQCPKIKTVDISMILSEAIRRIHNGESMSYLFRNIGLDD

SEQ ID NO: 58012 - protein, 320 aa, Homo sapiens
MFCVTPPELETKMNITKGGLVLFSANSNSSCMELSKKIAERLGVEMGKVQVYQEPNRETRVQIQESVRGKDVFIIQTVSKDVNTTIMELLIMVYACKTSCAKSIIGVIPYFPYSKQCKMRKRGSIVSKLLASMMCKAGLTHLITMDLHQKEIQGFFNIPVDNLRASPFLLQYIQEEIPDYRNAVIVAKSPASAKRAQSFAERLRLGIAVIHGEAQDAESDLVDGRHSPPMVRSVAAIHPSLEIPMLIPKEKPPITVVGDVGGRIAIIVVVVTNTIPHEVQKLQCPKIKTVDISMILSEAIRRIHNGESMSYLFRNIGLDD

SEQ ID NO: 58013 - protein, 78 aa, Homo sapiens
MFCVTPPELETKMNITKGGLVLFSANSNSSCMELSKKIAENKSTNSRVCEGKRCFHHPNCFEGREHHHHGAPDHGVCM

SEQ ID NO: 58014 - protein, 225 aa, Homo sapiens
MAGSSEEAPDYGRGVVIMDDWPGYDLNLFTYPQHYYGDLEYVLIPHGIIVDRIERLAKDIMKDIGYSDIMVLCVLKGGYKFCADLVEHLKNISRNSDRFVSMKVDFIRLKSYRNDQSMGEMQIIGGDDLSTLAGKNVLIVEDVVGTGRTMKALLSNIEKYKPNMIKVASLLVKRTSRSDGFRPDYAGFEIPNLFVVGYALDYNEYFRDLNHICVINEHGKEKYRV

SEQ ID NO: 58015 - protein, 190 aa, Homo sapiens
MAGSSEEAPDYGRGVVIMDDWPGYDLNLFTYPQHYYGDLEYVLIPHGIIVDRIERLAKDIMKDIGYSDIMVLCVLKGGYKFCADLVEHLKNISRNSDRFVSMKVDFIRLKSYRNDQSMGEMQIIGGDDLSTLAGKSVLFAKDVVGTGRTMKALLSNIEKYKPNMIKVASLLVKRTSRSDGFRPDSHMRHQ

SEQ ID NO: 58016 - protein, 173 aa, Homo sapiens
MAGSSEEAPDYGRGVVIMDDWPGYDLNLFTYPQHYYGDLEYVLIPHGIIVDRIERLAKDIMKDIGYSDIMVLCVLKGGYKFCADLVEHLKNISRNSDRFVSMKVDFIRLKSYRLRARLKRTTICDRGGLAFSQGYMSSCAPLQESPNTLWRGYLQVLIPCFHIRFQLPRSEQN

SEQ ID NO: 58017 - protein, 190 aa, Homo sapiens
MAGSSEEAPDYGRGVVIMDDWPGYDLNLFTYPQHYYGDLEYVLIPHGIIVDRIERLAKDIMKDIGYSDIMVLCVLKGGYKFCADLVEHLKNISRNSDRFVSMKVDFIRLKSYRNDQSMGEMQIIGGDDLSTLAGKNVLIVEDVVGTGRTMKALLSNIEKYKPNMIKVASLLVKRTSRSDGFRPDSHMRHQ

SEQ ID NO: 58018 - protein, 432 aa, Homo sapiens
MATAEVLNIGKKLYEGKTKEVYELLDSPGKVLLQSKDQITAGNAARKNHLEGKAAISNKITSCIFQLLQEAVTSYKSNRIKTAFTRKCGETAFIAPQCEMIPIEWVCRRIATGSFLKRNPGVKEGYKFYPPKVELFFKDDANNDPQWSEEQLIAAKFCFAGLLIGQTEVDIMSHATQAIFEILEKSWLPQNCTLVDMKIEFGVDVTTKEIVLADVIDNDSWRLWPSGDRSQQKDKQSYRDLKEVTPEGLQMVKKNFEWVAERVELLLKSESQCRVVVLMGSTSDLGHCEKIKKACGNFGIPCELRVTSAHKGPDETLRIKAEYEGDGIPTVFVAVAGRSNGLGPVMSGNTAYPVISCPPLTPDWGVQDVWSSLRLPSGLGCSTVLSPEGSAQFAAQIFGLSNHLVWSKLRASILNTWISLKQADKKIRECNL

SEQ ID NO: 58019 - protein, 425 aa, Homo sapiens
MATAEVLNIGKKLYEGKTKEVYELLDSPGKVLLQSKDQITAGNAARKNHLEGKAAISNKITSCIFQLLQEAGIKTAFTRKCGETAFIAPQCEMIPIEWVCRRIATGSFLKRNPGVKEGYKFYPPKVELFFKDDANNDPQWSEEQLIAAKFCFAGLLIGQTEVDIMSHATQAIFEILEKSWLPQNCTLVDMKIEFGVDVTTKEIVLADVIDNDSWRLWPSGDRSQQKDKQSYRDLKEVTPEGLQMVKKNFEWVAERVELLLKSESQCRVVVLMGSTSDLGHCEKIKKACGNFGIPCELRVTSAHKGPDETLRIKAEYEGDGIPTVFVAVAGRSNGLGPVMSGNTAYPVISCPPLTPDWGVQDVWSSLRLPSGLGCSTVLSPEGSAQFAAQIFGLSNHLVWSKLRASILNTWISLKQADKKIRECNL

SEQ ID NO: 58020 - protein, 425 aa, Homo sapiens; identical to SEQ ID NO: 58019

SEQ ID NO: 58021 - protein, 1338 aa, Homo sapiens
MSPVLHFYVRPSGHEGAAPGHTRRKLQGKLPELQGVETELCYNVNWTAEALPSAEETKKLMWLFGCPLLLDDVARESWLLPGSNDLLLEVGPRLNFSTPTSTNIVSVCRATGLGPVDRVETTRRYRLSFAHPPSAEVEAIALATLHDRMTEQHFPHPIQSFSPESMPEPLNGPINILGEGRLALEKANQELGLALDSWDLDFYTKRFQELQRNPSTVEAFDLAQSNSEHSRHWFFKGQLHVDGQKLVHSLFESIMSTQESSNPNNVLKFCDNSSAIQGKEVRFLRPEDPTRPSRFQQQQGLRHVVFTAETHNFPTGVCPFSGATTGTGGRIRDVQCTGRGAHVVAGTAGYCFGNLHIPGYNLPWEDPSFQYPGNFARPLEVAIEASNGASDYGNKFGEPVLAGFARSLGLQLPDGQRREWIKPIMFSGGIGSMEADHISKEAPEPGMEVVKVGGPVYRIGVGGGAASSVQVQGDNTSDLDFGAVQRGDPEMEQKMNRVIRACVEAPKGNPICSLHDQGAGGNGNVLKELSDPAGAIIYTSRFQLGDPTLNALEIWGAEYQESNALLLRSPNRDFLTHVSARERCPACFVGTITGDRRIVLVDDRECPVRRNGQGDAPPTPLPTPVDLELEWVLGKMPRKEFFLQRKPPMLQPLALPPGLSVHQALERVLRLPAVASKRYLTNKVDRSVGGLVAQQQCVGPLQTPLADVAVVALSHEELIGAATALGEQPVKSLLDPKVAARLAVAEALTNLVFALVTDLRDVKCSGNWMWAAKLPGEGAALADACEAMVAVMAALGVAVDGGKDSLSMAARVGTETVRAPGSLVISAYAVCPDITATVTPDLKHPEGRGHLLYVALSPGQHRLGGTALAQCFSQLGEHPPDLDLPENLVRAFSITQGLLKDRLLCSGHDVSDGGLVTCLLEMAFAGNCGLQVDVPVPRVDVLSVLFAEEPGLVLEVQEPDLAQVLKRYRDAGLHCLELGHTGEAGPHAMVRVSVNGAVVLEEPVGELRALWEETSFQLDRLQAEPRCVAEEERGLRERMGPSYCLPPTFPKASVPREPGGPSPRVAILREEGSNGDREMADAFHLAGFEVWDVTMQDLCSGAIGLDTFRGVAFVGGFSYADVLGSAKGWAAAVTFHPRAGAELRRFRKRPDTFSLGVCNGCQLLALLGWVGGDPNEDAAEMGPDSQPARPGLLLRHNLSGRYESRWASVRVGPGPALMLRGMEGAVLPVWSAHGEGYVAFSSPELQAQIEARGLAPLHWADDDGNPTEQYPLNPNGSPGGVAGICSCDGRHLAVMPHPERAVRPWQWAWRPPPFDTLTTSPWLQLFINARNWTLEGSC

SEQ ID NO: 58022 - protein, 914 aa, Homo sapiens
MFSGGIGSMEADHISKEAPEPGMEVVKVGGPVYRIGVGGGAASSVQVQGDNTSDLDFGAVQRGDPEMEQKMNRVIRACVEAPKGNPICSLHDQGAGGNGNVLKELSDPAGAIIYTSRFQLGDPTLNALEIWGAEYQESNALLLRSPNRDFLTHVSARERCPACFVGTITGDRRIVLVDDRECPVRRNGQGDAPPTPLPTPVDLELEWVLGKMPRKEFFLQRKPPMLQPLALPPGLSVHQALERVLRLPAVASKRYLTNKVDRSVGGLVAQQQCVGPLQTPLADVAVVALSHEELIGAATALGEQPVKSLLDPKVAARLAVAEALTNLVFALVTDLRDVKCSGNWMWAAKLPGEGAALADACEAMVAVMAALGVAVDGGKDSLSMAARVGTETVRAPGSLVISAYAVCPDITATVTPDLKHPEGRGHLLYVALSPGQHRLGGTALAQCFSQLGEHPPDLDLPENLVRAFSITQGLLKDRLLCSGHDVSDGGLVTCLLEMAFAGNCGLQVDVPVPRVDVLSVLFAEEPGLVLEVQEPDLAQVLKRYRDAGLHCLELGHTGEAGPHAMVRVSVNGAVVLEEPVGELRALWEETSFQLDRLQAEPRCVAEEERGLRERMGPSYCLPPTFPKASVPREPGGPSPRVAILREEGSNGDREMADAFHLAGFEVWDVTMQDLCSGAIGLDTFRGVAFVGGFSYADVLGSAKGWAAAVTFHPRAGAELRRFRKRPDTFSLGVCNGCQLLALLGWVGGDPNEDAAEMGPDSQPARPGLLLRHNLSGRYESRWASVRVGPGPALMLRGMEGAVLPVWSAHGEGYVAFSSPELQAQIEARGLAPLHWADDDGNPTEQYPLNPNGSPGGVAGICSCDGRHLAVMPHPERAVRPWQWAWRPPPFDTLTTSPWLQLFINARNWTLEGSC

SEQ ID NO: 58023 - protein, 747 aa, Homo sapiens
VKGERRIVLVDDRECPVRRNGQGDAPPTPLPTPVDLELEWVLGKMPRKEFFLQRKPPMLQPLALPPGLSVHQALERVLRLPAVASKRYLTNKVDRSVGGLVAQQQCVGPLQTPLADVAVVALSHEELIGAATALGEQPVKSLLDPKVAARLAVAEALTNLVFALVTDLRDVKCSGNWMWAAKLPGEGAALADACEAMVAVMAALGVAVDGGKDSLSMAARVGTETVRAPGSLVISAYAVCPDITATVTPDLKHPEGRGHLLYVALSPGQHRLGGTALAQCFSQLGEHPPDLDLPENLVRAFSITQGLLKDRLLCSGHDVSDGGLVTCLLEMAFAGNCGLQVDVPVPRVDVLSVLFAEEPGLVLEVQEPDLAQVLKRYRDAGLHCLELGHTGEAGPHAMVRVSVNGAVVLEEPVGELRALWEETSFQLDRLQAEPRCVAEEERGLRERMGPSYCLPPTFPKASVPREPGGPSPRVAILREEGSNGDREMADAFHLAGFEVWDVTMQDLCSGAIGLDTFRGVAFVGGFSYADVLGSAKGWAAAVTFHPRAGAELRRFRKRPDTFSLGVCNGCQLLALLGWVGGDPNEDAAEMGPDSQPARPGLLLRHNLSGRYESRWASVRVGPGPALMLRGMEGAVLPVWSAHGEGYVAFSSPELQAQIEARGLAPLHWADDDGNPTEQYPLNPNGSPGGVAGICSCDGRHLAVMPHPERAVRPWQWAWRPPPFDTLTTSPWLQLFINARNWTLEGSC

SEQ ID NO: 58024 - protein, 433 aa, Homo sapiens
MAARVLIIGSGGREHTLAWKLAQSHHVKQVLVAPGNAGTACSEKISNTAISISDHTALAQFCKEKKIEFVVVGPEAPLAAGIVGNLRSAGVQCFGPTAEAAQLESSKRFAKEFMDRHGIPTAQWKAFTKPEEACSFILSADFPALVVKASGLAAGKGVIVAKSKEEACKAVQEIMQEKAFGAAGETIVIEELLDGEEVSCLCFTDGKTVAPMPPAQDHKRLLEGDGGPNTGGMGAYCPAPQVSNDLLLKIKDTVLQRTVDGMQQEGTPYTGILYAGIMLTKNGPKVLEFNCRFGDPECQVILPLLKSDLYEVIQSTLDGLLCTSLPVWLENHTALTVVMASKGYPGDYTKGVEITGFPEAQALGLEVFHAGTALKNGKVVTHGGRVLAVTAIRENLISALEEAKKGLAAIKFEGAIYRKDVGFRAIAFLQQPR

SEQ ID NO: 58025 - protein, 1010 aa, Homo sapiens
MAARVLIIGSGGREHTLAWKLAQSHHVKQVLVAPGNAGTACSEKISNTAISISDHTALAQFCKEKKIEFVVVGPEAPLAAGIVGNLRSAGVQCFGPTAEAAQLESSKRFAKEFMDRHGIPTAQWKAFTKPEEACSFILSADFPALVVKASGLAAGKGVIVAKSKEEACKAVQEIMQEKAFGAAGETIVIEELLDGEEVSCLCFTDGKTVAPMPPAQDHKRLLEGDGGPNTGGMGAYCPAPQVSNDLLLKIKDTVLQRTVDGMQQEGTPYTGILYAGIMLTKNGPKVLEFNCRFGDPECQVILPLLKSDLYEVIQSTLDGLLCTSLPVWLENHTALTVVMASKGYPGDYTKGVEITGFPEAQALGLEVFHAGTALKNGKVVTHGGRVLAVTAIRENLISALEEAKKGLAAIKFEGAIYRKDVGFRAIAFLQQPRSLTYKESGVDIAAGNMLVKKIQPLAKATSRSGCKVDLGGFAGLFDLKAAGFKDPLLASGTDGVGTKLKIAQLCNKHDTIGQDLVAMCVNDILAQGAEPLFFLDYFSCGKLDLSVTEAVVAGIAKACGKAGCALLGGETAEMPDMYPPGEYDLAGFAVGAMERDQKLPHLERITEGDVVVGIASSGLHSNGFSLVRKIVAKSSLQYSSPAPDGCGDQTLGDLLLTPTRIYSHSLLPVLRSGHVKAFAHITGGGLLENIPRVLPEKLGVDLDAQTWRIPRVFSWLQQEGHLSEEEMARTFNCGVGAVLVVSKEQTEQILRDIQQHKEEAWVIGSVVARAEGSPRVKVKNLIESMQINGSVLKNGSLTNHFSFEKKKARVAVLISGTGSNLQALIDSTREPNSSAQIDIVISNKAAVAGLDKAERAGIPTRVINHKLYKNRVEFDSAIDLVLEEFSIDIVCLAGFMRILSGPFVQKWNGKMLNIHPSLLPSFKGSNAHEQALETGVTVTGCTVHFVAEDVDAGQIILQEAVPVKRGDTVATLSERVKLAEHKIFPAALQLVASGTVQLGENGKICWVKEE

SEQ ID NO: 58026 - protein, 1010 aa, Homo sapiens; identical to SEQ ID NO: 58025

SEQ ID NO: 58027 - protein, 1010 aa, Homo sapiens; identical to SEQ ID NO: 58025

SEQ ID NO: 58028 - protein, 232 aa, Homo sapiens
MAARVLIIGSGGREHTLAWKLAQSHHVKQVLVAPGNAGTACSEKISNTAISISDHTALAQFCKEKKIEFVVVGPEAPLAAGIVGNLRSAGVQCFGPTAEAAQLESSKRFAKEFMDRHGIPTAQWKAFTKPEEACSFILSADFPALVVKASGLAAGKGVIVAKSKEEACKAVQEIMQEKAFGAAGETIVIEELLDGEEVSCLCFTDGKTVAPMPPAQDHKRLLEGDGGPNTGG

SEQ ID NO: 58029 - protein, 241 aa, Homo sapiens
MAARVLIIGSGGREHTLAWKLAQSHHVKQVLVAPGNAGTACSEKISNTAISISDHTALAQFCKEKKIEFVVVGPEAPLAAGIVGNLRSAGVQCFGPTAEAAQLESSKRFAKEFMDRHGIPTAQWKAFTKPEEACSFILSADFPALVVKASGLAAGKGVIVAKSKEEACKAVQEIMQEKAFGAAGETIVIEELLDGEEVSCLCFTDGKTVAPMPPAQDHKRLLEGDGGPNTGGMGAYCPAPQ

SEQ ID NO: 58030 - protein, 138 aa, Homo sapiens
MAARVLIIGSGGREHTLAWKLAQSHHVKQVLVAPGNAGTACSEKISNTAISISDHTALAQFCKEKKIEFVVVGPEAPLAAGIVGNLRSAGVQCFGPTAEAAQLESSKRFAKEFMDRHGIPTAQWKAFTKPEEACSFIL

SEQ ID NO: 58031 - protein, 136 aa, Homo sapiens
MAARVLIIGSGGREHTLAWKLAQSHHVKQVLVAPGNAGTACSEKISNTAISISDHTALAQFCKEKKIEFVVVGPEAPLAAGIVGNLRSAGVQCFGPTAEAAQLESSKRFAKEFMDRHGIPTAQWKAFTKPEEACSF

SEQ ID NO: 58032 - protein, 562 aa, Homo sapiens
MLVKKIQPLAKATSRSGCKVDLGGFAGLFDLKAAGFKDPLLASGTDGVGTKLKIAQLCNKHDTIGQDLVAMCVNDILAQGAEPLFFLDYFSCGKLDLSVTEAVVAGIAKACGKAGCALLGGETAEMPDMYPPGEYDLAGFAVGAMERDQKLPHLERITEGDVVVGIASSGLHSNGFSLVRKIVAKSSLQYSSPAPDGCGDQTLGDLLLTPTRIYSHSLLPVLRSGHVKAFAHITGGGLLENIPRVLPEKLGVDLDAQTWRIPRVFSWLQQEGHLSEEEMARTFNCGVGAVLVVSKEQTEQILRDIQQHKEEAWVIGSVVARAEGSPRVKVKNLIESMQINGSVLKNGSLTNHFSFEKKKARVAVLISGTGSNLQALIDSTREPNSSAQIDIVISNKAAVAGLDKAERAGIPTRVINHKLYKNRVEFDSAIDLVLEEFSIDIVCLAGFMRILSGPFVQKWNGKMLNIHPSLLPSFKGSNAHEQALETGVTVTGCTVHFVAEDVDAGQIILQEAVPVKRGDTVATLSERVKLAEHKIFPAALQLVASGTVQLGENGKICWVKEE

SEQ ID NO: 58033 - protein, 754 aa, Homo sapiens
MSRPLSDQEKRKQISVRGLAGVENVTELKKNFNRHLHFTLVKDRNVATPRDYYFALAHTVRDHLVGRWIRTQQHYYEKDPKKISGGWQMEEADDWLRYGNPWEKARPEFTLPVHFYGHVEHTSQGAKWVDTQVVLAMPYDTPVPGYRNNVVNTMRLWSAKAPNDFNLKDFNVGGYIQAVLDRNLAENISRVLYPNDNFFEGKELRLKQEYFVVAATLQDIIRRFKSSKFGCRDPVRTNFDAFPDKVAIQLNDTHPSLAIPELMRILVDLERMDWDKAWDVTVRTCAYTNHTVLPEALERWPVHLLETLLPRHLQIIYEINQRFLNRVAAAFPGDVDRLRRMSLVEEGAVKRINMAHLCIAGSHAVNGVARIHSEILKKTIFKDFYELEPHKFQNKTNGITPRRWLVLCNPGLAEVIAERIGEDFISDLDQLRKLLSFVDDEAFIRDVAKVKQENKLKFAAYLEREYKVHINPNSLFDIQVKRIHEYKRQLLNCLHVITLYNRIKREPNKFFVPRTVMIGGKAAPGYHMAKMIIRLVTAIGDVVNHDPAVGDRLRVIFLENYRVSLAEKVIPAADLSEQISTAGTEASGTGNMKFMLNGALTIGTMDGANVEMAEEAGEENFFIFGMRVEDVDKLDQRGYNAQEYYDRIPELRQVIEQLSSGFFSPKQPDLFKDIVNMLMHHDRFKVFADYEDYIKCQEKVSALYKNPREWTRMVIRNIATSGKFSSDRTIAQYAREIWGVEPSRQRLPAPDEAI

SEQ ID NO: 58034 - protein, 1210 aa, Homo sapiens
MRSRSNSGVRLDGYARLVQQTILCHQNPVTGLLPASYDQKDAWVRDNVYSILAVWGLGLAYRKNADRDEDKAKAYELEQSVVKLMRGLLHCMIRQVDKVESFKYSQSTKDSLHAKYNTKTCATVVGDDQWGHLQLDATSVYLLFLAQMTASGLHIIHSLDEVNFIQNLVFYIEAAYKTADFGIWERGDKTNQGISELNASSVGMAKAALEALDELDLFGVKGGPQSVIHVLADEVQHCQSILNSLLPRASTSKEVDASLLSVVSFPAFAVEDSQLVELTKQEIITKLQGRYGCCRFLRDGYKTPKEDPNRLYYEPAELKLFENIECEWPLFWTYFILDGVFSGNAEQVQEYKEALEAVLIKGKNGVPLLPELYSVPPDRVDEEYQNPHTVDRVPMGKLPHMWGQSLYILGSLMAEGFLAPGEIDPLNRRFSTVPKPDVVVQVSILAETEEIKTILKDKGIYVETIAEVYPIRVQPARILSHIYSSLGCNNRMKLSGRPYRHMGVLGTSKLYDIRKTIFTFTPQFIDQQQFYLALDNKMIVEMLRTDLSYLCSRWRMTGQPTITFPISHSMLDEDGTSLNSSILAALRKMQDGYFGGARVQTGKLSEFLTTSCCTHLSFMDPGPEGKLYSEDYDDNYDYLESGNWMNDYDSTSHARCGDEVARYLDHLLAHTAPHPKLAPTSQKGGLDRFQAAVQTTCDLMSLVTKAKELHVQNVHMYLPTKLFQASRPSFNLLDSPHPRQENQVPSVRVEIHLPRDQSGEVDFKALVLQLKETSSLQEQADILYMLYTMKGPDWNTELYNERSATVRELLTELYGKVGEIRHWGLIRYISGILRKKVEALDEACTDLLSHQKHLTVGLPPEPREKTISAPLPYEALTQLIDEASEGDMSISILTQEIMVYLAMYMRTQPGLFAEMFRLRIGLIIQVMATELAHSLRCSAEEATEGLMNLSPSAMKNLLHHILSGKEFGVERSVRPTDSNVSPAISIHEIGAVGATKTERTGIMQLKSEIKQSPGTSMTPSSGSFPSAYDQQSSKDSRQGQWQRRRRLDGALNRVPVGFYQKVWKVLQKCHGLSVEGFVLPSSTTREMTPGEIKFSVHVESVLNRVPQPEYRQLLVEAILVLTMLADIEIHSIGSIIAVEKIVHIANDLFLQEQKTLGADDTMLAKDPASGICTLLYDSAPSGRFGTMTYLSKAAATYVQEFLPHSICAMQ

SEQ ID NO: 58035 - protein, 1240 aa, Homo sapiens
MRSRSNSGVRLDGYARLVQQTILCHQNPVTGLLPASYDQKDAWVRDNVYSILAVWGLGLAYRKNADRDEDKAKAYELEQSVVKLMRGLLHCMIRQVDKVESFKYSQSTKDSLHAKYNTKTCATVVGDDQWGHLQLDATSVYLLFLAQMTASGLHIIHSLDEVNFIQNLVFYIEAAYKTADFGIWERGDKTNQGISELNASSVGMAKAALEALDELDLFGVKGGPQSVIHVLADEVQHCQSILNSLLPRASTSKEVDASLLSVVSFPAFAVEDSQLVELTKQEIITKLQGRYGCCRFLRDGYKTPKEDPNRLYYEPAELKLFENIECEWPLFWTYFILDGVFSGNAEQVQEYKEALEAVLIKGKNGVPLLPELYSVPPDRVDEEYQNPHTVDRVPMGKLPHMWGQSLYILGSLMAEGFLAPGEIDPLNRRFSTVPKPDVVVQVSILAETEEIKTILKDKGIYVETIAEVYPIRVQPARILSHIYSSLGCNNRMKLSGRPYRHMGVLGTSKLYDIRKTIFTFTPQFIDQQQFYLALDNKMIVEMLRTDLSYLCSRWRMTGQPTITFPISHSMLDEDGTSLNSSILAALRKMQDGYFGGARVQTGKLSEFLTTSCCTHLSFMDPGPEGKLYSEDYDDNYDYLESGNWMNDYDSTSHARCGDEVARYLDHLLAHTAPHPKLAPTSQKGGLDRFQAAVQTTCDLMSLVTKAKELHVQNVHMYLPTKLFQASRPSFNLLDSPHPRQENQVPSVRVEIHLPRDQSGEVDFKALVLQLKETSSLQEQADILYMLYTMKGPDWNTELYNERSATVRELLTELYGKVGEIRHWGLIRYISGILRKKVEALDEACTDLLSHQKHLTVGLPPEPREKTISAPLPYEALTQLIDEASEGDMSISILTQEIMVYLAMYMRTQPGLFAEMFRLRIGLIIQVMATELAHSLRCSAEEATEGLMNLSPSAMKNLLHHILSGKEFGVERSVRPTDSNVSPAISIHEIGAVGATKTERTGIMQLKSEIKQVEFRRLSISAESQSNGGHPLGIDLMSPSFMSPGTSMTPSSGSFPSAYDQQSSKDSRQGQWQRRRRLDGALNRVPVGFYQKVWKVLQKCHGLSVEGFVLPSSTTREMTPGEIKFSVHVESVLNRVPQPEYRQLLVEAILVLTMLADIEIHSIGSIIAVEKIVHIANDLFLQEQKTLGADDTMLAKDPASGICTLLYDSAPSGRFGTMTYLSKAAATYVQEFLPHSICAMQ

SEQ ID NO: 58036 - protein, 1223 aa, Homo sapiens
MRSRSNSGVRLDGYARLVQQTILCHQNPVTGLLPASYDQKDAWVRDNVYSILAVWGLGLAYRKNADRDEDKAKAYELEQSVVKLMRGLLHCMIRQVDKVESFKYSQSTKDSLHAKYNTKTCATVVGDDQWGHLQLDATSVYLLFLAQMTASGLHIIHSLDEVNFIQNLVFYIEAAYKTADFGIWERGDKTNQGISELNASSVGMAKAALEALDELDLFGVKGGPQSVIHVLADEVQHCQSILNSLLPRASTSKEVDASLLSVVSFPAFAVEDSQLVELTKQEIITKLQGRYGCCRFLRDGYKTPKEDPNRLYYEPAELKLFENIECEWPLFWTYFILDGVFSGNAEQVQEYKEALEAVLIKGKNGVPLLPELYSVPPDRVDEEYQNPHTVDRVPMGKLPHMWGQSLYILGSLMAEGFLAPGEIDPLNRRFSTVPKPDVVVQVSILAETEEIKTILKDKGIYVETIAEVYPIRVQPARILSHIYSSLGCNNRMKLSGRPYRHMGVLGTSKLYDIRKTIFTFTPQFIDQQQFYLALDNKMIVEMLRTDLSYLCSRWRMTGQPTITFPISHSMLDEDGTSLNSSILAALRKMQDGYFGGARVQTGKLSEFLTTSCCTHLSFMDPGPEGKLYSEDYDDNYDYLESGNWMNDYDSTSHARCGDEVARYLDHLLAHTAPHPKLAPTSQKGGLDRFQAAVQTTCDLMSLVTKAKELHVQNVHMYLPTKLFQASRPSFNLLDSPHPRQENQVPSVRVEIHLPRDQSGEVDFKALVLQLKETSSLQEQADILYMLYTMKGPDWNTELYNERSATVRELLTELYGKVGEIRHWGLIRYISGILRKKVEALDEACTDLLSHQKHLTVGLPPEPREKTISAPLPYEALTQLIDEASEGDMSISILTQEIMVYLAMYMRTQPGLFAEMFRLRIGLIIQVMATELAHSLRCSAEEATEGLMNLSPSAMKNLLHHILSGKEFGVERSVRPTDSNVSPAISIHEIGAVGATKTERTGIMQLKSEIKQVEFRRLSISAESQSPGTSMTPSSGSFPSAYDQQSSKDSRQGQWQRRRRLDGALNRVPVGFYQKVWKVLQKCHGLSVEGFVLPSSTTREMTPGEIKFSVHVESVLNRVPQPEYRQLLVEAILVLTMLADIEIHSIGSIIAVEKIVHIANDLFLQEQKTLGADDTMLAKDPASGICTLLYDSAPSGRFGTMTYLSKAAATYVQEFLPHSICAMQ

SEQ ID NO: 58037 - protein, 1181 aa, Homo sapiens
MRSRSNSGVRLDGYARLVQQTILCHQNPVTGLLPASYDQKDAWVRDNVYSILAVWGLGLAYRKNADRDEDKAKAYELEQSVVKLMRGLLHCMIRQVDKVESFKYSQSTKDSLHAKYNTKTCATVVGDDQWGHLQLDATSVYLLFLAQMTASGLHIIHSLDEVNFIQNLVFYIEAAYKTADFGIWERGDKTNQGISELNASSVGMAKAALEALDELDLFGVKGGPQSVIHVLADEVQHCQSILNSLLPRASTSKEVDASLLSVVSFPAFAVEDSQLVELTKQEIITKLQGRYGCCRFLRDGYKTPKEDPNRLYYEPAELKLFENIECEWPLFWTYFILDGVFSGNAEQVQEYKEALEAVLIKGKNGVPLLPELYSVPPDRVDEEYQNPHTVDRVPMGKLPHMWGQSLYILGSLMAEGFLAPGEIDPLNRRFSTVPKPDVVVQVSILAETEEIKTILKDKGIYVETIAEVYPIRVQPARILSHIYSSLGCNNRMKLSGRPYRHMGVLGTSKLYDIRKTIFTFTPQFIDQQQFYLALDNKMIVEMLRTDLSYLCSRWRMTGQPTITFPISHSMLDEDGTSLNSSILAALRKMQDGYFGGARVQTGKLSEFLTTSCCTHLSFMDPGPEGKLYSEDYDDNYDYLESGNWMNDYDSTSHDVHMYLPTKLFQASRPSFNLLDSPHPRQENQVPSVRVEIHLPRDQSGEVDFKALVLQLKETSSLQEQADILYMLYTMKGPDWNTELYNERSATVRELLTELYGKVGEIRHWGLIRYISGILRKKVEALDEACTDLLSHQKHLTVGLPPEPREKTISAPLPYEALTQLIDEASEGDMSISILTQEIMVYLAMYMRTQPGLFAEMFRLRIGLIIQVMATELAHSLRCSAEEATEGLMNLSPSAMKNLLHHILSGKEFGVERSVRPTDSNVSPAISIHEIGAVGATKTERTGIMQLKSEIKQVEFRRLSISAESQSNGGHPLGIDLMSPSFMSPGTSMTPSSGSFPSAYDQQSSKDSRQGQWQRRRRLDGALNRVPVGFYQKVWKVLQKCHGLSVEGFVLPSSTTREMTPGEIKFSVHVESVLNRVPQPEYRQLLVEAILVLTMLADIEIHSIGSIIAVEKIVHIANDLFLQEQKTLGADDTMLAKDPASGICTLLYDSAPSGRFGTMTYLSKAAATYVQEFLPHSICAMQ

SEQ ID NO: 58038 - protein, 1151 aa, Homo sapiens
MRSRSNSGVRLDGYARLVQQTILCHQNPVTGLLPASYDQKDAWVRDNVYSILAVWGLGLAYRKNADRDEDKAKAYELEQSVVKLMRGLLHCMIRQVDKVESFKYSQSTKDSLHAKYNTKTCATVVGDDQWGHLQLDATSVYLLFLAQMTASGLHIIHSLDEVNFIQNLVFYIEAAYKTADFGIWERGDKTNQGISELNASSVGMAKAALEALDELDLFGVKGGPQSVIHVLADEVQHCQSILNSLLPRASTSKEVDASLLSVVSFPAFAVEDSQLVELTKQEIITKLQGRYGCCRFLRDGYKTPKEDPNRLYYEPAELKLFENIECEWPLFWTYFILDGVFSGNAEQVQEYKEALEAVLIKGKNGVPLLPELYSVPPDRVDEEYQNPHTVDRVPMGKLPHMWGQSLYILGSLMAEGFLAPGEIDPLNRRFSTVPKPDVVVQVSILAETEEIKTILKDKGIYVETIAEVYPIRVQPARILSHIYSSLGCNNRMKLSGRPYRHMGVLGTSKLYDIRKTIFTFTPQFIDQQQFYLALDNKMIVEMLRTDLSYLCSRWRMTGQPTITFPISHSMLDEDGTSLNSSILAALRKMQDGYFGGARVQTGKLSEFLTTSCCTHLSFMDPGPEGKLYSEDYDDNYDYLESGNWMNDYDSTSHDVHMYLPTKLFQASRPSFNLLDSPHPRQENQVPSVRVEIHLPRDQSGEVDFKALVLQLKETSSLQEQADILYMLYTMKGPDWNTELYNERSATVRELLTELYGKVGEIRHWGLIRYISGILRKKVEALDEACTDLLSHQKHLTVGLPPEPREKTISAPLPYEALTQLIDEASEGDMSISILTQEIMVYLAMYMRTQPGLFAEMFRLRIGLIIQVMATELAHSLRCSAEEATEGLMNLSPSAMKNLLHHILSGKEFGVERSVRPTDSNVSPAISIHEIGAVGATKTERTGIMQLKSEIKQSPGTSMTPSSGSFPSAYDQQSSKDSRQGQWQRRRRLDGALNRVPVGFYQKVWKVLQKCHGLSVEGFVLPSSTTREMTPGEIKFSVHVESVLNRVPQPEYRQLLVEAILVLTMLADIEIHSIGSIIAVEKIVHIANDLFLQEQKTLGADDTMLAKDPASGICTLLYDSAPSGRFGTMTYLSKAAATYVQEFLPHSICAMQ

SEQ ID NO: 58039 - protein, 387 aa, Homo sapiens
MTRDEALPDSHSAQDFYENYEPKEILGRGVSSVVRRCIHKPTSQEYAVKVIDVTGGGSFSPEEVRELREATLKEVDILRKVSGHPNIIQLKDTYETNTFFFLVFDLMKRGELFDYLTEKVTLSEKETRKIMRALLEVICTLHKLNIVHRDLKPENILLDDNMNIKLTDFGFSCQLEPGERLREVCGTPSYLAPEIIECSMNEDHPGYGKEVDMWSTGVIMYTLLAGSPPFWHRKQMLMLRMIMSGNYQFGSPEWDDYSDTVKDLVSRFLVVQPQNRYTAEEALAHPFFQQYLVEEVRHFSPRGKFKVIALTVLASVRIYYQYRRVKPVTREIVIRDPYALRPLRRLIDAYAFRIYGHWVKKGQQQNRAALFENTPKAVLLSLAEEDY

SEQ ID NO: 58040 - protein, 419 aa, Homo sapiens
MTRDEALPDSHSAQDFYENYEPKEILGRGVSSVVRRCIHKPTSQEYAVKVIDVTGGGSFSPEEVRELREATLKEVDILRKVSGHPNIIQLKDTYETNTFFFLVFDLWEDTDTMEMEQKWCLGWDSPKSTNFRAQGRARMKRGELFDYLTEKVTLSEKETRKIMRALLEVICTLHKLNIVHRDLKPENILLDDNMNIKLTDFGFSCQLEPGERLREVCGTPSYLAPEIIECSMNEDHPGYGKEVDMWSTGVIMYTLLAGSPPFWHRKQMLMLRMIMSGNYQFGSPEWDDYSDTVKDLVSRFLVVQPQNRYTAEEALAHPFFQQYLVEEVRHFSPRGKFKVIALTVLASVRIYYQYRRVKPVTREIVIRDPYALRPLRRLIDAYAFRIYGHWVKKGQQQNRAALFENTPKAVLLSLAEEDY

SEQ ID NO: 58041 - protein, 333 aa, Homo sapiens
MHPQAHEPGVRREGHRRHRWRQLQPGGGAGAARSHAEGGGHPAQGLRAPQHQMKRGELFDYLTEKVTLSEKETRKIMRALLEVICTLHKLNIVHRDLKPENILLDDNMNIKLTDFGFSCQLEPGERLREVCGTPSYLAPEIIECSMNEDHPGYGKEVDMWSTGVIMYTLLAGSPPFWHRKQMLMLRMIMSGNYQFGSPEWDDYSDTVKDLVSRFLVVQPQNRYTAEEALAHPFFQQYLVEEVRHFSPRGKFKVIALTVLASVRIYYQYRRVKPVTREIVIRDPYALRPLRRLIDAYAFRIYGHWVKKGQQQNRAALFENTPKAVLLSLAEEDY

SEQ ID NO: 58042 - protein, 842 aa, Homo sapiens
MSRPLSDQEKRKQISVRGLAGVENVTELKKNFNRHLHFTLVKDRNVATPRDYYFALAHTVRDHLVGRWIRTQQHYYEKDPKRIYYLSLEFYMGRTLQNTMVNLALENACDEATYQLGLDMEELEEIEEDAGLGNGGLGRLAACFLDSMATLGLAAYGYGIRYEFGIFNQKISGGWQMEEADDWLRYGNPWEKARPEFTLPVHFYGHVEHTSQGAKWVDTQVVLAMPYDTPVPGYRNNVVNTMRLWSAKAPNDFNLKDFNVGGYIQAVLDRNLAENISRVLYPNDNFFEGKELRLKQEYFVVAATLQDIIRRFKSSKFGCRDPVRTNFDAFPDKVAIQLNDTHPSLAIPELMRILVDLERMDWDKAWDVTVRTCAYTNHTVLPEALERWPVHLLETLLPRHLQIIYEINQRFLNRVAAAFPGDVDRLRRMSLVEEGAVKRINMAHLCIAGSHAVNGVARIHSEILKKTIFKDFYELEPHKFQNKTNGITPRRWLVLCNPGLAEVIAERIGEDFISDLDQLRKLLSFVDDEAFIRDVAKVKQENKLKFAAYLEREYKVHINPNSLFDIQVKRIHEYKRQLLNCLHVITLYNRIKREPNKFFVPRTVMIGGKAAPGYHMAKMIIRLVTAIGDVVNHDPAVGDRLRVIFLENYRVSLAEKVIPAADLSEQISTAGTEASGTGNMKFMLNGALTIGTMDGANVEMAEEAGEENFFIFGMRVEDVDKLDQRGYNAQEYYDRIPELRQVIEQLSSGFFSPKQPDLFKDIVNMLMHHDRFKVFADYEDYIKCQEKVSALYKNPREWTRMVIRNIATSGKFSSDRTIAQYAREIWGVEPSRQRLPAPDEAI

SEQ ID NO: 58043 - protein, 832 aa, Homo sapiens
MSRPLSDQEKRKQISVRGLAGVENVTELKKNFNRHLHFTLVKDRNVATPRDYYFALAHTVRDHLVGRWIRTQQHYYEKDPKRIYYLSLEFYMGRTLQNTMVNLALENACDEATYQVGLGRLAACFLDSMATLGLAAYGYGIRYEFGIFNQKISGGWQMEEADDWLRYGNPWEKARPEFTLPVHFYGHVEHTSQGAKWVDTQVVLAMPYDTPVPGYRNNVVNTMRLWSAKAPNDFNLKDFNVGGYIQAVLDRNLAENISRVLYPNDNFFEGKELRLKQEYFVVAATLQDIIRRFKSSKFGCRDPVRTNFDAFPDKVAIQLNDTHPSLAIPELMRILVDLERMDWDKAWDVTVRTCAYTNHTVLPEALERWPVHLLETLLPRHLQIIYEINQRFLNRVAAAFPGDVDRLRRMSLVEEGAVKRINMAHLCIAGSHAVNGVARIHSEILKKTIFKDFYELEPHKFQNKTNGITPRRWLVLCNPGLAEVIAERIGEDFISDLDQLRKLLSFVDDEAFIRDVAKVKQENKLKFAAYLEREYKVHINPNSLFDIQVKRIHEYKRQLLNCLHVITLYNRIKREPNKFFVPRTVMIGGKAAPGYHMAKMIIRLVTAIGDVVNHDPAVGDRLRVIFLENYRVSLAEKVIPAADLSEQISTAGTEASGTGNMKFMLNGALTIGTMDGANVEMAEEAGEENFFIFGMRVEDVDKLDQRGYNAQEYYDRIPELRQVIEQLSSGFFSPKQPDLFKDIVNMLMHHDRFKVFADYEDYIKCQEKVSALYKNPREWTRMVIRNIATSGKFSSDRTIAQYAREIWGVEPSRQRLPAPAPHAEGGVLELDL

SEQ ID NO: 58044 - protein, 843 aa, Homo sapiens
MAKPLTDSEKRKQISVRGLAGLGDVAEVRKSFNRHLHFTLVKDRNVATPRDYFFALAHTVRDHLVGRWIRTQQHYYERDPKRIYYLSLEFYMGRTLQNTMVNLGLQNACDEAIYQLGLDLEELEEIEEDAGLGNGGLGRLAACFLDSMATLGLAAYGYGIRYEFGIFNQKIVNGWQVEEADDWLRYGNPWEKARPEYMLPVHFYGRVEHTPDGVKWLDTQVVLAMPYDTPVPGYKNNTVNTMRLWSAKAPNDFKLQDFNVGDYIEAVLDRNLAENISRVLYPNDNFFEGKELRLKQEYFVVAATLQDIIRRFKSSKFGCRDPVRTCFETFPDKVAIQLNDTHPALSIPELMRILVDVEKVDWDKAWEITKKTCAYTNHTVLPEALERWPVSMFEKLLPRHLEIIYAINQRHLDHVAALFPGDVDRLRRMSVIEEGDCKRINMAHLCVIGSHAVNGVARIHSEIVKQSVFKDFYELEPEKFQNKTNGITPRRWLLLCNPGLADTIVEKIGEEFLTDLSQLKKLLPLVSDEVFIRDVAKVKQENKLKFSAFLEKEYKVKINPSSMFDVHVKRIHEYKRQLLNCLHVVTLYNRIKRDPAKAFVPRTVMIGGKAAPGYHMAKLIIKLVTSIGDVVNHDPVVGDRLKVIFLENYRVSLAEKVIPAADLSQQISTAGTEASGTGNMKFMLNGALTIGTMDGANVEMAEEAGAENLFIFGLRVEDVEALDRKGYNAREYYDHLPELKQAVDQISSGFFSPKEPDCFKDIVNMLMHHDRFKVFADYEAYMQCQAQVDQLYRNPKEWTKKVIRNIACSGKFSSDRTITEYAREIWGVEPSDLQIPPPNIPRD

SEQ ID NO: 58045 - protein, 245 aa, Homo sapiens
  VARIANT 1: note = MOD_RES - Any amino acid
XKHHHTVPPSVTPKALDRSPPCPEMFTRAAPGYHMAKLIIKLVTSIGDVVNHDPVVGDRLKVIFLENYRVSLAEKVIPAADLSQQISTAGTEASGTGNMKFMLNGALTIGTMDGANVEMAEEAGAENLFIFGLRVEDVEALDRKGYNAREYYDHLPELKQAVDQISSGFFSPKEPDCFKDIVNMLMHHDRFKVFADYEAYMQCQAQVDQLYRNPKEWTKKVIRNIACSGKFSSDRTITEYAREIW

SEQ ID NO: 58046 - protein, 324 aa, Homo sapiens
MDAPRQVVNFGPGPAKLPHSVLLEIQKELLDYKGVGISVLEMSHRSSDFAKIINNTENLVRELLAVPDNYKVIFLQGGGCGQFSAVPLNLIGLKAGRCADYVVTGAWSAKAAEEAKKFGTINIVHPKLGSYTKIPDPSTWNLNPDASYVYYCANETVHGVEFDFIPDVKGAVLVCDMSSNFLSKPVDVSKFGVIFAGAQKNVGSAGVTVVIVRDDLLGFALRECPSVLEYKVQAGNSSLYNTPPCFSIYVMGLVLEWIKNNGGAAAMEKLSSIKSQTIYEIIDNSQGFYVSVGGIRASLYNAVTIEDVQKLAAFMKKFLEMHQL

SEQ ID NO: 58047 - protein, 370 aa, Homo sapiens
MDAPRQVVNFGPGPAKLPHSVLLEIQKELLDYKGVGISVLEMSHRSSDFAKIINNTENLVRELLAVPDNYKVIFLQGGGCGQFSAVPLNLIGLKAGRCADYVVTGAWSAKAAEEAKKFGTINIVHPKLGSYTKIPDPSTWNLNPDASYVYYCANETVHGVEFDFIPDVKGAVLVCDMSSNFLSKPVDVSKFGVIFAGAQKNVGSAGVTVVIVRDDLLGFALRECPSVLEYKVQAGNSSLYNTPPCFSIYVMGLVLEWIKNNGGAAAMEKLSSIKSQTIYEIIDNSQGFYVCPVEPQNRSKMNIPFRIGNAKGDDALEKRFLDKALELNMLSLKGHRSVGGIRASLYNAVTIEDVQKLAAFMKKFLEMHQL

SEQ ID NO: 58048 - protein, 194 aa, Homo sapiens
MSSNFLSKPVDVSKFGVIFAGAQKNVGSAGVTVVIVRDDLLGFALRECPSVLEYKVQAGNSSLYNTPPCFSIYVMGLVLEWIKNNGGAAAMEKLSSIKSQTIYEIIDNSQGFYVCPVEPQNRSKMNIPFRIGNAKGDDALEKRFLDKALELNMLSLKGHRSVGGIRASLYNAVTIEDVQKLAAFMKKFLEMHQL

SEQ ID NO: 58049 - protein, 349 aa, Homo sapiens
MSSLSGKVQTVLGLVEPSKLGRTLTHEHLAMTFDCCYCPPPPCQEAISKEPIVMKNLYWIQKNAYSHKENLQLNQETEAIKEELLYFKANGGGALVENTTTGISRDTQTLKRLAEETGVHIISGAGFYVDATHSSETRAMSVEQLTDVLMNEILHGADGTSIKCGIIGEIGCSWPLTESERKVLQATAHAQAQLGCPVIIHPGRSSRAPFQIIRILQEAGADISKTVMSHLDRTILDKKELLEFAQLGCYLEYDLFGTELLHYQLGPDIDMPDDNKRIRRVRLLVEEGCEDRILVAHDIHTKTRLMKYGGHGYSHILTNVVPKMLLRGITENVLDKILIENPKQWLTFK

SEQ ID NO: 58050 - protein, 349 aa, Homo sapiens; identical to SEQ ID NO: 58049

SEQ ID NO: 58051 - protein, 349 aa, Homo sapiens; identical to SEQ ID NO: 58049

SEQ ID NO: 58052 - protein, 302 aa, Homo sapiens
MSSLSGKVQTVLGLVEPSKLGRTLTHEHLAMTFDCCYCPPPPCQEAISKEPIVMKNLYWIQKNAYSHKENLQLNQETEAIKEELLYFKANGGGALVENTTTGISRDTQTLKRLAEETGVHIISGAGFYVDATHSSETRAMSVEQLTDVLMNEILHGADGTSIKCGIIGEIGCSWPLTESERKVLQATAHAQAQLGCPVIIHPGRSSRAPFQIIRILQEAGADISKTVMSHLDRVRLLVEEGCEDRILVAHDIHTKTRLMKYGGHGYSHILTNVVPKMLLRGITENVLDKILIENPKQWLTFK

SEQ ID NO: 58053 - protein, 349 aa, Homo sapiens; identical to SEQ ID NO: 58049

SEQ ID NO: 58054 - protein, 250 aa, Homo sapiens
MFSLPLSLPLCEDTAFLPSKCCSSHKTIKQARTLIMIFLASGTHFQTMLKSKLNVLTLKKEPLPAVIFHEPEAIELCTTTPLMKTRTHSGCKVTYLGKVSTTGMQFLSGCTEKPVIELWKKHTLAREDVFPANALLEIRPFQVWLHHLDHKGEATVHMDTFQVARIAYCTADHNVSPNIFAWVYREINDDLSYQMDCHAVECESKLEAKKLAHAMMEAFRKTFHSMKSDGRIHSNSSSEEVSQELESDDG

SEQ ID NO: 58055 - protein, 248 aa, Homo sapiens
MPRIAGNHLMLEESRTCSSPELLDGVWPCQPLHFGLPASEMHFQTMLKSKLNVLTLKKEPLPAVIFHEPEAIELCTTTPLMKTRTHSGCKVTYLGKVSTTGMQFLSGCTEKPVIELWKKHTLAREDVFPANALLEIRPFQVWLHHLDHKGEATVHMDTFQVARIAYCTADHNVSPNIFAWVYREINDDLSYQMDCHAVECESKLEAKKLAHAMMEAFRKTFHSMKSDGRIHSNSSSEEVSQELESDDG

SEQ ID NO: 58056 - protein, 217 aa, Homo sapiens
MWQPATERLQHFQTMLKSKLNVLTLKKEPLPAVIFHEPEAIELCTTTPLMKTRTHSGCKVTYLGKVSTTGMQFLSGCTEKPVIELWKKHTLAREDVFPANALLEIRPFQVWLHHLDHKGEATVHMDTFQVARIAYCTADHNVSPNIFAWVYREINDDLSYQMDCHAVECESKLEAKKLAHAMMEAFRKTFHSMKSDGRIHSNSSSEEVSQELESDDG

SEQ ID NO: 58057 - protein, 168 aa, Homo sapiens
MWQPATERLQVTYLGKVSTTGMQFLSGCTEKPVIELWKKHTLAREDVFPANALLEIRPFQVWLHHLDHKGEATVHMDTFQVARIAYCTADHNVSPNIFAWVYREINDDLSYQMDCHAVECESKLEAKKLAHAMMEAFRKTFHSMKSDGRIHSNSSSEEVSQELESDDG

SEQ ID NO: 58058 - protein, 250 aa, Homo sapiens; identical to SEQ ID NO: 58054

SEQ ID NO: 58059 - protein, 338 aa, Homo sapiens
MEQLRAAARLQIVLGHLGRPSAGAVVAHPTSGTISSASFHPQQFQYTLDNNVLTLEQRKFYEENGFLVIKNLVPDADIQRFRNEFEKICRKEVKPLGLTVMRDVTISKSEYAPSEKMITKVQDFQEDKELFRYCTLPEILKYVECFTGPNIMAMHTMLINKPPDSGKKTSRHPLHQDLHYFPFRPSDLIVCAWTAMEHISRNNGCLVVLPGTHKGSLKPHDYPKWEGGVNKMFHGIQDYEENKARVHLVMEKGDTVFFHPLLIHGSGQNKTQGFRKAISCHFASADCHYIDVKGTSQENIEKEVVGIAHKFFGAENSVNLKDIWMFRARLVKGERTNL

SEQ ID NO: 58060 - protein, 238 aa, Homo sapiens
MRDVTISKSEYAPSEKMITKVQDFQEDKELFRYCTLPEILKYVECFTGPNIMAMHTMLINKPPDSGKKTSRHPLHQDLHYFPFRPSDLIVCAWTAMEHISRNNGCLVVLPGTHKGSLKPHDYPKWEGGVNKMFHGIQDYEENKARVHLVMEKGDTVFFHPLLIHGSGQNKTQGFRKAISCHFASADCHYIDVKGTSQENIEKEVVGIAHKFFGAENSVNLKDIWMFRARLVKGERTNL

SEQ ID NO: 58061 - protein, 5142 aa, Homo sapiens
MGNEASLEGEGLPEGLAAAAAAGGGASGAGSPSHTAIPAGMEADLSQLSEEERRQIAAVMSRAQGLPKGSVPPAAAESPSMHRKQELDSSHPPKQSGRPPDPGRPAQPGLSKSRTTDTFRSEQKLPGRSPSTISLKESKSRTDLKEEHKSSMMPGFLSEVNALSAVSSVVNKFNPFDLISDSEASQEETTKKQKVVQKEQGKPEGIIKPPLQQQPPKPIPKQQGPGRDPLQQDGTPKSISSQQPEKIKSQPPGTGKPIQGPTQTPQTDHAKLPLQRDASRPQTKQADIVRGESVKPSLPSPSKPPIQQPTPGKPPAQQPGHEKSQPGPAKPPAQPSGLTKPLAQQPGTVKPPVQPPGTTKPPAQPLGPAKPPAQQTGSEKPSSEQPGPKALAQPPGVGKTPAQQPGPAKPPTQQVGTPKPLAQQPGLQSPAKAPGPTKTPVQQPGPGKIPAQQAGPGKTSAQQTGPTKPPSQLPGPAKPPPQQPGPAKPPPQQPGSAKPPSQQPGSTKPPPQQPGPAKPSPQQPGSTKPPSQQPGSAKPSAQQPSPAKPSAQQSTKPVSQTGSGKPLQPPTVSPSAKQPPSQGLPKTICPLCNTTELLLHVPEKANFNTCTECQTTVCSLCGFNPNPHLTEVKEWLCLNCQMKRALGGDLAPVPSSPQPKLKTAPVTTTSAVSKSSPQPQQTSPKKDAAPKQDLSKAPEPKKPPPLVKQPTLHGSPSAKAKQPPEADSLSKPAPPKEPSVPSEQDKAPVADDKPKQPKMVKPTTDLVSSSSATTKPDIPSSKVQSQAEEKTTPPLKTDSAKPSQSFPPTGEKVSPFDSKAIPRPASDSKIISHPGPSSESKGQKQVDPVQKKEEPKKAQTKMSPKPDAKPMPKGSPTPPGPRPTAGQTVPTPQQSPKPQEQSRRFSLNLGSITDAPKSQPTTPQETVTGKLFGFGASIFSQASNLISTAGQPGPHSQSGPGAPMKQAPAPSQPPTSQGPPKSTGQAPPAPAKSIPVKKETKAPAAEKLEPKAEQAPTVKRTETEKKPPPIKDSKSLTAEPQKAVLPTKLEKSPKPESTCPLCKTELNIGSKDPPNFNTCTECKNQVCNLCGFNPTPHLTEIQEWLCLNCQTQRAISGQLGDIRKMPPAPSGPKASPMPVPTESSSQKTAVPPQVKLVKKQEQEVKTEAEKVILEKVKETLSMEKIPPMVTTDQKQEESKLEKDKASALQEKKPLPEEKKLIPEEEKIRSEEKKPLLEEKKPTPEDKKLLPEAKTSAPEEQKHDLLKSQVQIAEEKLEGRVAPKTVQEGKQPQTKMEGLPSGTPQSLPKEDDKTTKTIKEQPQPPCTAKPDQVEPGKEKTEKEDDKSDTSSSQQPKSPQGLSDTGYSSDGISSSLGEIPSLIPTDEKDILKGLKKDSFSQESSPSSPSDLAKLESTVLSILEAQASTLADEKSEKKTQPHEVSPEQPKDQEKTQSLSETLEITISEEEIKESQEERKDTFKKDSQQDIPSSKDHKEKSEFVDDITTRREPYDSVEESSESENSPVPQRKRRTSVGSSSSDEYKQEDSQGSGEEEDFIRKQIIEMSADEDASGSEDDEFIRNQLKEISSSTESQKKEETKGKGKITAGKHRRLTRKSSTSIDEDAGRRHSWHDEDDEAFDESPELKYRETKSQESEELVVTGGGGLRRFKTIELNSTIADKYSAESSQKKTSLYFDEEPELEMESLTDSPEDRSRGEGSSSLHASSFTPGTSPTSVSSLDEDSDSSPSHKKGESKQQRKARHRPHGPLLPTIEDSSEEEELREEEELLKEQEKQREIEQQQRKSSSKKSKKDKDELRAQRRRERPKTPPSNLSPIEDASPTEELRQAAEMEELHRSSCSEYSPSIESDPEGFEISPEKIIEVQKVYKLPTAVSLYSPTDEQSIMQKEGSQKALKSAEEMYEEMMHKTHKYKAFPAANERDEVFEKEPLYGGMLIEDYIYESLVEDTYNGSVDGSLLTRQEEENGFMQQKGREQKIRLSEQIYEDPMQKITDLQKEFYELESLHSVVPQEDIVSSSFIIPESHEIVDLGTMVTSTEEERKLLDADAAYEELMKRQQMQLTPGSSPTQAPIGEDMTESTMDFDRMPDASLTSSVLSGASLTDSTSSATLSIPDVKITQHFSTEEIEDEYVTDYTREIQEIIAHESLILTYSEPSESATSVPPSDTPSLTSSVSSVCTTDSSSPITTLDSITTVYTEPVDMITKFEDSEEISSSTYFPGSIIDYPEEISVSLDRTAPPDGRASADHIVISLSDMASSIIESVVPKPEGPVADTVSTDLLISEKDPVKKAKKETGNGIILEVLEAYRDKKELEAERTKSSLSETVFDHPPSSVIALPMKEQLSTTYFTSGETFGQEKPASQLPSGSPSVSSLPAKPRPFFRSSSLDISAQPPPPPPPPPPPPPPPPPPPPPPLPPPTSPKPTILPKKKLTVASPVTTATPLFDAVTTLETTAVLRSNGLPVTRICTTAPPPVPPKPSSIPSGLVFTHRPEPSKPPIAPKPVIPQLPTTTQKPTDIHPKPTGLSLTSSMTLNLVTSADYKLPSPTSPLSPHSNKSSPRFSKSLTETYVVITLPSEPGTPTDSSASQAITSWPLGSPSKDLVSVEPVFSVVPPVTAVEIPISSEQTFYISGALQTFSATPVTAPSSFQAAPTSVTQFLTTEVSKTEVSATRSTAPSVGLSSISITIPPEPLALDNIHLEKPQYKEDGKLQLVGDVIDLRTVPKVEVKTTDKCIDLSASTMDVKRQITANEVYGKQISAVQPSIINLSVTSSIVTPVSLATETVTFVTCTASASYTTGTESLVGAEHAMTTPLQLTTSKHAEPPYRIPSDQVFPIAREEAPINLSLGTPAHAVTLAITKPVTVPPVGVTNGWTDSTVSQGITDGEVVDLSTTKSHRTVVTMDESTSSVMTKIIEDEKPVDLTAGRRAVCCDVVYKLPFGRSCTAQQPATTLPEDRFGYRDDHYQYDRSGPYGYRGIGGMKPSMSDTNLAEAGHFFYKSKNAFDYSEGTDTAVDLTSGRVTTGEVMDYSSKTTGPYPETRQVISGAGISTPQYSTARMTPPPGPQYCVGSVLRSSNGVVYSSVATPTPSTFAITTQPGSIFSTTVRDLSGIHTADAVTSLPAMHHSQPMPRSYFITTGASETDIAVTGIDISASLQTITMESLTAETIDSVPTLTTASEVFPEVVGDESALLIVPEEDKQQQQLDLERELLELEKIKQQRFAEELEWERQEIQRFREQEKIMVQKKLEELQSMKQHLLFQQEEERQAQFMMRQETLAQQQLQLEQIQQLQQQLHQQLEEQKIRQIYQYNYDPSGTASPQTTTEQAILEGQYAALEGSQFWATEDATTTASAVVAIEIPQSQGWYTVQSDGVTQYIAPPGILSTVSEIPLTDVVVKEEKQPKKRSSGAKVRGQYDDMGENMTDDPRSFKKIVDSGVQTDDEDATDRSYVSRRRRTKKSVDTSVQTDDEDQDEWDMPTRSRRKARVGKYGDSMTEADKTKPLSKVSSIAVQTVAEISVQTEPVGTIRTPSIRARVDAKVEIIKHISAPEKTYKGGSLGCQTEADSDTQSPQYLSATSPPKDKKRPTPLEIGYSSHLRADSTVQLAPSPPKSPKVLYSPISPLSPGKALESAFVPYEKPLPDDISPQKVLHPDMAKVPPASPKTAKMMQRSMSDPKPLSPTADESSRAPFQYTEGYTTKGSQTMTSSGAQKKVKRTLPNPPPEEISTGTQSTFSTMGTVSRRRICRTNTMARAKILQDIDRELDLVERESAKLRKKQAELDEEEKEIDAKLRYLEMGINRRKEALLKEREKRERAYLQGVAEDRDYMSDSEVSSTRPTRIESQHGIERPRTAPQTEFSQFIPPQTQTESQLVPPTSPYTQYQYSSPALPTQAPTSYTQQSHFEQQTLYHQQVSPYQTQPTFQAVATMSFTPQVQPTPTPQPSYQLPSQMMVIQQKPRQTTLYLEPKITSNYEVIRNQPLMIAPVSTDNTFAVSHLGSKYNSLDLRIGLEERSSMASSPISSISADSFYADIDHHTPRNYVLIDDIGEITKGTAALSTAFSLHEKDLSKTDRLLRTTETRRSQEVTDFLAPLQSSSRLHSYVKAEEDPMEDPYELKLLKHQIKQEFRRGTESLDHLAGLSHYYHADTSYRHFPKSEKYSISRLTLEKQAAKQLPAAILYQKQSKHKKSLIDPKMSKFSPIQESRDLEPDYSSYMTSSTSSIGGISSRARLLQDDITFGLRKNITDQQKFMGSSLGTGLGTLGNTIRSALQDEADKPYSSGSRSRPSSRPSSVYGLDLSIKRDSSSSSLRLKAQEAEALDVSFSHASSSARTKPTSLPISQSRGRIPIVAQNSEEESPLSPVGQPMGMARAAAGPLPPISADTRDQFGSSHSLPEVQQHMREESRTRGYDRDIAFIMDDFQHAMSDSEAYHLRREETDWFDKPRESRLENGHGLDRKLPERLVHSRPLSQHQEQIIQMNGKTMHYIFPHARIKITRDSKDHTVSGNGLGIRIVGGKEIPGHSGEIGAYIAKILPGGSAEQTGKLMEGMQVLEWNGIPLTSKTYEEVQSIISQQSGEAEICVRLDLNMLSDSENSQHLELHEPPKAVDKAKSPGVDPKQLAAELQKVSLQQSPLVLSSVVEKGSHVHSGPTSAGSSSVPSPGQPGSPSVSKKKHGSSKPTDGTKVVSHPITGEIQLQINYDLGNLIIHILQARNLVPRDNNGYSDPFVKVYLLPGRGQVMVVQNASAEYKRRTKHVQKSLNPEWNQTVIYKSISMEQLKKKTLEVTVWDYDRFSSNDFLGEVLIDLSSTSHLDNTPRWYPLKEQTESIDHGKSHSSQSSQQSPKPSVIKSRSHGIFPDPSKDMQVPTIEKSHSSPGSSKSSSEGHLRSHGPSRSQSKTSVTQTHLEDAGAAIAAAEAAVQQLRIQPTKPPNHRPAESSVSTGSSGSSFGSGYSVDSEGSSSTAGETNLFPIPRIGKMGQNGQEPVKQPGVGVGLADTEAKTQVMGEIKIALKKEMKTDGEQLIVEILQCRNITYKFKSPDHLPDLYVKIYVMNISTQKKVIKKKTRVCRHDREPSFNETFRFSLSPAGHSLQILLFSNGGKFMKKTLIGEACIWLDKVDLRKRIVNWHKLLVSPTQTH

SEQ ID NO: 58062 - protein, 422 aa, Homo sapiens
TKVWNSNGLGIRIVGGKEIPGHSGEIGAYIAKILPGGSAEQTGKLMEGMQVLEWNGIPLTSKTYEEVQSIISQQSGEAEICVRLDLNMLSDSENSQHLELHEPPKAVDKAKSPGVDPKQLAAELQKVSLQQSPLVLSSVVEKGSHVHSGPTSAGSSSVPSPGQPGSPSVSKKKHGSSKPTDGTKVVSHPITGEIQLQINYDLGNLIIHILQARNLVPRDNNGYSDPFVKVYLLPGRGAEYKRRTKHVQKSLNPEWNQTVIYKSISMEQLKKKTLEVTVWDYDRFSSNDFLGEVLIDLSSTSHLDNTPRWYPLKEQTESIDHGKSHSSQSSQQSPKPSVIKSRSHGIFPDPSKDMQVPTIEKSHSSPGSSKSSSEGHLRSHGPSRSQSKTSVTQTHLEDAGAAIAAAEAAVQQLRIQPSKRRK

SEQ ID NO: 58063 - protein, 4935 aa, Homo sapiens
MGNEASLEGEGLPEGLAAAAAAGGGASGAGSPSHTAIPAGMEADLSQLSEEERRQIAAVMSRAQGLPKGSVPPAAAESPSMHRKQELDSSHPPKQSGRPPDPGRPAQPGLSKSRTTDTFRSEQKLPGRSPSTISLKESKSRTDLKEEHKSSMMPGFLSEVNALSAVSSVVNKFNPFDLISDSEASQEETTKKQKVVQKEQGKPEGIIKPPLQQQPPKPIPKQQGPGRDPLQQDGTPKSISSQQPEKIKSQPPGTGKPIQGPTQTPQTDHAKLPLQRDASRPQTKQADIVRGESVKPSLPSPSKPPIQQPTPGKPPAQQPGHEKSQPGPAKPPAQPSGLTKPLAQQPGTVKPPVQPPGTTKPPAQPLGPAKPPAQQTGSEKPSSEQPGPKALAQPPGVGKTPAQQPGPAKPPTQQVGTPKPLAQQPGLQSPAKAPGPTKTPVQQPGPGKIPAQQAGPGKTSAQQTGPTKPPSQLPGPAKPPPQQPGPAKPPPQQPGSAKPPSQQPGSTKPPPQQPGPAKPSPQQPGSTKPPSQQPGSAKPSAQQPSPAKPSAQQSTKPVSQTGSGKPLQPPTVSPSAKQPPSQGLPKTICPLCNTTELLLHVPEKANFNTCTECQTTVCSLCGFNPNPHLTEVKEWLCLNCQMKRALGGDLAPVPSSPQPKLKTAPVTTTSAVSKSSPQPQQTSPKKDAAPKQDLSKAPEPKKPPPLVKQPTLHGSPSAKAKQPPEADSLSKPAPPKEPSVPSEQDKAPVADDKPKQPKMVKPTTDLVSSSSATTKPDIPSSKVQSQAEEKTTPPLKTDSAKPSQSFPPTGEKVSPFDSKAIPRPASDSKIISHPGPSSESKGQKQVDPVQKKEEPKKAQTKMSPKPDAKPMPKGSPTPPGPRPTAGQTVPTPQQSPKPQEQSRRFSLNLGSITDAPKSQPTTPQETVTGKLFGFGASIFSQASNLISTAGQPGPHSQSGPGAPMKQAPAPSQPPTSQGPPKSTGQAPPAPAKSIPVKKETKAPAAEKLEPKAEQAPTVKRTETEKKPPPIKDSKSLTAEPQKAVLPTKLEKSPKPESTCPLCKTELNIGSKDPPNFNTCTECKNQVCNLCGFNPTPHLTEIQEWLCLNCQTQRAISGQLGDIRKMPPAPSGPKASPMPVPTESSSQKTAVPPQVKLVKKQEQEVKTEAEKVILEKVKETLSMEKIPPMVTTDQKQEESKLEKDKASALQEKKPLPEEKKLIPEEEKIRSEEKKPLLEEKKPTPEDKKLLPEAKTSAPEEQKHDLLKSQVQIAEEKLEGRVAPKTVQEGKQPQTKMEGLPSGTPQSLPKEDDKTTKTIKEQPQPPCTAKPDQVEPGKEKTEKEDDKSDTSSSQQPKSPQGLSDTGYSSDGISSSLGEIPSLIPTDEKDILKGLKKDSFSQESSPSSPSDLAKLESTVLSILEAQASTLADEKSEKKTQPHEVSPEQPKDQEKTQSLSETLEITISEEEIKESQEERKDTFKKDSQQDIPSSKDHKEKSEFVDDITTRREPYDSVEESSESENSPVPQRKRRTSVGSSSSDEYKQEDSQGSGEEEDFIRKQIIEMSADEDASGSEDDEFIRNQLKEISSSTESQKKEETKGKGKITAGKHRRLTRKSSTSIDEDAGRRHSWHDEDDEAFDESPELKYRETKSQESEELVVTGGGGLRRFKTIELNSTIADKYSAESSQKKTSLYFDEEPELEMESLTDSPEDRSRGEGSSSLHASSFTPGTSPTSVSSLDEDSDSSPSHKKGESKQQRKARHRPHGPLLPTIEDSSEEEELREEEELLKEQEKQREIEQQQRKSSSKKSKKDKDELRAQRRRERPKTPPSNLSPIEDASPTEELRQAAEMEELHRSSCSEYSPSIESDPEGFEISPEKIIEVQKVYKLPTAVSLYSPTDEQSIMQKEGSQKALKSAEEMYEEMMHKTHKYKAFPAANERDEVFEKEPLYGGMLIEDYIYESLVEDTYNGSVDGSLLTRQEEENGFMQQKGREQKIRLSEQIYEDPMQKITDLQKEFYELESLHSVVPQEDIVSSSFIIPESHEIVDLGTMVTSTEEERKLLDADAAYEELMKRQQMQLTPGSSPTQAPIGEDMTESTMDFDRMPDASLTSSVLSGASLTDSTSSATLSIPDVKITQHFSTEEIEDEYVTDYTREIQEIIAHESLILTYSEPSESATSVPPSDTPSLTSSVSSVCTTDSSSPITTLDSITTVYTEPVDMITKFEDSEEISSSTYFPGSIIDYPEEISVSLDRTAPPDGRASADHIVISLSDMASSIIESVVPKPEGPVADTVSTDLLISEKDPVKKAKKETGNGIILEVLEAYRDKKELEAERTKSSLSETVFDHPPSSVIALPMKEQLSTTYFTSGETFGQEKPASQLPSGSPSVSSLPAKPRPFFRSSSLDISAQPPPPPPPPPPPPPPPPPPPPPPLPPPTSPKPTILPKKKLTVASPVTTATPLFDAVTTLETTAVLRSNGLPVTRICTTAPPPVPPKPSSIPSGLVFTHRPEPSKPPIAPKPVIPQLPTTTQKPTDIHPKPTGLSLTSSMTLNLVTSADYKLPSPTSPLSPHSNKSSPRFSKSLTETYVVITLPSEPGTPTDSSASQAITSWPLGSPSKDLVSVEPVFSVVPPVTAVEIPISSEQTFYISGALQTFSATPVTAPSSFQAAPTSVTQFLTTEVSKTEVSATRSTAPSVGLSSISITIPPEPLALDNIHLEKPQYKEDGKLQLVGDVIDLRTVPKVEVKTTDKCIDLSASTMDVKRQITANEVYGKQISAVQPSIINLSVTSSIVTPVSLATETVTFVTCTASASYTTGTESLVGAEHAMTTPLQLTTSKHAEPPYRIPSDQVFPIAREEAPINLSLGTPAHAVTLAITKPVTVPPVGVTNGWTDSTVSQGITDGEVVDLSTTKSHRTVVTMDESTSSVMTKIIEDEKPVDLTAGRRAVCCDVVYKLPFGRSCTAQQPATTLPEDRFGYRDDHYQYDRSGPYGYRGIGGMKPSMSDTNLAEAGHFFYKSKNAFDYSEGTDTAVDLTSGRVTTGEVMDYSSKTTGPYPETRQVISGAGISTPQYSTARMTPPPGPQYCVGSVLRSSNGVVYSSVATPTPSTFAITTQPGSIFSTTVRDLSGIHTADAVTSLPAMHHSQPMPRSYFITTGASETDIAVTGIDISASLQTITMESLTAETIDSVPTLTTASEVFPEVVGDESALLIVPEEDKQQQQLDLERELLELEKIKQQRFAEELEWERQEIQRFREQEKIMVQKKLEELQSMKQHLLFQQEEERQAQFMMRQETLAQQQLQLEQIQQLQQQLHQQLEEQKIRQIYQYNYDPSGTASPQTTTEQAILEGQYAALEGSQFWATEDATTTASAVVAIEIPQSQGWYTVQSDGVTQYIAPPGILSTVSEIPLTDVVVKEEKQPKKRSSGAKVRGQYDDMGENMTDDPRSFKKIVDSGVQTDDEDATDRSYVSRRRRTKKSVDTSVQTDDEDQDEWDMPTRSRRKARVGKYGDSMTEADKTKPLSKVSSIAVQTVAEISVQTEPVGTIRTPSIRARVDAKVEIIKHISAPEKTYKGGSLGCQTEADSDTQSPQYLSATSPPKDKKRPTPLEIGYSSHLRADSTVQLAPSPPKSPKVLYSPISPLSPGKALESAFVPYEKPLPDDISPQKVLHPDMAKVPPASPKTAKMMQRSMSDPKPLSPTADESSRAPFQYTEGYTTKGSQTMTSSGAQKKVKRTLPNPPPEEISTGTQSTFSTMGTVSRRRICRTNTMARAKILQDIDRELDLVERESAKLRKKQAELDEEEKEIDAKLRYLEMGINRRKEALLKEREKRERAYLQGVAEDRDYMSDSEVSSTRPTRIESQHGIERPRTAPQTEFSQFIPPQTQTESQLVPPTSPYTQYQYSSPALPTQAPTSYTQQSHFEQQTLYHQQVSPYQTQPTFQAVATMSFTPQVQPTPTPQPSYQLPSQMMVIQQKPRQTTLYLEPKITSNYEVIRNQPLMIAPVSTDNTFAVSHLGSKYNSLDLRIGLEERSSMASSPISSISADSFYADIDHHTPRNYVLIDDIGEITKGTAALSTAFSLHEKDLSKTDRLLRTTETRRSQEVTDFLAPLQSSSRLHSYVKAEEDPMEDPYELKLLKHQIKQEFRRGTESLDHLAGLSHYYHADTSYRHFPKSEKYSISRLTLEKQAAKQLPAAILYQKQSKHKKSLIDPKMSKFSPIQESRDLEPDYSSYMTSSTSSIGGISSRARLLQDDITFGLRKNITDQQKFMGSSLGTGLGTLGNTIRSALQDEADKPYSSGSRSRPSSRPSSVYGLDLSIKRDSSSSSLRLKAQEAEALDVSFSHASSSARTKPTSLPISQSRGRIPIVAQNSEEESPLSPVGQPMGMARAAAGPLPPISADTRDQFGSSHSLPEVQQHMREESRTRGYDRDIAFIMDDFQHAMSDSEAYHLRREETDWFDKPRESRLENGHGLDRKLPERLVHSRPLSQHQEQIIQMNGKTMHYIFPHARIKITRDSKDHTVSGNGLGIRIVGGKEIPGHSGEIGAYIAKILPGGSAEQTGKLMEGMQVLEWNGIPLTSKTYEEVQSIISQQSGEAEICVRLDLNMLSDSENSQHLELHEPPKAVDKAKSPGVDPKQLAAELQKVSLQQSPLVLSSVVEKGSHVHSGPTSAGSSSVPSPGQPGSPSVSKKKHGSSKPTDGTKVVSHPITGEIQLQINYDLGNLIIHILQARNLVPRDNNGYSDPFVKVYLLPGRGQVMVVQNASAEYKRRTKHVQKSLNPEWNQTVIYKSISMEQLKKKTLEVTVWDYDRFSSNDFLGEVLIDLSSTSHLDNTPRWYPLKEQTESIDHGKSHSSQSSQQSPKPSVIKSRSHGIFPDPSKDMQVPTIEKSHSSPGSSKSSSEGHLRSHGPSRSQSKTSVTQTHLEDAGAAIAAAEAAVQQLRIQPSKRRK

SEQ ID NO: 58064 - protein, 3635 aa, Homo sapiens
MGNEASLEGEGLPEGLAAAAAAGGGASGAGSPSHTAIPAGMEADLSQLSEEERRQIAAVMSRAQGLPKGSVPPAAAESPSMHRKQELDSSHPPKQSGRPPDPGRPAQPGLSKSRTTDTFRSEQKLPGRSPSTISLKESKSRTDLKEEHKSSMMPGFLSEVNALSAVSSVVNKFNPFDLISDSEASQEETTKKQKVVQKEQGKPEGIIKPPLQQQPPKPIPKQQGPGRDPLQQDGTPKSISSQQPEKIKSQPPGTGKPIQGPTQTPQTDHAKLPLQRDASRPQTKQADIVRGESVKPSLPSPSKPPIQQPTPGKPPAQQPGHEKSQPGPAKPPAQPSGLTKPLAQQPGTVKPPVQPPGTTKPPAQPLGPAKPPAQQTGSEKPSSEQPGPKALAQPPGVGKTPAQQPGPAKPPTQQVGTPKPLAQQPGLQSPAKAPGPTKTPVQPKPPSQQPGSTKPPPQQPGPAKPSPQQPGSTKPPSQQPGSAKPSAQQPSPAKPSAQQSTKPVSQTGSGKPLQPPTVSPSAKQPPSQGLPKTICPLCNTTELLLHVPEKANFNTCTECQTTVCSLCGFNPNPHLTEVKEWLCLNCQMKRALGGDLAPVPSSPQPKLKTAPVTTTSAVSKSSPQPQQTSPKKDAAPKQDLSKAPEPKKPPPLVKQPTLHGSPSAKAKQPPEADSLSKPAPPKEPSVPSEQDKAPVADDKPKQPKMVKPTTDLVSSSSATTKPDIPSSKVQSQAEEKTTPPLKTDSAKPSQSFPPTGEKVSPFDSKAIPRPASDSKIISHPGPSSESKGQKQVDPVQKKEEPKKAQTKMSPKPDAKPMPKGSPTPPGPRPTAGQTVPTPQQSPKPQEQSRRFSLNLGSITDAPKSQPTTPQETVTGKLFGFGASIFSQASNLISTAGQPGPHSQSGPGAPMKQAPAPSQPPTSQGPPKSTGQAPPAPAKSIPVKKETKAPAAEKLEPKAEQAPTVKRTETEKKPPPIKDSKSLTAEPQKAVLPTKLEKSPKPESTCPLCKTELNIGSKDPPNFNTCTECKNQVCNLCGFNPTPHLTENCQTQRAISGQLGDIRKMPPAPSGPKASPMPVPTESSSQKTAVPPQVKLVKKQEQEVKTEAEKVILEKVKETLSMEKIPPMVTTDQKQEESKLEKDKASALQEKKPLPEEKKLIPEEEKIRSEEKKPLLEEKKPTPEDKKLLPEAKTSAPEEQKHDLLKSQVQIAEEKLEGRVAPKTVQEGKQPQTKMEGLPSGTPQSLPKEDDKTTKTIKEQPQPPCTAKPDQEKEDDKSDTSSSQQPKSPQGLSDTGYSSDGISSSLGEIPSLIPTDEKDILKGLKKDSFSQESSPSSPSDLAKLESTVLSILEAQASTLADEKSEKKTQPHEVSPEQPKDQEKTQSLSETLEITISEEEIKESQEERKDTFKKDSQQDIPSSKDHKEKSEFVDDITTRREPYDSVEESSESENSPVPQRKRRTSVGSSSSDEYKQEDSQGSGEEEDFIRKQIIEMSADEDASGSEDDEFIRNQLKEISSSTESQKKEETKGKGKITAGKHRRLTRKSSTSIDEDAGRRHSWHDEDDEAFDESPELKYRETKSQESEELVVTGGGGLRRFKTIELNSTIADKYSAESSQKKTSLYFDEEPELEMESLTDSPEDRSRGEGSSSLHASSFTPGTSPTSVSSLDEDSDSSPSHKKGESKQQRKARHRPHGPLLPTIEDSSEEEELREEEELLKEQEKQREIEQQQRKSSSKKSKKDKDELRAQRRRERPKTPPSNLSPIEDASPTEELRQAAEMEELHRSSCSEYSPSIESDPEGFEISPEKIIEVQKVYKLPTAVSLYSPTDEQSIMQKEGSQKALKSAEEMYEEMMHKTHKYKAFPAANERDEVFEKEPLYGGMLIEDYIYESLVEDTYNGSVDGSLLTRQEEENGFMQQKGREQKIRLSEQIYEDPMQKITDLQKEFYELESLHSVVPQEDIVSSSFIIPESHEIVDLGTMVTSTEEERKLLDADAAYEELMKRQQMQLTPGSSPTQAPIGEDMTESTMDFDRMPDASLTSSVLSGASLTDSTSSATLSIPDVKITQHFSTEEIEDEYVTDYTREIQEIIAHESLILTYSEPSESATSVPPSDTPSLTSSVSSVCTTDSSSPITTLDSITTVYTEPVDMITKFEDSEEISSSTYFPGSIIDYPEEISVSLDRTAPPDGRASADHIVISLSDMASSIIESVVPKPEGPVADTVSTDLLISEKDPVKKAKKETGNGIILEVLEAYRDKKELEAERTKSSLSETVFDHPPSSVIALPMKEQLSTTYFTSGETFGQEKPASQLPSGSPSVSSLPAKPRPFFRSSSLDISAQPPPPPPPPPPPPPPPPPPPPPPLPPPTSPKPTILPKKKLTVASPVTTATPLFDAVTTLETTAVLRSNGLPVTRICTTAPPPVPPKPSSIPSGLVFTHRPEPSKPPIAPKPVIPQLPTTTQKPTDIHPKPTGLSLTSSMTLNLVTSADYKLPSPTSPLSPHSNKSSPRFSKSLTETYVVITLPSEPGTPTDSSASQAITSWPLGSPSKDLVSVEPVFSVVPPVTAVEIPISSEQTFYISGALQTFSATPVTAPSSFQAAPTSVTQFLTTEVSKTEVSATRSTAPSVGLSSISITIPPEPLALDNIHLEKPQYKEDGKLQLVGDVIDLRTVPKVEVKTTDKCIDLSASTMDVKRQITANEVYGKQISAVQPSIINLSVTSSIVTPVSLATETVTFVTCTASASYTTGTESLVGAEHAMTTPLQLTTSKHAEPPYRIPSDQVFPIAREEAPINLSLGTPAHAVTLAITKPVTVPPVGVTNGWTDSTVSQGITDGEVVDLSTTKSHRTVVTMDESTSSVMTKIIEDEKPVDLTAGRRAVCCDVVYKLPFGRSCTAQQPATTLPEDRFGYRDDHYQYDRSGPYGYRGIGGMKPSMSDTNLAEAGHFFYKSKNAFDYSEGTDTAVDLTSGRVTTGEVMDYSSKTTGPYPETRQVISGAGISTPQYSTARMTPPPGPQYCVGSVLRSSNGVVYSSVATPTPSTFAITTQPGSIFSTTVRDLSGIHTADAVTSLPAMHHSQPMPRSYFITTGASETDIAVTGIDISASLQTITMESLTAETIDSVPTLTTASEVFPEVVGDESALLIVPEEDKQQQQLDLERELLELEKIKQQRFAEELEWERQEIQRFREQEKIMVQKKLEELQSMKQHLLFQQEEERQAQFMMRQETLAQQQLQLEQIQQLQQQLHQQLEEQKIRQIYQYNYDPSGTASPQTTTEQAILEGQYAALEGSQFWATEDATTTASAVVAIEIPQSQGWYTVQSDGVTQYIAPPGILSTVSEIPLTDVVVKEEKQPKKRSSGAKVRGQYDDMGENMTDDPRSFKKIVDSGVQTDDEDATDRSYVSRRRRTKKSVDTSVQTDDEDQDEWDMPTRSRRKARVGKYGDSMTEADKTKPLSKVSSIAVQTVAEISVQTEPVGTIRTPSIRARVDAKVEIIKHISAPEKTYKGGSLGCQTEADSDTQSPQYLSATSPPKDKKRPTPLEIGYSSHLRADSTVQLAPSPPKSPKVLYSPISPLSPGKALESAFVPYEKPLPDDISPQKVLHPDMAKVPPASPKTAKMMQRSMSDPKPLSPTADESSRAPFQYTEGYT

SEQ ID NO: 58065 - protein, 544 aa, Homo sapiens
MEKLQEHLIKAKAFTIKKTLEIYVPIKQFFYNLIHPEYSAVTDVYVLMFLADTVDFIIIVFGFWAFGKHSAAADITSSLSEDQVPGPFLVMVLIQFGTMVVDRALYLRKTVLGKVIFQVILVFGIHFWMFFILPGVTERKFSQNLVAQLWYFVKCVYFGLSAYQIRCGYPTRVLGNFLTKSYNYVNLFLFQGFRLVPFLTELRAVMDWVWTDTTLSLSSWICVEDIYAHIFILKCWRESEKPIFTMSAQQSQLKVMDQQSFNKFIQAFSRDTGAMQFLENYEKEDITVAELEGNSNSLWTISPPSKQKMIHELLDPNSSFSVVFSWSIQRNLSLGAKSEIATDKLSFPLKNITRKNIAKMIAGNSTESSKTPVTIEKIYPYYVKAPSDSNSKPIKQLLSENNFMDITIILSRDNTTKYNSEWWVLNLTGNRIYNPNSQALELVVFNDKVSPPSLGFLAGYGIMGLYASVVLVIGKFVREFFSGISHSIMFEELPNVDRILKLCTDIFLVRETGELELEEDLYAKLIFLYRSPETMIKWTREKTN

SEQ ID NO: 58066 - protein, 2752 aa, Homo sapiens
MASEVVCGLIFRLLLPICLAVACAFRYNGLSFVYLIYLLLIPLFSEPTKTTMQGHTGRLLKSLCFISLSFLLLHIIFHITLVSLEAQHRIAPGYNCSTWEKTFRQIGFESLKGADAGNGIRVFVPDIGMFIASLTIWLLCRNIVQKPVTDEAAQSNPEFENEELAEGEKIDSEEALIYEEDFNGGDGVEGELEESTKLKMFRRLASVASKLKEFIGNMITTAGKVVVTILLGSSGMMLPSLTSSVYFFVFLGLCTWWSWCRTFDPLLFSCLCVLLAIFTAGHLIGLYLYQFQFFQEAVPPNDYYARLFGIKSVIQTDCSSTWKIIVNPDLSWYHHANPILLLVMYYTLATLIRIWLQEPLVQDEGTKEEDKALACSPIQITAGRRRSLWYATHYPTDERKLLSMTQDDYKPSDGLLVTVNGNPVDYHTIHPSLPMENGPGKADLYSTPQYRWEPSDESSEKREEEEEEKEEFEEERSREEKRSIKVHAMVSVFQFIMKQSYICALIAMMAWSITYHSWLTFVLLIWSCTLWMIRNRRKYAMISSPFMVVYGNLLLILQYIWSFELPEIKKVPGFLEKKEPGELASKILFTITFWLLLRQHLTEQKALQEKEALLSEVKIGSQENEEKDEELQDIQVEGEPKEEEEEEAKEEKQERKKVEQEEAEEEDEQDIMKVLGNLVVAMFIKYWIYVCGGMFFFVSFEGKIVMYKIIYMVLFLFCVALYQVHYEWWRKILKYFWMSVVIYTMLVLIFIYTYQFENFPGLWQNMTGLKKEKLEDLGLKQFTVAELFTRIFIPTSFLLVCILHLHYFHDRFLELTDLKSIPSKEDNTIYRLAHPEGSLPDLTMMHLTASLEKPEVRKLAEPGEEKLEGYSEKAQKGDLGKDSEESEEDGEEEEESEEEEETSDLRNKWHLVIDRLTVLFLKFLEYFHKLQVFMWWILELHIIKIVSSYIIWVSVKEVSLFNYVFLISWAFALPYAKLRRLASSVCTVWTCVIIVCKMLYQLQTIKPENFSVNCSLPNENQTNIPFNELNKSLLYSAPIDPTEWVGLRKSSPLLVYLRNNLLMLAILAFEVTIYRHQEYYRGRNNLTAPVSRTIFHDITRLHLDDGLINCAKYFINYFFYKFGLETCFLMSVNVIGQRMDFYAMIHACWLIAVLYRRRRKAIAEIWPKYCCFLACIITFQYFICIGIPPAPCRDYPWRFKGASFNDNIIKWLYFPDFIVRPNPVFLVYDFMLLLCASLQRQIFEDENKAAVRIMAGDNVEICMNLDAASFSQHNPVPDFIHCRSYLDMSKVIIFSYLFWFVLTIIFITGTTRISIFCMGYLVACFYFLLFGGDLLLKPIKSILRYWDWLIAYNVFVITMKNILSIGACGYIGTLVHNSCWLIQAFSLACTVKGYQMPAANSPCTLPSGEAGIIWDSICFAFLLLQRRVFMSYYFLHVVADIKASQILASRGAELFQATIVKAVKARIEEEKKSMDQLKRQMDRIKARQQKYKKGKERMLSLTQEPGEGQDMQKLSEEDDEREADKQKAKGKKKQWWRPWVDHASMVRSGDYYLFETDSEEEEEEELKKEDEEPPRRSAFQFVYQAWITDPKTALRQRHKEKKRSAREERKRRRKGSKEGPVEWEDREDEPIKKKSDGPDNIIKRIFNILKFTWVLFLATVDSFTTWLNSISREHIDISTVLRIERCMLTREIKKGNVPTRESIHMYYQNHIMNLSRESGLDTIDEHPGAASGAQTAHRMDSLDSHDSISSEPTQCTMLYSRQGTTETIEEVEAEQEEEAGSTAPEPREAKEYEATGYDVGAMGAEEASLTPEEELTQFSTLDGDVEAPPSYSKAVSFEHLSFGSQDDSAGKNRMAVSPDDSRTDKLGSSILPPLTHELTASELLLKKMFHDDELEESEKFYVGQPRFLLLFYAMYNTLVARSEMVCYFVIILNHMVSASMITLLLPILIFLWAMLSVPRPSRRFWMMAIVYTEVAIVVKYFFQFGFFPWNKNVEVNKDKPYHPPNIIGVEKKEGYVLYDLIQLLALFFHRSILKCHGLWDEDDMTESGMAREESDDELSLGHGRRDSSDSLKSINLAASVESVHVTFPEQQTAVRRKRSGSSSEPSQRSSFSSNRSQRGSTSTRNSSQKGSSVLSIKQKGKRELYMEKLQEHLIKAKAFTIKKTLEIYVPIKQFFYNLIHPEYSAVTDVYVLMFLADTVDFIIIVFGFWAFGKHSAAADITSSLSEDQVPGPFLVMVLIQFGTMVVDRALYLRKTVLGKVIFQVILVFGIHFWMFFILPGVTERKFSQNLVAQLWYFVKCVYFGLSAYQIRCGYPTRVLGNFLTKSYNYVNLFLFQGFRLVPFLTELRAVMDWVWTDTTLSLSSWICVEDIYAHIFILKCWRESEKRYPQPRGQKKKKVVKYGMGGMIIVLLICIVWFPLLFMSLIKSVAGVINQPLDVSVTITLGGYQPIFTMSAQQSQLKVMDQQSFNKFIQAFSRDTGAMQFLENYEKEDITVAELEGNSNSLWTISPPSKQKMIHELLDPNSSFSVVFSWSIQRNLSLGAKSEIATDKLSFPLKNITRKNIAKMIAGNSTESSKTPVTIEKIYPYYVKAPSDSNSKPIKQLLSENNFMDITIILSRDNTTKYNSEWWVLNLTGNRIYNPNSQALELVVFNDKVSPPSLGFLAGYGIMGLYASVVLVIGKFVREFFSGISHSIMFEELPNVDRILKLCTDIFLVRETGELELEEDLYAKLIFLYRSPETMIKWTREKTN

SEQ ID NO: 58067 - protein, 563 aa, Homo sapiens
MSVVIYTMLVLIFIYTYQFENFPGLWQNMTGLKKEKLEDLGLKQFTVAELFTRIFIPTSFLLVCILHLHYFHDRFLELTDLKSIPSKEDNTIYSHAKVNGRVYLIINSIKKKLPIHQNELAHPEGSLPDLTMMHLTASLEKPEVRKLAEPGEEKLEGYSEKAQKGDLGKDSEESEEDGEEEEESEEEEETSDLRNKWHLVIDRLTVLFLKFLEYFHKLQVFMWWILELHIIKIVSSYIIWVSVKEVSLFNYVFLISWAFALPYAKLRRLASSVCTVWTCVIIVCKMLYQLQTIKPENFSVNCSLPNENQTNIPFNELNKSLLYSAPIDPTEWVGLRKSSPLLVYLRNNLLMLAILAFEVTIYRHQEYYRGRNNLTAPVSRTIFHDITRLHLDDGLINCAKYFINYFFYKFGLETCFLMSVNVIGQRMDFYAMIHACWLIAVLYRRRRKAIAEIWPKYCCFLACIITFQYFICIGIPPAPCRDYPWRFKGASFNDNIIKWLYFPDFIVRPNPVFLVYDFMLLLCASLQRQIFEDENKAAVRIMAGDNVEICMNLDAASFSQHNP

SEQ ID NO: 58068 - protein, 646 aa, Homo sapiens
MTESGMAREESDDELSLGHGRRDSSDSLKSINLAASVESVHVTFPEQQTAVRRKRSGSSSEPSQRSSFSSNRSQRGSTSTRNSSQKGSSVLSIKQKGKRELYMEKLQEHLIKAKAFTIKKTLEIYVPIKQFFYNLIHPEYSAVTDVYVLMFLADTVDFIIIVFGFWAFGKHSAAADITSSLSEDQVPGPFLVMVLIQFGTMVVDRALYLRKTVLGKVIFQVILVFGIHFWMFFILPGVTERKFSQNLVAQLWYFVKCVYFGLSAYQIRCGYPTRVLGNFLTKSYNYVNLFLFQGFRLVPFLTELRAVMDWVWTDTTLSLSSWICVEDIYAHIFILKCWRESEKPIFTMSAQQSQLKVMDQQSFNKFIQAFSRDTGAMQFLENYEKEDITVAELEGNSNSLWTISPPSKQKMIHELLDPNSSFSVVFSWSIQRNLSLGAKSEIATDKLSFPLKNITRKNIAKMIAGNSTESSKTPVTIEKIYPYYVKAPSDSNSKPIKQLLSENNFMDITIILSRDNTTKYNSEWWVLNLTGNRIYNPNSQALELVVFNDKVSPPSLGFLAGYGIMGLYASVVLVIGKFVREFFSGISHSIMFEELPNVDRILKLCTDIFLVRETGELELEEDLYAKLIFLYRSPETMIKWTREKTN

SEQ ID NO: 58069 - protein, 709 aa, Homo sapiens
MTESGMAREESDDELSLGHGRRDSSDSLKSINLAASVESVHVTFPEQQTAVRRKRSGSSSEPSQRSSFSSNRSQRGSTSTRNSSQKGSSVLSIKQKGKRELYMEKLQEHLIKAKAFTIKKTLEIYVPIKQFFYNLIHPEYSAVTDVYVLMFLADTVDFIIIVFGFWAFGKHSAAADITSSLSEDQVPGPFLVMVLIQFGTMVVDRALYLRKTVLGKVIFQVILVFGIHFWMFFILPGVTERKFSQNLVAQLWYFVKCVYFGLSAYQIRCGYPTRVLGNFLTKSYNYVNLFLFQGFRLVPFLTELRAVMDWVWTDTTLSLSSWICVEDIYAHIFILKCWRESEKRYPQPRGQKKKKVVKYGMGGMIIVLLICIVWFPLLFMSLIKSVAGVINQPLDVSVTITLGGYQPIFTMSAQQSQLKVMDQQSFNKFIQAFSRDTGAMQFLENYEKEDITVAELEGNSNSLWTISPPSKQKMIHELLDPNSSFSVVFSWSIQRNLSLGAKSEIATDKLSFPLKNITRKNIAKMIAGNSTESSKTPVTIEKIYPYYVKAPSDSNSKPIKQLLSENNFMDITIILSRDNTTKYNSEWWVLNLTGNRIYNPNSQALELVVFNDKVSPPSLGFLAGYGIMGLYASVVLVIGKFVREFFSGISHSIMFEELPNVDRILKLCTDIFLVRETGELELEEDLYAKLIFLYRSPETMIKWTREKTN

SEQ ID NO: 58070 - protein, 854 aa, Homo sapiens
MALRLVADFDLGKDVLPWLRAQRAVSEASGAGSGGADVLENDYESLHVLNVERNGNIIYTYKDDKGNVVFGLYDCQTRQNELLYTFEKDLQVFSCSVNSERTLLAASLVQSTKEGKRNELQPGSKCLTLLVEIHPVNNVKVLKAVDSYIWVQFLYPHIESHPLPENHLLLISEEKYIEQFRIHVAQEDGNRVVIKNSGHLPRDRIAEDFVWAQWDMSEQRLYYIDLKKSRSILKCIQFYADESYNLMFEVPLDISLSNSGFKLVNFGCDYHQYRDKFSKHLTLCVFTNHTGSLCVCYSPKCASWGQITYSVFYIHKGHSKTFTTSLENVGSHMTKGITFLNLDYYVAVYLPGHFFHLLNVQHPDLICHNLFLTGNNEMIDMLPHCPLQSLSGSLVLDCCSGKLYRALLSQSSLLQLLQNTCLDCEKMAALHCALYCGQGAQFLEAQIIQWISENVSACHSFDLIQEFIIASSYWSVYSETSNMDKLLPHSSVLTWNTEIPGITLVTEDIALPLMKVLSFKGYWEKLNSNLEYVKYAKPHFHYNNSVVRREWHNLISEEKTGKRRSAAYVRNILDNAVKVISNLEARNLGPRLTPLLQEEDSHQRLLMGLMVSELKDHFLRHLQGVEKKKIEQMVLDYISKLLDLICHIVETNWRKHNLHSWVLHFNSRGSAAEFAVFHIMTRILEATNSLFLPLPPGFHTLHTILGVQCLPLHNLLHCIDSGVLLLTETAVIRLMKDLDNTEKNEKLKFSIIVRLPPLIGQKICRLWDHPMSSNIISRNHVTRLLQNYKKQPRNSMINKSSFSVEFLPLNYFIEILTDIESSNQALYPFEGHDNVDAEFVEEAALKHTAMLLGL

SEQ ID NO: 58071 - protein, 175 aa, Homo sapiens
MTRILEATNSLFLPLPPGFHTLHTILGVQCLPLHNLLHCIDSGVLLLTETAVIRLMKDLDNTEKNEKLKFSIIVRLPPLIGQKICRLWDHPMSSNIISRNHVTRLLQNYKKQPRNSMINKSSFSVEFLPLNYFIEILTDIESSNQALYPFEGHDNVDAEFVEEAALKHTAMLLGL

SEQ ID NO: 58072 - protein, 290 aa, Homo sapiens
MANPKLLGMGLSEAEAIGADSARFEELLLQASKELQQAQTTRPESTQIQPQPGFCIKTNSSEGKVFINICHSPSIPPPADVTEEELLQMLEEDQAGFRIPMSLGEPHAELDAKGQGCTAYDVAVNSDFYRRMQNSDFLRELVITIAREGLEDKYNLQLNPEWRMMKNRPFMGSISQQNIRSEQRPRIQELGDLYTPAPGRAESGPEKPHLNLWLEAPDLLLAEVDLPKLDGALGLSLEIGENRLVMGGPQQLYHLDAYIPLQINSHESKAAFHRKRKQLMVAMPLLPVPS

SEQ ID NO: 58073 - protein, 313 aa, Homo sapiens
MLLSKINSLAHLRAAPCNDLHATKLAPGKEKEPLESQYQVGPLLGSGGFGSVYSGIRVSDNLPVAIKHVEKDRISDWGELPNGTRVPMEVVLLKKVSSGFSGVIRLLDWFERPDSFVLILERPEPVQDLFDFITERGALQEELARSFFWQVLEAVRHCHNCGVLHRDIKDENILIDLNRGELKLIDFGSGALLKDTVYTDFDGTRVYSPPEWIRYHRYHGRSAAVWSLGILLYDMVCGDIPFEHDEEIIRGQVFFRQRVSSECQHLIRWCLALRPSDRPTFEEIQNHPWMQDVLLPQETAEIHLHSLSPGPSK

SEQ ID NO: 58074 - protein, 311 aa, Homo sapiens
MLTKPLQGPPAPPGTPTPPPGGKDREAFEAEYRLGPLLGKGGFGTVFAGHRLTDRLQVAIKVIPRNRVLGWSPLSDSVTCPLEVALLWKVGAGGGHPGVIRLLDWFETQEGFMLVLERPLPAQDLFDYITEKGPLGEGPSRCFFGQVVAAIQHCHSRGVVHRDIKDENILIDLRRGCAKLIDFGSGALLHDEPYTDFDGTRVYSPPEWISRHQYHALPATVWSLGILLYDMVCGDIPFERDQEILEAELHFPAHVSPDCCALIRRCLAPKPSSRPSLEEILLDPWMQTPAEDVPLNPSKGGPAPLAWSLLP

SEQ ID NO: 58075 - protein, 145 aa, Homo sapiens
MLVLERPLPAQDLFDYITEKGPLGEGPSRCFFGQVVAAIQHCHSRGVVHRDIKDENILIDLRRGCAKLIDFGSGALLHDEPYTDFDGTRVYSPPEWISRHQYHALPATVWSLGILLYDMVCGDIPFERDQEILEAELHFPAHVSP

SEQ ID NO: 58076 - protein, 974 aa, Homo sapiens
MAKAGRAGGPPPGGGAPWHLRNVLSDSVESSDDEFFDAREEMAEGKNAILIGMSQWNSNDLVEQIETMGKLDEHQGEGTAPCTSSILQEKQRELYRVSLRRQRFPAQGSIEIHEDSEEGCPQRSCKTHVLLLVLHGGNILDTGAGDPSCKAADIHTFSSVLEKVTRAHFPAALGHILIKFVPCPAICSEAFSLVSHLNPYSHDEGCLSSSQDHVPLAALPLLAISSPQYQDAVATVIERANQVYREFLKSSDGIGFSGQVCLIGDCVGGLLAFDAICYSAGPSGDSPASSSRKGSISSTQDTPVAVEEDCSLASSKRLSKSNIDISSGLEDEEPKRPLPRKQSDSSTYDCEAITQHHAFLSSIHSSVLKDESETPAAGGPQLPEVSLGRFDFDVSDFFLFGSPLGLVLAMRRTVLPGLDGFQVRPACSQVYSFFHCADPSASRLEPLLEPKFHLVPPVSVPRYQRFPLGDGQSLLLADALHTHSPLFLEGSSRDSPPLLDAPASPPQASRFQRPGRRMSEGSSHSESSESSDSMAPVGASRITAKWWGSKRIDYALYCPDVLTAFPTVALPHLFHASYWESTDVVAFILRQVMRYESVNIKESARLDPAALSPANPREKWLRKRTQVKLRNVTANHRANDVIAAEDGPQVLVGRFMYGPLDMVALTGEKVDILVMAEPSSGRWVHLDTEITNSSGRITYNVPRPRRLGVGVYPVKMVVRGDQTCAMSYLTVLPRGMECVVFSIDGSFAASVSIMGSDPKVRPGAVDVVRHWQDLGYMILYITGRPDMQKQRVVSWLSQHNFPQGMIFFSDGLVHDPLRQKAIFLRNLMQECFIKISAAYGSTKDISVYSVLGLPASQIFIVGRPTKKYQTQCQFLSEGYAAHLAALEASHRSRPKKNNSRMILRKGSFGLHAQPEFLRKRNHLRRTMSVQQPDPPAANPKPERAQSQPESDKDHERPLPALSWARGPPKFESVP

SEQ ID NO: 58077 - protein, 938 aa, Homo sapiens
MAKAGRAGGPPPGGGAPWHLRNVLSDSVESSDDEFFDARGEGTAPCTSSILQEKQRELYRVSLRRQRFPAQGSIEIHEDSEEGCPQRSCKTHVLLLVLHGGNILDTGAGDPSCKAADIHTFSSVLEKVTRAHFPAALGHILIKFVPCPAICSEAFSLVSHLNPYSHDEGCLSSSQDHVPLAALPLLAISSPQYQDAVATVIERANQVYREFLKSSDGIGFSGQVCLIGDCVGGLLAFDAICYSAGPSGDSPASSSRKGSISSTQDTPVAVEEDCSLASSKRLSKSNIDISSGLEDEEPKRPLPRKQSDSSTYDCEAITQHHAFLSSIHSSVLKDESETPAAGGPQLPEVSLGRFDFDVSDFFLFGSPLGLVLAMRRTVLPGLDGFQVRPACSQVYSFFHCADPSASRLEPLLEPKFHLVPPVSVPRYQRFPLGDGQSLLLADALHTHSPLFLEGSSRDSPPLLDAPASPPQASRFQRPGRRMSEGSSHSESSESSDSMAPVGASRITAKWWGSKRIDYALYCPDVLTAFPTVALPHLFHASYWESTDVVAFILRQVMRYESVNIKESARLDPAALSPANPREKWLRKRTQVKLRNVTANHRANDVIAAEDGPQVLVGRFMYGPLDMVALTGEKVDILVMAEPSSGRWVHLDTEITNSSGRITYNVPRPRRLGVGVYPVKMVVRGDQTCAMSYLTVLPRGMECVVFSIDGSFAASVSIMGSDPKVRPGAVDVVRHWQDLGYMILYITGRPDMQKQRVVSWLSQHNFPQGMIFFSDGLVHDPLRQKAIFLRNLMQECFIKISAAYGSTKDISVYSVLGLPASQIFIVGRPTKKYQTQCQFLSEGYAAHLAALEASHRSRPKKNNSRMILRKGSFGLHAQPEFLRKRNHLRRTMSVQQPDPPAANPKPERAQSQPESDKDHERPLPALSWARGPPKFESVP

SEQ ID NO: 58078 - protein, 202 aa, Homo sapiens
MATLIYVDKENGEPGTRVVAKDGLKLGSGPSIKALDGRSQVSTPRFGKTFDAPPALPKATRKALGTVNRATEKSVKTKGPLKQKQPSFSAKKMTEKTVKAKSSVPASDDAYPEIEKFFPFNPLDFESFDLPEEHQIAHLPLSGVPLMILDEERELEKLFQLGPPSPVKMPSPPWESNLLQSPSSILSTLDVELPPVCCDIDI

SEQ ID NO: 58079 - protein, 202 aa, Homo sapiens; identical to SEQ ID NO: 58078

SEQ ID NO: 58080 - protein, 202 aa, Homo sapiens; identical to SEQ ID NO: 58078

SEQ ID NO: 58081 - protein, 180 aa, Homo sapiens
MAPGVARGPTPYWRLRLGGAALLLLLIPVAAAQEPPGAACSQNTNKTCEECLKNVSCLWCNTNKACLDYPVTSVLPPASLCKLSSARWGVCWVNFEALIITMSVVGGTLLLGIAICCCCCCRRKRSRKPDRSEEKAMREREERRIRQEERRAEMKTRHDEIRKKYGLFKEENPYARFENN

SEQ ID NO: 58082 - protein, 142 aa, Homo sapiens
MAPGVARGPTPYWRLRLGGAALLLLLIPVAAAQEPPGAACSQNTNKTCEECLKNVSACLKKKTRMLDLKTTKALQHISPDASCEVHAPQPSPAGRPRGHCGLLTLASEPASLPGQAAGELPLKDSPLVLQTGDLLFPVHLCF

SEQ ID NO: 58083 - protein, 191 aa, Homo sapiens
MATLIYVDKEIGEPGTRVAAKDVLKLESRPSIKALDGISQVLTRRFGKTYDAPSALPKATRKALGTVNRATEKSVKTNGPRKQKQPSFSAKKMTEKTVKTKSSVPASDDAYPEIEKFFPFNLLDFESFDLPEERQIAHLPLSGVPLMILDEEGELEKLFQLGPPSPVKMPSPPWECNLFAVSFKHSVDPGC

SEQ ID NO: 58084 - protein, 861 aa, Homo sapiens
MTGRARARARGRARGQETAQLVGSTASQQPGYIQPRPQPPPAEGELFGRGRQRGTAGGTAKSQGLQISAGFQELSLAERGGRRRDFHDLGVNTRQNLDHVKESKTGSSGIIVRLSTNHFRLTSRPQWALYQYHIDYNPLMEARRLRSALLFQHEDLIGKCHAFDGTILFLPKRLQQKVTEVFSKTRNGEDVRITITLTNELPPTSPTCLQFYNIIFRRLLKIMNLQQIGRNYYNPNDPIDIPSHRLVIWPGFTTSILQYENSIMLCTDVSHKVLRSETVLDFMFNFYHQTEEHKFQEQVSKELIGLVVLTKYNNKTYRVDDIDWDQNPKSTFKKADGSEVSFLEYYRKQYNQEITDLKQPVLVSQPKRRRGPGGTLPGPAMLIPELCYLTGLTDKMRNDFNVMKDLAVHTRLTPEQRQREVGRLIDYIHKNDNVQRELRDWGLSFDSNLLSFSGRILQTEKIHQGGKTFDYNPQFADWSKETRGAPLISVKPLDNWLLIYTRRNYEAANSLIQNLFKVTPAMGMQMRKAIMIEVDDRTEAYLRVLQQKVTADTQIVVCLLSSNRKDKYDAIKKYLCTDCPTPSQCVVARTLGKQQTVMAIATKIALQMNCKMGGELWRVDIPLKLVMIVGIDCYHDMTAGRRSIAGFVASINEGMTRWFSRCIFQDRGQELVDGLKVCLQAALRAWNSCNEYMPSRIIVYRDGVGDGQLKTLVNYEVPQFLDCLKSIGRGYNPRLTVIVVKKRVNTRFFAQSGGRLQNPLPGTVIDVEVTRPEWYDFFIVSQAVRSGSVSPTHYNVIYDNSGLKPDHIQRLTYKLCHIYYNWPGVIRVPAPCQYAHKLAFLVGQSIHREPNLSLSNRLYYL

SEQ ID NO: 58085 - protein, 122 aa, Homo sapiens
MTGRARARARGRARGQETAQLVGSTASQQPGYIQPRPQPPPAEGELFGRGRQRGTAGGTAKSQGLQISAGFQELSLAERGGRRRDFHDLGVNTRQNLDHVKESKTGSSGIIVRLSTNHFRLT

SEQ ID NO: 58086 - protein, 150 aa, Homo sapiens
MTGRARARARGRARGQETAQLVGSTASQQPGYIQPRPQPPPAEGELFGRGRQRGTAGGTAKSQGLQISAGFQELSLAERGGRRRDFHDLGVNTRQNLDHVKESKTGSSGIIVRLSTNHFRLTSRPQWALYQYHIDYNPLMEARRLRSALL

SEQ ID NO: 58087 - protein, 172 aa, Homo sapiens
MTGRARARARGRARGQETAQLVGSTASQQPGYIQPRPQPPPAEGELFGRGRQRGTAGGTAKSQGLQISAGFQELSLAERGGRRRDFHDLGVNTRQNLDHVKESKTGSSGIIVRLSTNHFRLTSRPQWALYQYHIDYNPLMEARRLRSALLFQHEDLIGKCHAFDGTILFLPK

SEQ ID NO: 58088 - protein, 165 aa, Homo sapiens
MTGRARARARGRARGQETAQLVGSTASQQPGYIQPRPQPPPAEGELFGRGRQRGTAGGTAKSQGLQISAGFQELSLAERGGRRRDFHDLGVNTRQNLDHVKESKTGSSGIIVRLSTNHFRLTSRPQWALYQYHIDYNPLMEARRLRSALLFQHEDLIGKCHAFDG

SEQ ID NO: 58089 - protein, 973 aa, Homo sapiens
MDPFRPSFRGQSPIHPSQCQAVRMPGCWPQASKPLDPALGRGAPAGRGHVFGKPEEPSTQRGPAQRESVGLVSMFRGLGIETVSKTPLKREMLPSGRGILGRGLSANLVRKDREELSPTFWDPKVLAAGDSKMAETSVGWSRTLGRGSSDASLLPLGRAAGGISREVDKPPCTFSTPSRGPPQLSSPPALPQSPLHSPDRPLVLTVEHKEKELIVKQGSKGTPQSLGLNLVKIQCHNEAVYQYHVTFSPNVECKSMRFGMLKDHQAVTGNVTAFDGSILYLPVKLQQVLELKSQRKTDSAEISIKIQMTKILEPCSDLCIPFYNVVFRRVMKLLDMKLVGRNFYDPTSAMVLQQHRLQIWPGYAASIRRTDGGLFLLADVSHKVIRNDCVLDVMHAIYQQNKEHFQDECTKLLVGNIVITRYNNRTYRIDDVDWNKTPKDSFTMSDGKEITFLEYYSKNYGITVKEEDQPLLIHRPSERQDNHGMLLKGEILLLPELSFMTGIPEKMKKDFRAMKDLAQQINLSPKQHHSALECLLQRIAKNEAATNELMRWGLRLQKDVHKIEGRVLPMERINLKNTSFITSQELNWVKEVTRDPSILTIPMHFWALFYPKRAMDQARELVNMLEKIAGPIGMRMSPPAWVELKDDRIETYVRTIQSTLGAEGKIQMVVCIIMGPRDDLYGAIKKLCCVQSPVPSQVVNVRTIGQPTRLRSVAQKILLQINCKLGGELWGVDIPLKQLMVIGMDVYHDPSRGMRSVVGFVASINLTLTKWYSRVVFQMPHQEIVDSLKLCLVGSLKKFYEVNHCLPEKIVVYRDGVSDGQLKTVANYEIPQLQKCFEAFENYQPKMVVFVVQKKISTNLYLAAPQNFVTPTPGTVVDHTITSCEWVDFYLLAHHVRQGCGIPTHYVCVLNTANLSPDHMQRLTFKLCHMYWNWPGTIRVPAPCKYAHKLAFLSGHILHHEPAIQLCENLFFL

SEQ ID NO: 58090 - protein, 973 aa, Homo sapiens; identical to SEQ ID NO: 58089

SEQ ID NO: 58091 - protein, 212 aa, Homo sapiens
MKVFKFIGLMILLTSAFSAGSGQSPMTVLCSIDWFMVTVHPFMLNNDVCVHFHELHLGLGCPPNHVQPHAYQFTYRVTECGIRAKAVSQDMVIYSTEIHYSSKGTPSKFVIPVSCAAPQKSPWLTKPCSMRVASKSRATAQKDEKCYEVFSLSQSSQRPNCDCPPCVFSEEEHTQVPCHQAGAQEAQPLQPSHFLDISEDWSLHTDDMIGSM

SEQ ID NO: 58092 - protein, 97 aa, Homo sapiens
MRPLLCALTGLALLRAAGSLAAAEPFSPPRGDSAQSTACDRHMAVQRRLDVMEEMVEKTVDHLGTEVKGLLGLLEELAWNLPPGPFSPAPDLLGDGF

SEQ ID NO: 58093 - protein, 87 aa, Homo sapiens
MRPLLCALTGLALLRAAGSLAAAEPFSPPRGDSAQSTACDRHMAVQRRLDVMEEMASEPWSWSPAVGGGAPARQRPQNQPCPLDFLP

SEQ ID NO: 58094 - protein, 55 aa, Homo sapiens
MAVQRRLDVMEEMVEKTVDHLGTEVKGLLGLLEELAWNLPPGPFSPAPDLLGDGF

SEQ ID NO: 58095 - protein, 747 aa, Homo sapiens
MNHSPLKTALAYECFQDQDNSTLALPSDQKMKTGTSGRQRVQEQVMMTVKRQKSKSSQSSTLSHSNRGSMYDGLADNYNYGTTSRSSYYSKFQAGNGSWGYPIYNGTLKREPDNRRFSSYSQMENWSRHYPRGSCNTTGAGSDICFMQKIKASRSEPDLYCDPRGTLRKGTLGSKGQKTTQNRYSFYSTCSGQKAIKKCPVRPPSCASKQDPVYIPPISCNKDLSFGHSRASSKICSEDIECSGLTIPKAVQYLSSQDEKYQAIGAYYIQHTCFQDESAKQQVYQLGGICKLVDLLRSPNQNVQQAAAGALRNLVFRSTTNKLETRRQNGIREAVSLLRRTGNAEIQKQLTGLLWNLSSTDELKEELIADALPVLADRVIIPFSGWCDGNSNMSREVVDPEVFFNATGCLRKRLGMRELLALVPQRATSSRVNLSSADAGRQTMRNYSGLIDSLMAYVQNCVAASRCDDKSVENCMCVLHNLSYRLDAEVPTRYRQLEYNARNAYTEKSSTGCFSNKSDKMMNNNYDCPLPEEETNPKGSGWLYHSDAIRTYLNLMGKSKKDATLEACAGALQNLTASKGLMSSGMSQLIGLKEKGLPQIARLLQSGNSDVVRSGASLLSNMSRHPLLHRVMGNQVFPEVTRLLTSHTGNTSNSEDILSSACYTVRNLMASQPQLAKQYFSSSMLNNIINLCRSSASPKAAEAARLLLSDMWSSKELQGVLRQQGFDRNMLGTLAGANSLRNFTSRF

SEQ ID NO: 58096 - protein, 747 aa, Homo sapiens; identical to SEQ ID NO: 58095

SEQ ID NO: 58097 - protein, 726 aa, Homo sapiens
MNHSPLKTALAYECFQDQDNSTLALPSDQKMKTGTSGRQRVQEQVMMTVKRQKSKSSQSSTLSHSNRGSMYDGLADNYNYGTTSRSSYYSKFQAGNGSWGYPIYNGTLKREPDNRRFSSYSQMENWSRHYPRGSCNTTGAGSDICFMQKIKASRSEPDLYCDPRGTLRKGTLGSKGQKTTQNRYSFYSTCSGQKAIKKCPVRPPSCASKQDPVYIPPISCNKDLSFGHSRASSKICSEDIECSGLTIPKAVQYLSSQDEKYQAIGAYYIQHTCFQDESAKQQVYQLGGICKLVDLLRSPNQNVQQAAAGALRNLVFRSTTNKLETRRQNGIREAVSLLRRTGNAEIQKQLTGLLWNLSSTDELKEELIADALPVLADRVIIPFSGWCDGNSNMSREVVDPEVFFNATGCLRNLSSADAGRQTMRNYSGLIDSLMAYVQNCVAASRCDDKSVENCMCVLHNLSYRLDAEVPTRYRQLEYNARNAYTEKSSTGCFSNKSDKMMNNNYDCPLPEEETNPKGSGWLYHSDAIRTYLNLMGKSKKDATLEACAGALQNLTASKGLMSSGMSQLIGLKEKGLPQIARLLQSGNSDVVRSGASLLSNMSRHPLLHRVMGNQVFPEVTRLLTSHTGNTSNSEDILSSACYTVRNLMASQPQLAKQYFSSSMLNNIINLCRSSASPKAAEAARLLLSDMWSSKELQGVLRQQGFDRNMLGTLAGANSLRNFTSRF

SEQ ID NO: 58098 - protein, 881 aa, Homo sapiens
MAAPGAPAEYGYIRTVLGQQILGQLDSSSLALPSEAKLKLAGSSGRGGQTVKSLRIQEQVQQTLARKGRSSVGNGNLHRTSSVPEYVYNLHLVENDFVGGRSPVPKTYDMLKAGTTATYEGRWGRGTAQYSSQKSVEERSLRHPLRRLEISPDSSPERAHYTHSDYQYSQRSQAGHTLHHQESRRAALLVPPRYARSEIVGVSRAGTTSRQRHFDTYHRQYQHGSVSDTVFDSIPANPALLTYPRPGTSRSMGNLLEKENYLTAGLTVGQVRPLVPLQPVTQNRASRSSWHQSSFHSTRTLREAGPSVAVDSSGRRAHLTVGQAAAGGSGNLLTERSTFTDSQLGNADMEMTLERAVSMLEADHMLPSRISAAATFIQHECFQKSEARKRVNQLRGILKLLQLLKVQNEDVQRAVCGALRNLVFEDNDNKLEVAELNGVPRLLQVLKQTRDLETKKQITDHTVNLRSRNGWPGAVAHACNPSTLGGQGGRITRSGVRDQPDQHGLLWNLSSNDKLKNLMITEALLTLTENIIIPFSGWPEGDYPKANGLLDFDIFYNVTGCLRNMSSAGADGRKAMRRCDGLIDSLVHYVRGTIADYQPDDKATENCVCILHNLSYQLEAELPEKYSQNIYIQNRNIQTDNNKSIGCFGSRSRKVKEQYQDVPMPEEKSNPKGVEWLWHSIVIRMYLSLIAKSVRNYTQEASLGALQNLTAGSGPMPTSVAQTVVQKESGLQHTRKMLHVGDPSVKKTAISLLRNLSRNLSLQNEIAKETLPDLVSIIPDTVPSTDLLIETTASACYTLNNIIQNSYQNARDLLNTGGIQKIMAISAGDAYASNKASKAASVLLYSLWAHTELHHAYKKAQFKKTDFVNSRTAKAYHSLKD

SEQ ID NO: 58099 - protein, 837 aa, Homo sapiens
MAAPGAPAEYGYIRTVLGQQILGQLDSSSLALPSEAKLKLAGSSGRGGQTVKSLRIQEQVQQTLARKGRSSVGNGNLHRTSSVPEYVYNLHLVENDFVGGRSPVPKTYDMLKAGTTATYEGRWGRGTAQYSSQKSVEERSLRHPLRRLEISPDSSPERAHYTHSDYQYSQRSQAGHTLHHQESRRAALLVPPRYARSEIVGVSRAGTTSRQRHFDTYHRQYQHGSVSDTVFDSIPANPALLTYPRPGTSRSMGNLLEKENYLTAGLTVGQVRPLVPLQPVTQNRASRSSWHQSSFHSTRTLREAGPSVAVDSSGRRAHLTVGQAAAGGSGNLLTERSTFTDSQLGNADMEMTLERAVSMLEADHMLPSRISAAATFIQHECFQKSEARKRVNQLRGILKLLQLLKVQNEDVQRAVCGALRNLVFEDNDNKLEVAELNGVPRLLQVLKQTRDLETKKQITGLLWNLSSNDKLKNLMITEALLTLTENIIIPFSGWPEGDYPKANGLLDFDIFYNVTGCLRNMSSAGADGRKAMRRCDGLIDSLVHYVRGTIADYQPDDKATENCVCILHNLSYQLEAELPEKYSQNIYIQNRNIQTDNNKSIGCFGSRSRKVKEQYQDVPMPEEKSNPKGVEWLWHSIVIRMYLSLIAKSVRNYTQEASLGALQNLTAGSGPMPTSVAQTVVQKESGLQHTRKMLHVGDPSVKKTAISLLRNLSRNLSLQNEIAKETLPDLVSIIPDTVPSTDLLIETTASACYTLNNIIQNSYQNARDLLNTGGIQKIMAISAGDAYASNKASKAASVLLYSLWAHTELHHAYKKAQFKKTDFVNSRTAKAYHSLKD

SEQ ID NO: 58100 - protein, 824 aa, Homo sapiens [sequence omitted]

SEQ ID NO: 58101 - protein, 797 aa, Homo sapiens
MQDGNFLLSALQPEAGVCSLALPSDLQLDRRGAEGPEAERLRAARVQEQVRARLLQLGQQPRHNGAAEPEPEAETARGTSRGQYHTLQAGFSSRSQGLSGDKTSGFRPIAKPAYSPASWSSRSAVDLSCSRRLSSAHNGGSAFGAAGYGGAQPTPPMPTRPVSFHERGGVGSRADYDTLSLRSLRLGPGGLDDRYSLVSEQLEPAATSTYRAFAYERQASSSSSRAGGLDWPEATEVSPSRTIRAPAVRTLQRFQSSHRSRGVGGAVPGAVLEPVARAPSVRSLSLSLADSGHLPDVHGFNSYGSHRTLQRLSSGFDDIDLPSAVKYLMASDPNLQVLGAAYIQHKCYSDAAAKKQARSLQAVPRLVKLFNHANQEVQRHATGAMRNLIYDNADNKLALVEENGIFELLRTLREQDDELRKNVTGILWNLSSSDHLKDRLARDTLEQLTDLVLSPLSGAGGPPLIQQNASEAEIFYNATGFLRNLSSASQATRQKMRECHGLVDALVTSINHALDAGKCEDKSVENAVCVLRNLSYRLYDEMPPSALQRLEGRGRRDLAGAPPGEVVGCFTPQSRRLRELPLAADALTFAEVSKDPKGLEWLWSPQIVGLYNRLLQRCELNRHTTEAAAGALQNITAGDRRWAGVLSRLALEQERILNPLLDRVRTADHHQLRSLTGLIRNLSRNARNKDEMSTKVVSHLIEKLPGSVGEKSPPAEVLVNIIAVLNNLVVASPIAARDLLYFDGLRKLIFIKKKRDSPDSEKSSRAASSLLANLWQYNKLHRDFRAKGYRKEDFLGP

SEQ ID NO: 58102 - protein, 91 aa, Homo sapiens
TAFRRTPGEEFAWRDPELPEVIHMLQHQFPSVQANAAAYLQHLCFGDNKVKMEVCRLGGIKHLVDLLDHRVGSSEECLWCPSKPRFWQVYR

SEQ ID NO: 58103 - protein, 1149 aa, Homo sapiens
MPAPEQASLVEEGQPQTRQEAASTGPGMEPETTATTILASVKEQELQFQRLTRELEVERQIVASQLERCRLGAESPSIASTSSTEKSFPWRSTDVPNTGVSKPRVSDAVQPNNYLIRTEPEQGTLYSPEQTSLHESEGSLGNSRSSTQMNSYSDSGYQEAGSFHNSQNVSKADNRQQHSFIGSTNNHVVRNSRAEGQTLVQPSVANRAMRRVSSVPSRAQSPSYVISTGVSPSRGSLRTSLGSGFGSPSVTDPRPLNPSAYSSTTLPAARAASPYSQRPASPTAIRRIGSVTSRQTSNPNGPTPQYQTTARVGSPLTLTDAQTRVASPSQGQVGSSSPKRSGMTAVPQHLGPSLQRTVHDMEQFGQQQYDIYERMVPPRPDSLTGLRSSYASQHSQLGQDLRSAVSPDLHITPIYEGRTYYSPVYRSPNHGTVELQGSQTALYRTGSVGIGNLQRTSSQRSTLTYQRNNYALNTTATYAEPYRPIQYRVQECNYNRLQHAVPADDGTTRSPSIDSIQKDPREFAWRDPELPEVIHMLQHQFPSVQANAAAYLQHLCFGDNKVKMEVCRLGGIKHLVDLLDHRVLEVQKNACGALRNLVFGKSTDENKIAMKNVGGIPALLRLLRKSIDAEVRELVTGVLWNLSSCDAVKMTIIRDALSTLTNTVIVPHSGWNNSSFDDDHKIKFQTSLVLRNTTGCLRNLSSAGEEARKQMRSCEGLVDSLLYVIHTCVNTSDYDSKTVENCVCTLRNLSYRLELEVPQARLLGLNELDDLLGKESPSKDSEPSCWGKKKKKKKRTPQEDQWDGVGPIPGLSKSPKGVEMLWHPSVVKPYLTLLAESSNPATLEGSAGSLQNLSAGNWKFAAYIRAAVRKEKGLPILVELLRMDNDRVVSSVATALRNMALDVRNKELIGKYAMRDLVNRLPGGNGPSVLSDETMAAICCALHEVTSKNMENAKALADSGGIEKLVNITKGRGDRSSLKVVKAAAQVLNTLWQYRDLRSIYKKDGWNQNHFITPVSTLERDRFKSHPSLSTTNQQMSPIIQSGSSKPSPIYISSYSSPAREQNRRLQHQQLYYSQDDSNRKNFDAYRLYLQSPHSYEDPYFDDRVHFPASTDYSTQYGLKSTTNYVDFYSTKRPSYRAEQYPGSPDSWV

SEQ ID NO: 58104 - protein, 1192 aa, Homo sapiens
MPAPEQASLVEEGQPQTRQEAASTGPGMEPETTATTILASVKEQELQFQRLTRELEVERQIVASQLERCRLGAESPSIASTSSTEKSFPWRSTDVPNTGVSKPRVSDAVQPNNYLIRTEPEQGTLYSPEQTSLHESEGSLGNSRSSTQMNSYSDSGYQEAGSFHNSQNVSKADNRQQHSFIGSTNNHVVRNSRAEGQTLVQPSVANRAMRRVSSVPSRAQSPSYVISTGVSPSRGSLRTSLGSGFGSPSVTDPRPLNPSAYSSTTLPAARAASPYSQRPASPTAIRRIGSVTSRQTSNPNGPTPQYQTTARVGSPLTLTDAQTRVASPSQGQVGSSSPKRSGMTAVPQHLGPSLQRTVHDMEQFGQQQYDIYERMVPPRPDSLTGLRSSYASQHSQLGQDLRSAVSPDLHITPIYEGRTYYSPVYRSPNHGTVELQGSQTALYRTGSVGIGNLQRTSSQRSTLTYQRNNYALNTTATYAEPYRPIQYRVQECNYNRLQHAVPADDGTTRSPSIDSIQKDPREFAWRDPELPEVIHMLQHQFPSVQANAAAYLQHLCFGDNKVKMEVCRLGGIKHLVDLLDHRVLEVQKNACGALRNLVFGKSTDENKIAMKNVGGIPALLRLLRKSIDAEVRELVTGVLWNLSSCDAVKMTIIRDALSTLTNTVIVPHSGWNNSSFDDDHKIKFQTSLVLRNTTGCLRNLSSAGEEARKQMRSCEGLVDSLLYVIHTCVNTSDYDSKTVENCVCTLRNLSYRLELEVPQARLLGLNELDDLLGKESPSKDSEPSCWGKKKKKKKRTPQEDQWDGVGPIPGLSKSPKGVEMLWHPSVVKPYLTLLAESSNPATLEGSAGSLQNLSAGNWKFAAYIRAAVRKEKGLPILVELLRMDNDRVVSSVATALRNMALDVRNKELIGKYAMRDLVNRLPGGNGPSVLSDETMAAICCALHEVTSKNMENAKALADSGGIEKLVNITKGRGDRSSLKVVKAAAQVLNTLWQYRDLRSIYKKDGWNQNHFITPVSTLERDRFKSHPSLSTTNQQMSPIIQSVGSTSSSPALLGIRDPRSEYDRTQPPMQYYNSQGDATHKGLYPGSSKPSPIYISSYSSPAREQNRRLQHQQLYYSQDDSNRKNFDAYRLYLQSPHSYEDPYFDDRVHFPASTDYSTQYGLKSTTNYVDFYSTKRPSYRAEQYPGSPDSWV

SEQ ID NO: 58105 - protein, 614 aa, Homo sapiens
MNSYSDSGYQEAGSFHNSQNVSKADNRQQHSFIGSTNNHVVRNSRAEGQTLVQPSVANRAMRRVSSVPSRAQSPSYVISTGVSPSRGSLRTSLGSGFGSPSVTDPRPLNPSAYSSTTLPAARAASPYSQRPASPTAIRRIGSVTSRQTSNPNGPTPQYQTTARVGSPLTLTDAQTRVASPSQGQVGSSSPKRSGMTAVPQHLGPSLQRTVHDMEQFGQQQYDIYERMVPPRPDSLTAYGVPMLVSIVSLGKTFVLPCPDLHITPIYEGRTYYSPVYRSPNHGTVELQGSQTALYRTGSVGIGNLQRTSSQRSTLTYQRNNYALNTTATYAEPYRPIQYRVQECNYNRLQHAVPADDGTTRSPSIDSIQKDPREFAWRDPELPEVIHMLQHQFPSVQANAAAYLQHLCFGDNKVKMEVCRLGGIKHLVDLLDHRVLEVQKNACGALRNLVFGKSTDENKIAMKNVGGIPALLRLLRKSIDAEVRELVTGVLWNLSSCDAVKMTIIRDALSTLTNTVIVPHSGWNNSSFDDDHKIKFQTSLVLRNTTGCLRNLSSAGEEARKQMRSCEGLVDSLLYVIHTCVNTSDYDSKTVENCVCTLRNLIGWSWRCPRPGYWD

SEQ ID NO: 58106 - protein, 442 aa, Homo sapiens
MGLAMEHGGSYARAGGSSRGCWYYLRYFFLFVSLIQFLIILGLVLFMVYGNVHVSTESNLQATERRAEGLYSQLLGLTASQSNLTKELNFTTRAKDAIMQMWLNARRDLDRINASFRQCQGDRVIYTNNQRYMAAIILSEKQCRDQFKDMNKSCDALLFMLNQKVKTLEVEIAKEKTICTKDKESVLLNKRVAEEQLVECVKTRELQHQERQLAKEQLQKVQALCLPLDKDKFEMDLRNLWRDSIIPRSLDNLGYNLYHPLGSELASIRRACDHMPSLMSSKVEELARSLRADIERVARENSDLQRQKLEAQQGLRASQEAKQKVEKEAQAREAKLQAECSRQTQLALEEKAVLRKERDNLAKELEEKKREAEQLRMELAIRNSALDTCIKTKSQPMMPVSRPMGPVPNPQPIDPASLEEFKRKILESQRPPAGIPVAPSSG

SEQ ID NO: 58107 - protein, 96 aa, Homo sapiens
MEHKEVVLLLLLFLKSGQGEPLDDYVNTQGPSLFSVTKKQLGAGSREECAAKCEEDKEFTCRAFQYHSKEQQCVIMAENRKSSIIIRMRDAVLFEK

SEQ ID NO: 58108 - protein, 96 aa, Homo sapiens; identical to SEQ ID NO: 58107

SEQ ID NO: 58109 - protein, 96 aa, Homo sapiens; identical to SEQ ID NO: 58107

SEQ ID NO: 58110 - protein, 182 aa, Homo sapiens
MAEFPSKVSTRTSSPAQGAEASVSALRPDLGFVRSRLGALMLLQLVLGLLVWALIADTPYHLYPAYGWVMFVAVFLWLVTIVLFNLYLFQLHMKLYMVPWPLVLMIFNISATVLYITAFIACSAAVDLTSLRGTRPYNQRAAASFFACLVMIAYGVSAFFSYQAWRGVGSNAATSQMAGGYA

SEQ ID NO: 58111 - protein, 629 aa, Homo sapiens
MENSTTTISREELEELQEAFNKIDIDNSGYVSDYELQDLFKEASLPLPGYKVREIVEKILSVADSNKDGKISFEEFVSLMQELKSKDISKTFRKIINKREGITAIGGTSTISSEGTQHSYSEEEKVAFVNWINKALENDPDCKHLIPMNPNDDSLFKSLADGILLCKMINLSEPDTIDERAINKKKLTPFTISENLNLALNSASAIGCTVVNIGASDLKEGKPHLVLGLLWQIIKVGLFADIEISRNEALIALLNEGEELEELMKLSPEELLLRWVNYHLTNAGWHTISNFSQDIKDSRAYFHLLNQIAPKGGEDGPAIAIDLSGINETNDLKRAGLMLQEADKLGCKQFVTPADVVSGNPKLNLAFVANLFNTYPCLHKPNNNDIDMNLLEGESKEERTFRNWMNSLGVNPYINHLYSDLADALVIFQLYEMIRVPVNWSHVNKPPYPALGGNMKKIENCNYAVELGKNKAKFSLVGIAGQDLNEGNSTLTLALVWQLMRRYTLNVLSDLGEGEKVNDEIIIKWVNQTLKSANKKTSISSFKDKSISTSLPVLDLIDAIAPNAVRQEMIRRENLSDEDKLNNAKYAISVARKIGARIYALPDDLVEVKPKMVMTVFACLMGKGLNRIK

SEQ ID NO: 58112 - protein, 629 aa, Homo sapiens; identical to SEQ ID NO: 58111

SEQ ID NO: 58113 - protein, 54 aa, Homo sapiens
MENSTTTISREELEELQEAFNKIDIDNSGYVSDYELQDLFKEASLPLPGYKVRE

SEQ ID NO: 58114 - protein, 120 aa, Homo sapiens
MENSTTTISREELEELQEAFNKIDIDNSGYVSDYELQDLFKEASLPLPGYKVREIVEKILSVADSNKDGKISFEEFVSLMQELKSKDISKTFRKIINKREGITAIGGTSTISSEGTQHSY

SEQ ID NO: 58115 - protein, 119 aa, Homo sapiens
MENSTTTISREELEELQEAFNKIDIDNSGYVSDYELQDLFKEASLPLPGYKVREIVEKILSVADSNKDGKISFEEFVSLMQELKSKDISKTFRKIINKREGITAIGGTSTISSEGTQHS

SEQ ID NO: 58116 - protein, 33 aa, Homo sapiens
MENSTTTISREELEELQEAFNKIDIDNSGYVSD

SEQ ID NO: 58117 - protein, 58 aa, Homo sapiens
MENSTTTISREELEELQEAFNKIDIDNSGYVSDYELQDLFKEASLPLPGYKVREIVEK

SEQ ID NO: 58118 - protein, 629 aa, Homo sapiens; identical to SEQ ID NO: 58111

SEQ ID NO: 58119 - protein, 53 aa, Homo sapiens
MENSTTTISREELEELQEAFNKIDIDNSGYVSDYELQDLFKEASLPLPGYKVR

SEQ ID NO: 58120 - protein, 594 aa, Homo sapiens
MPLPGYKVREIIQKLMLDGDRNKDGKISFDEFVYIFQEVKSSDIAKTFRKAINRKEGICALGGTSELSSEGTQHSYSEEEKYAFVNWINKALENDPDCRHVIPMNPNTDDLFKAVGDGIVLCKMINLSVPDTIDERAINKKKLTPFIIQENLNLALNSASAIGCHVVNIGAEDLRAGKPHLVLGLLWQIIKIGLFADIELSRNEALAALLRDGETLEELMKLSPEELLLRWANFHLENSGWQKINNFSADIKLIDFSNSVKDSKAYFHLLNQIAPKGQKEGEPRIDINMSGFNETDDLKRAESMLQQADKLGCRQFVTPADVVSGNPKLNLAFVANLFNKYPALTKPENQDIDWTLLEGETREERTFRNWMNSLGVNPHVNHLYADLQDALVILQLYERIKVPVDWSKVNKPPYPKLGANMKKLENCNYAVELGKHPAKFSLVGIGGQDLNDGNQTLTLALVWQLMRRYTLNVLEDLGDGQKANDDIIVNWVNRTLSEAGKSTSIQSFKDKTISSSLAVVDLIDAIQPGCINYDLVKSGNLTEDDKHNNAKYAVSMARRIGARVYALPEDLVEVKPKMVMTVFACLMGRGMKRV

SEQ ID NO: 58121 - protein, 630 aa, Homo sapiens
MDEMATTQISKDELDELKEAFAKVDLNSNGFICDYELHELFKEANMPLPGYKVREIIQKLMLDGDRNKDGKISFDEFVYIFQEVKSSDIAKTFRKAINRKEGICALGGTSELSSEGTQHSYSEEEKYAFVNWINKALENDPDCRHVIPMNPNTDDLFKAVGDGIVLCKMINLSVPDTIDERAINKKKLTPFIIQENLNLALNSASAIGCHVVNIGAEDLRAGKPHLVLGLLWQIIKIGLFADIELSRNEALAALLRDGETLEELMKLSPEELLLRWANFHLENSGWQKINNFSADIKDSKAYFHLLNQIAPKGQKEGEPRIDINMSGFNETDDLKRAESMLQQADKLGCRQFVTPADVVSGNPKLNLAFVANLFNKYPALTKPENQDIDWTLLEGETREERTFRNWMNSLGVNPHVNHLYADLQDALVILQLYERIKVPVDWSKVNKPPYPKLGANMKKLENCNYAVELGKHPAKFSLVGIGGQDLNDGNQTLTLALVWQLMRRYTLNVLEDLGDGQKANDDIIVNWVNRTLSEAGKSTSIQSFKDKTISSSLAVVDLIDAIQPGCINYDLVKSGNLTEDDKHNNAKYAVSMARRIGARVYALPEDLVEVKPKMVMTVFACLMGRGMKRV

SEQ ID NO: 58122 - protein, 630 aa, Homo sapiens; identical to SEQ ID NO: 58121

SEQ ID NO: 58123 - protein, 617 aa, Homo sapiens
MEDLNSNGFICDYELHELFKEANMPLPGYKVREIIQKLMLDGDRNKDGKISFDEFVYIFQEVKSSDIAKTFRKAINRKEGICALGGTSELSSEGTQHSYSEEEKYAFVNWINKALENDPDCRHVIPMNPNTDDLFKAVGDGIVLCKMINLSVPDTIDERAINKKKLTPFIIQENLNLALNSASAIGCHVVNIGAEDLRAGKPHLVLGLLWQIIKIGLFADIELSRNEALAALLRDGETLEELMKLSPEELLLRWANFHLENSGWQKINNFSADIKLIDFSNSVKDSKAYFHLLNQIAPKGQKEGEPRIDINMSGFNETDDLKRAESMLQQADKLGCRQFVTPADVVSGNPKLNLAFVANLFNKYPALTKPENQDIDWTLLEGETREERTFRNWMNSLGVNPHVNHLYADLQDALVILQLYERIKVPVDWSKVNKPPYPKLGANMKKLENCNYAVELGKHPAKFSLVGIGGQDLNDGNQTLTLALVWQLMRRYTLNVLEDLGDGQKANDDIIVNWVNRTLSEAGKSTSIQSFKDKTISSSLAVVDLIDAIQPGCINYDLVKSGNLTEDDKHNNAKYAVSMARRIGARVYALPEDLVEVKPKMVMTVFACLMGRGMKRV

SEQ ID NO: 58124 - protein, 585 aa, Homo sapiens
MPLPGYKVREIIQKLMLDGDRNKDGKISFDEFVYIFQEVKSSDIAKTFRKAINRKEGICALGGTSELSSEGTQHSYSEEEKYAFVNWINKALENDPDCRHVIPMNPNTDDLFKAVGDGIVLCKMINLSVPDTIDERAINKKKLTPFIIQENLNLALNSASAIGCHVVNIGAEDLRAGKPHLVLGLLWQIIKIGLFADIELSRNEALAALLRDGETLEELMKLSPEELLLRWANFHLENSGWQKINNFSADIKDSKAYFHLLNQIAPKGQKEGEPRIDINMSGFNETDDLKRAESMLQQADKLGCRQFVTPADVVSGNPKLNLAFVANLFNKYPALTKPENQDIDWTLLEGETREERTFRNWMNSLGVNPHVNHLYADLQDALVILQLYERIKVPVDWSKVNKPPYPKLGANMKKLENCNYAVELGKHPAKFSLVGIGGQDLNDGNQTLTLALVWQLMRRYTLNVLEDLGDGQKANDDIIVNWVNRTLSEAGKSTSIQSFKDKTISSSLAVVDLIDAIQPGCINYDLVKSGNLTEDDKHNNAKYAVSMARRIGARVYALPEDLVEVKPKMVMTVFACLMGRGMKRV

SEQ ID NO: 58125 - protein, 224 aa, Homo sapiens
MNSLGVNPHVNHLYADLQDALVILQLYERIKVPVDWSKVNKPPYPKLGANMKKLENCNYAVELGKHPAKFSLVGIGGQDLNDGNQTLTLALVWQLMRRYTLNVLEDLGDGQKANDDIIVNWVNRTLSEAGKSTSIQSFKDKTISSSLAVVDLIDAIQPGCINYDLVKSGNLTEDDKHNNAKYAVSMARRIGARVYALPEDLVEVKPKMVMTVFACLMGRGMKRV

SEQ ID NO: 58126 - protein, 101 aa, Homo sapiens
MSSAAGFCASRPGLLFLGLLLLPLVVAFASAEAEEDGDLQCLCVKTTSQVRPRHITSLEVIKAGPHCPTAQLIATLKNGRKICLDLQAPLYKKIIKKLLES

SEQ ID NO: 58127 - protein, 104 aa, Homo sapiens
MSSAARSRLTRATRQEMLFLALLLLPVVVAFARAEAEEDGDLQCLCVKTTSQVRPRHITSLEVIKAGPHCPTAQLIATLKNGRKICLDLQALLYKKIIKEHLES

SEQ ID NO: 58128 - protein, 132 aa, Homo sapiens
MSQGDSNPAAIPHAAEDIQGDDRWMSQHNRFVLDCKDKEPDVLFVGDSMVQLMQQYEIWRELFSPLHALNFGIGGDTTRHVLWRLKNGELENIKPKVIVVWVGTNNHENTAEEVAGGIEAIVQLINTRQPQA

SEQ ID NO: 58129 - protein, 229 aa, Homo sapiens
MSQGDSNPAAIPHAAEDIQGDDRWMSQHNRFVLDCKDKEPDVLFVGDSMVQLMQQYEIWRELFSPLHALNFGIGGDTTRHVLWRLKNGELENIKPKVIVVWVGTNNHENTAEEVAGGIEAIVQLINTRQPQAKIIVLGLLPRGEKPNPLRQKNAKVNQLLKVSLPKLANVQLLDTDGGFVHSDGAISCHDMFDFLHLTGGGYAKICKPLHELIMQLLEETPEEKQTTIA

SEQ ID NO: 58130 - protein, 155 aa, Homo sapiens
MSQGDSNPAAIPHAAEDIQGDDRWMSQHNRFVLDCKDKEPDVLFVGDSMVQLMQQYEIWRELFSPLHALNFGIGGDTTRHVLWRLKNGELENIKPKVIVVWVGTNNHENTAEEVAGGIEAIVQLINTRQPQAKIIVLIIYWQDEQDYHERKVQMD

SEQ ID NO: 58131 - protein, 202 aa, Homo sapiens
MSQGDSNPAAIPHAAEDIQGDDRWMSQHNRFVLDCKDKEPDVLFVGDSMVQLMQQYEIWRELFSPLHALNFGIGGDTTRHVLWRLKNGELENIKPKVIVVWVGTNNHENTAEEVAGGIEAIVQLINTRQPQAKIIVLGKAAASKYSISEIVRLEQGSVNWSIGTYPDDTPATTRPAILQLFTGKMSRITMKEKSRWTEEILH

SEQ ID NO: 58132 - protein, 231 aa, Homo sapiens
MSGEENPASKPTPVQDVQGDGRWMSLHHRFVADSKDKEPEVVFIGDSLVQLMHQCEIWRELFSPLHALNFGIGGDGTQHVLWRLENGELEHIRPKIVVVWVGTNNHGHTAEQVTGGIKAIVQLVNERQPQARVVVLGLLPRGQHPNPLREKNRQVNELVRAALAGHPRAHFLDADPGFVHSDGTISHHDMYDYLHLSRLGYTPVCRALHSLLLRLLAQDQGQGAPLLEPAP

SEQ ID NO: 58133 - protein, 231 aa, Homo sapiens; identical to SEQ ID NO: 58132

SEQ ID NO: 58134 - protein, 239 aa, Homo sapiens
MTIKLWDFQGFECIRTMHGHDHNVSSVAIMPNGDHIVSASRDKTIKMWEVQTGYCVKTFTGHREWVRMVRPNQDGTLIASCSNDQTVRVWVVATKECKAELREHEHVVECISWAPESSYSSISEATGSETKKSGKPGPFLLSGSRDKTIKMWDVSTGMCLMTLVGHDNWVRGVLFHSGGKFILSCADDKTLRVWDYKNKRCMKTLNAHEHFVTSLDFHKTAPYVVTGSVDQTVKVWECR

SEQ ID NO: 58135 - protein, 410 aa, Homo sapiens
MVLSQRQRDELNRAIADYLRSNGYEEAYSVFKKEAELDVNEELDKKYAGLLEKKWTSVIRLQKKVMELESKLNEAKEEFTSGGPLGQKRDPKEWIPRPPEKYALSGHRSPVTRVIFHPVFSVMVSASEDATIKVWDYETGDFERTLKGHTDSVQDISFDHSGKLLASCSADMTIKLWDFQGFECIRTMHGHDHNVSSVAIMPNGDHIVSASRDKTIKMWEVQTGYCVKTFTGHREWVRMVRPNQDGTLIASCSNDQTVRVWVVATKECKAELREHEHVVECISWAPESSYSSISEATGSETKKSGKPGPFLLSGSRDKTIKMWDVSTGMCLMTLVGHDNWVRGVLFHSGGKFILSCADDKTLRVWDYKNKRCMKTLNAHEHFVTSLDFHKTAPYVVTGSVDQTVKVWECR

SEQ ID NO: 58136 - protein, 205 aa, Homo sapiens
MTIKLWDFQGFECIRTMHGHDHNVSSVAIMPNGDHIVSASRDKTIKMWEVQTGYCVKTFTGHREWVRMVRPNQDGTLIASCSNDQTVRVWVVATKECKAELREHEHVVECISWAPESSYSSISEATGSEVGHDNWVRGVLFHSGGKFILSCADDKTLRVWDYKNKRCMKTLNAHEHFVTSLDFHKTAPYVVTGSVDQTVKVWECR

SEQ ID NO: 58137 - protein, 342 aa, Homo sapiens
MEPHDSSHMDSEFRYTLFPIVYSIIFVLGVIANGYVLWVFARLYPCKKFNEIKIFMVNLTMADMLFLITLPLWIVYYQNQGNWILPKFLCNVAGCLFFINTYCSVAFLGVITYNRFQAVTRPIKTAQANTRKRGISLSLVIWVAIVGAASYFLILDSTNTVPDSAGSGNVTRCFEHYEKGSVPVLIIHIFIVFSFFLVFLIILFCNLVIIRTLLMQPVQQQRNAEVKRRALWMVCTVLAVFIICFVPHHVVQLPWTLAELGFQDSKFHQAINDAHQVTLCLLSTNCVLDPVIYCFLTKKFRKHLTEKFYSMRSSRKCSRATTDTVTEVVVPFNQIPGNSLKN

SEQ ID NO: 58138 - protein, 342 aa, Homo sapiens; identical to SEQ ID NO: 58137

SEQ ID NO: 58139 - protein, 342 aa, Homo sapiens; identical to SEQ ID NO: 58137

SEQ ID NO: 58140 - protein, 375 aa, Homo sapiens
MKVWLLLGLLLVHEALEDVTGQHLPKNKRPKEPGENRIKPTNKKVKPKIPKMKDRDSANSAPKTQSIMMQVLDKGRFQKPAATLSLLAGQTVELRCKGSRIGWSYPAYLDTFKDSRLSVKQNERYGQLTLVNSTSADTGEFSCWVQLCSGYICRKDEAKTGSTYIFFTEKGELFVPSPSYFDVVYLNPDRQAVVPCRVTVLSAKVTLHREFPAKEIPANGTDIVYDMKRGFVYLQPHSEHQGVVYCRAEAGGRSQISVKYQLLYVAVPSGPPSTTILASSNKVKSGDDISVLCTVLGEPDVEVEFTWIFPGQKDERPVTIQDTWRLIHRGLGHTTRISQSVITVEDFETIDAGYYICTAQNLQGQTTVATTVEFS

SEQ ID NO: 58141 - protein, 375 aa, Homo sapiens; identical to SEQ ID NO: 58140

SEQ ID NO: 58142 - protein, 375 aa, Homo sapiens; identical to SEQ ID NO: 58140

SEQ ID NO: 58143 - protein, 1024 aa, Homo sapiens
MAQGAMRFCSEGDCAISPPRCPRRWLPEGPVPQSPPASMYGSTGSLLRRVAGPGPRGRELGRVTAPCTPLRGPPSPRVAPSPWAPSSPTGQPPPGAQSSVVIFRFVEKASVRPLNGLPAPGGLSRSWDLGGVSPPRPTPALGPGSNRKLRLEASTSDPLPARGGSALPGSRNLVHGPPAPPQVGADGLYSSLPNGLGGPPERLATLFGGPADTGFLNQGDTWSSPREVSSHAQRIARAKWEFFYGSLDPPSSGAKPPEQAPPSPPGVGSRQGSGVAVGRAAKYSETDLDTVPLRCYRETDIDEVLAEREEADSAIESQPSSEGPPGTAYPPAPRPGPLPGPHPSLGSGNEDEDDDEAGGEEDVDDEVFEASEGARPGSRMPLKSPVPFLPGTSPSADGPDSFSCVFEAILESHRAKGTSYTSLASLEALASPGPTQSPFFTFELPPQPPAPRPDPPAPAPLAPLEPDSGTSSAADGPWTQRGEEEEAEARAKLAPGREPPSPCHSEDSLGLGAAPLGSEPPLSQLVSDSDSELDSTERLALGSTDTLSNGQKADLEAAQRLAKRLYRLDGFRKADVARHLGKNNDFSKLVAGEYLKFFVFTGMTLDQALRVFLKELALMGETQERERVLAHFSQRYFQCNPEALSSEDGAHTLTCALMLLNTDLHGHNIGKRMTCGDFIGNLEGLNDGGDFPRELLKALYSSIKNEKLQWAIDEEELRRSLSELADPNPKVIKRISGGSGSGSSPFLDLTPEPGAAVYKHGALVRKVHADPDCRKTPRGKRGWKSFHGILKGMILYLQKEEYKPGKALSETELKNAISIHHALATRASDYSKRPHVFYLRTADWRVFLFQAPSLEQMQSWITRINVVAAMFSAPPFPAAVSSQKKFSRPLLPSAATRLSQEEQVRTHEAKLKAMASELREHRAAQLGKKGRGKEAEEQRQKEAYLEFEKSRYSTYAALLRVKLKAGSEELDAVEAALAQAGSTEDGLPPSHSSPSLQPKPSSQPRAQRHSSEPRPGAGSGRRKP

SEQ ID NO: 58144 - protein, 1024 aa, Homo sapiens; identical to SEQ ID NO: 58143

SEQ ID NO: 58145 - protein, 927 aa, Homo sapiens
QIWRCPLQHHAESAPPLPALSWAQPLLCLSSVSALGEQRPTPALGPGSNRKLRLEASTSDPLPARGGSALPGSRNLVHGPPAPPQVGADGLYSSLPNGLGGPPERLATLFGGPADTGFLNQGDTWSSPREVSSHAQRIARAKWEFFYGSLDPPSSGAKPPEQAPPSPPGVGSRQGSGVAVGRAAKYSETDLDTVPLRCYRETDIDEVLAEREEADSAIESQPSSEGPPGTAYPPAPRPGPLPGPHPSLGSGNEDEDDDEAGGEEDVDDEVFEASEGARPGSRMPLKSPVPFLPGTSPSADGPDSFSCVFEAILESHRAKGTSYTSLASLEALASPGPTQSPFFTFELPPQPPAPRPDPPAPAPLAPLEPDSGTSSAADGPWTQRGEEEEAEARAKLAPGREPPSPCHSEDSLGLGAAPLGSEPPLSQLVSDSDSELDSTERLALGSTDTLSNGQKADLEAAQRLAKRLYRLDGFRKADVARHLGKNNDFSKLVAGEYLKFFVFTGMTLDQALRVFLKELALMGETQERERVLAHFSQRYFQCNPEALSSEDGAHTLTCALMLLNTDLHGHNIGKRMTCGDFIGNLEGLNDGGDFPRELLKALYSSIKNEKLQWAIDEEELRRSLSELADPNPKVIKRISGGSGSGSSPFLDLTPEPGAAVYKHGALVRKVHADPDCRKTPRGKRGWKSFHGILKGMILYLQKEEYKPGKALSETELKNAISIHHALATRASDYSKRPHVFYLRTADWRVFLFQAPSLEQMQSWITRINVVAAMFSAPPFPAAVSSQKKFSRPLLPSAATRLSQEEQVRTHEAKLKAMASELREHRAAQLGKKGRGKEAEEQRQKEAYLEFEKSRYSTYAALLRVKLKAGSEELDAVEAALAQAGSTEDGLPPSHSSPSLQPKPSSQPRAQRHSSEPRPGAGSGRRKP

SEQ ID NO: 58146 - protein, 513 aa, Homo sapiens
MGSSWCLYGCCNAGVKTTRLEAHSEMGSTEILEKETPENLSNGTSSNVEAAKRLAKRLYQLDRFKRSDVAKHLGKNNEFSKLVAEEYLKFFDFTGMTLDQSLRYFFKAFSLVGETQERERVLIHFSNRYFYCNPDTIASQDGVHCLTCAIMLLNTDLHGHNIGKKMTCQEFIANLQGVNEGVDFSKDLLKALYNSIKNEKLEWAVDDEEKKKSPSESTEEKANGTHPKTISRIGSTTNPFLDIPHDPNAAVYKSGFLARKIHADMDGKKTPRGKRGWKTFYAVLKGTVLYLQKDEYKPEKALSEEDLKNAVSVHHALASKATDYEKKPNVFKLKTADWRVLLFQTQSPEEMQGWINKINCVAAVFSAPPFPAAIGSQKKFSRPLLPATTTKLSQEEQLKSHESKLKQITTELAEHRSYPPDKKVKAKDVDEYKLKDHYLEFEKTRYEMYVSILKEGGKELLSNDESEAAGLKKSHSSPSLNPDTSPITAKVKRNVSERKDHRPETPSIKQKVT

SEQ ID NO: 58147 - protein, 1047 aa, Homo sapiens
MEGRSAAAETFVWVNNASAHSQSVAKAKYEFLFGRSEGKAPDTSDHGGSTLLPPNVTNEFPEYGTMEEGGEGLRASLEFDGEALPCHPQEQQGVQPLTGCHSGLDSVTEGPKDVREAPSQSHLKEQSLQPIDSLISALKATEARIISGTLQATKVLDQDAVSSFSVQQVEKELDTASRKTQRVNKTLPAGQKNLPEIPLSAEVTTEESFYLSIQKDLTALLTGDTQAEISQIMNNGRKGAVCVQEPSCPLASLGSSAVTCHSAGSVGFLKEQRSALGREHPGGCDRSSSMGRPGRVKHVEFQGVEILWTGGDKRETQHPIDFETSLQRTASPDSKESSKVPRHLISSAGLCNSSSLTENVWDESWKAPSERPGTSSGTFSPVRLDESGEDEVFLQENKQHLEKTPKPERDRERISEQEEHVKGEDEDILGPGYTEDSTDVYSSQFETILDNTSLYYSAESLETLYSEPDSYFSFEMPLTPMIQQRIKEGGQFLERTSGGGHQDILSVSADGGIVMGYSSGVTNGLNDASDSIYTKGTPEIAFWGSNAGVKTTRLEAHSEMGSTEILEKETPENLSNGTSSNVEAAKRLAKRLYQLDRFKRSDVAKHLGKNNEFSKLVAEEYLKFFDFTGMTLDQSLRYFFKAFSLVGETQERERVLIHFSNRYFYCNPDTIASQDGVHCLTCAIMLLNTDLHGHNIGKKMTCQEFIANLQGVNEGVDFSKDLLKALYNSIKNEKLEWAVDDEEKKKSPSESTEEKANGTHPKTISRIGSTTNPFLDIPHDPNAAVYKSGFLARKIHADMDGKKTPRGKRGWKTFYAVLKGTVLYLQKDEYKPEKALSEEDLKNAVSVHHALASKATDYEKKPNVFKLKTADWRVLLFQTQSPEEMQGWINKINCVAAVFSAPPFPAAIGSQKKFSRPLLPATTTKLSQEEQLKSHESKLKQITTELAEHRSYPPDKKVKAKDVDEYKLKDHYLEFEKTRYEMYVSILKEGGKELLSNDESEAAGLKKSHSSPSLNPDTSPITAKVKRNVSERKDHRPETPSIKQKVT

SEQ ID NO: 58148 - protein, 269 aa, Homo sapiens
MIGVNSVQSASKVRVRTSGSVKYSREDSIRRQSHRSKSMKISNSSEFSAKENKALYNSIKNEKLEWAVDDEEKKKSPSESTEEKANGTHPKTISRIGSTTNPFLDIPHDPNAAVYKSGFLARKIHADMDGKKTPRGKRGWKTFYAVLKGTVLYLQKHESKLKQITTELAEHRSYPPDKKVKAKDVDEYKLKDHYLEFEKTRYEMYVSILKEGGKELLSNDESEAAGLKKSHSSPSLNPDTSPITAKVKRNVSERKDHRPETPSIKQKVT

SEQ ID NO: 58149 - protein, 1049 aa, Homo sapiens
MEGRSAAAETFVWVNNASAHSQSVAKAKYEFLFGRSEGKAPDTSDHGGSTLLPPNVTNEFPEYGTMEEGGEGLRASLEFDGEALPCHPQEQQGVQPLTGCHSGLDSVTEGPKDVREAPSQSHLKEQSLQPIDSLISALKATEARIISGTLQATKVLDQDAVSSFSVQQVEKELDTASRKTQRVNKTLPAGQKNLPEIPLSAEVTTEESFYLSIQKDLTALLTGDTQAEISQIMNNGRKGAVCVQEPSCPLASLGSSAVTCHSAGSVGFLKEQRSALGREHPGGCDRSSSMGRPGRVKHVEFQGVEILWTGGDKRETQHPIDFETSLQRTASPDSKESSKVPRHLISSAGLCNSSSLTENVWDESWKAPSERPGTSSGTFSPVRLDESGEDEVFLQENKQHLEKTPKPERDRERISEQEEHVKGEDEDILGPGYTEDSTDVYSSQFETILDNTSLYYSAESLETLYSEPDSYFSFEMPLTPMIQQRIKEGGQFLERTSGGGHQDILSVSADGGIVMGYSSGVTNGLNDASDSIYTKGTPEIAFWGSNAGVKTTRLEAHSEMGSTEILEKETPENLSNGTSSNVEAAKRLAKRLYQLDRFKRSDVAKHLGKNNEFSKLVAEEYLKFFDFTGMTLDQSLRYFFKAFSLVGETQERERVLIHFSNRYFYCNPDTIASQDGVHCLTCAIMLLNTDLHGHVSNIGKKMTCQEFIANLQGVNEGVDFSKDLLKALYNSIKNEKLEWAVDDEEKKKSPSESTEEKANGTHPKTISRIGSTTNPFLDIPHDPNAAVYKSGFLARKIHADMDGKKTPRGKRGWKTFYAVLKGTVLYLQKDEYKPEKALSEEDLKNAVSVHHALASKATDYEKKPNVFKLKTADWRVLLFQTQSPEEMQGWINKINCVAAVFSAPPFPAAIGSQKKFSRPLLPATTTKLSQEEQLKSHESKLKQITTELAEHRSYPPDKKVKAKDVDEYKLKDHYLEFEKTRYEMYVSILKEGGKELLSNDESEAAGLKKSHSSPSLNPDTSPITAKVKRNVSERKDHRPETPSIKQKVT

SEQ ID NO: 58150 - protein, 1056 aa, Homo sapiens
MMGDYRLPDHPQPMEILNLYLGDSLEPHPGECPRETCSHEDPPEPFEEQTWATDPPEPTRQNVPPWGSGVELTHLGSWVHQDGLEPCQEQTRATDPPESTRQDAPPWGSGVELTHLGSPSAQREHRQNTASPGSPVNSHLPGSPKQNRSTSTQVVFWAGILQAQMCVLDLEEELEKTEGLKAGLKCCLPTPPVDLPGDTGLHSSPPENEDSGEDSSEPEGEGQAWLREGTPDSSPQWGAEEESMFFSNPLFLASPCSENSASGECFSWGASDSHAGVRTGPESPATLEPPLPEDTVLWELESEPDLGDGAAISGHCTPPFPVPIYKPHSICWASVAAAEGAPAAPPGHGESEGDRLGPAPSAAPCVDEALTWESGCVGSDLGPAAHPVQPWASLSPEGWQRGGPFWPQVTLNSQDRDEREGGHPQESLPCTLAPCPWRSPASSPEPSSPESESRGPGPRPSPASSQEGSPQLQHHSSGILPKWTLDASQSSLLETDGEQPSSLKKKEAGEAPKPGEEVKSEGTARPAETGDVQPDIHLTSAEHENLRTPMNSSWLPGSPMPQAQSPEEGQRPPAGDKLANGVRNNKVAWNLASRLYRLEGFRKSEVAAYLQKNNDFSRAVAEEYLSFFQFGGQSLDRALRSFLQALVLSGETQERERILYQFSRRFHHCNPGIFPSVDSVHTLTCAIMLLNTDLHGQNIGKSMSCQEFITNLNGLRDGGNFPKELLKALYWSIRSEKLEWAVDEEDTARPEKAQPSLPAGKMSKPFLQLAQDPTVPTYKQGILARKMHQDADGKKTPWGKRGWKMFHTLLRGMVLYFLKQGEDHCLEGESLVGQMVDEPVGVHHSLATPATHYTKKPHVFQLRTADWRLYLFQAPTAKEMSSWIARINLAAATHSAPPFPAAVGSQRRFVRPILPVGPAQSSLEEQHRSHENCLDAAADDLLDLQRNLPERRGRGRELEEHRLRKEYLEYEKTRYETYVQLLVARLHCPSDALDLWEEQLGREAGGTREPKLSLKKSHSSPSLHQDEAPTTAKVKRNISERRTYRKIIPKRNRNQL

SEQ ID NO: 58151 - protein, 383 aa, Homo sapiens
MPYVDRQNRICGFLDIEENENSGKFLRRYFILDTREDSFVWYMDNPQNLPSGSSRVGAIKLTYISKVSDATKLRPKAEFCFVMNAGMRKYFLQANDQQDLVEWVNVLNKAIKITVPKQSDSQPNSDNLSRHGECGKKQVSYRTDIVGGVPIITPTQKEEVNECGESIDRNNLKRSQSHLPYFTPKPPQDSAVIKAGYCVKQGAVMKNWKRRYFQLDENTIGYFKSELEKEPLRVIPLKEVHKVQECKQSDIMMRDNLFEIVTTSRTFYVQADSPEEMHSWIKAVSGAIVAQRGPGRSASSMRQARRLSNPCIQRSIPPVLQNPNTLSVLPTQPPPPHIPQPLAATLWSQPLPWRSEDFTSLLPRSSQGTSRSRLSLQENQLPK

SEQ ID NO: 58152 - protein, 383 aa, Homo sapiens; identical to SEQ ID NO: 58151

SEQ ID NO: 58153 - protein, 404 aa, Homo sapiens
MPYVDRQNRICGFLDIEENENSGKFLRRYFILDTREDSFVWYMDNPQNLPSGSSRVGAIKLTYISKVSDATKLRPKAEFCFVMNAGMRKYFLQANDQQDLVEWVNVLNKAIKITVPKQSDSQPNSDNLSRHGECGKKQVSYRTDIVGGVPIITPTQKEEVNECGESIDRNNLKRSQSHLPYFTPKPPQDSAVIKAGYCVKQGAVMKNWKRRYFQLDENTIGYFKSELEKEPLRVIPLKEVHKVQECKQSDIMMRDNLFEIVTTSRTFYVQADSPEEMHSWIKAVSGAIVAQRGPGRSASSEHPPGPSESKHAFRPTNAATATSHSTASRSNSLVSTFTMEKRGFYESLAKVKPGNFKVQTVSPREPASKVTEQALLRPQSKNGPQEKDCDLVDLDDASLPVSDV

SEQ ID NO: 58154 - protein, 114 aa, Homo sapiens
MPYVDRQNRICGFLDIEENENSGKFLRRYFILDTREDSFVWYMDNPQNLPSGSSRVGAIKLTYISKVSDATKLRPKAEFCFVMNAGMRKYFLQANDQQDLVEWVNVLNKAIKIT

SEQ ID NO: 58155 - protein, 404 aa, Homo sapiens; identical to SEQ ID NO: 58153

SEQ ID NO: 58156 - protein, 404 aa, Homo sapiens; identical to SEQ ID NO: 58153

SEQ ID NO: 58157 - protein, 334 aa, Homo sapiens
MPYVDRQNRICGFLDIEENENSGKFLRRYFILDTREDSFVWYMDNPQNLPSGSSRVGAIKLTYISKVSDATKLRPKAEFCFVMNAGMRKYFLQANDQQDLVEWVNVLNKAIKITVPKQSDSQPNSDNLSRHGECGKKQVSYRTDIVGGVPIITPTQKEEVNECGESIDRNNLKRSQSHLPYFTPKPPQDSAVIKAGYCVKQGAVMKNWKRRYFQLDENTIGYFKSELEKEPLRVIPLKEVHKVQECKQSDIMMRDNLFEIVTTSRTFYVQADSPEEMHSWIKAVSGAIVAQRGPGRSASSMRQARRLSNPCIQRYTSRAGECSTYVGSHANVPS

SEQ ID NO: 58158 - protein, 425 aa, Homo sapiens
MPYVDRQNRICGFLDIEEHENSGKFLRRYFILDTQANCLLWYMDNPQNLAMGAGAVGALQLTYISKVSIATPKQKPKTPFCFVINALSQRYFLQANDQKDMKDWVEALNQASKITVPKGGGLPMTTEVLKSLAAPPALEKKPQVAYKTEIIGGVVVHTPISQNGGDGQEGSEPGSHTILRRSQSYIPTSGCRASTGPPLIKSGYCVKQGNVRKSWKRRFFALDDFTICYFKCEQDREPLRTIFLKDVLKTHECLVKSGDLLMRDNLFEIITSSRTFYVQADSPEDMHSWIKEIGAAVQALKCHPRETSFSRSISLTRPGSSSLSSGPNSILCRGRPPLEEKKALCKAPSVASSWQPWTPVPQAGEKLLPPGDTSEDSLFTPRPGEGSAPGVLPSSRIRHRSEPQHPKEKPFMFNLDDENIRTSDV

SEQ ID NO: 58159 - protein, 115 aa, Homo sapiens
MPYVDRQNRICGFLDIEEHENSGKFLRRYFILDTQANCLLWYMDNPQNLAMGAGAVGALQLTYISKVSIATPKQKPKTPFCFVINALSQRYFLQANDQKDMKDWVEALNQASKIT

SEQ ID NO: 58160 - protein, 375 aa, Homo sapiens
MGAGAVGALQLTYISKVSIATPKQKPKTPFCFVINALSQRYFLQANDQKDMKDWVEALNQASKITVPKGGGLPMTTEVLKSLAAPPALEKKPQVAYKTEIIGGVVVHTPISQNGGDGQEGSEPGSHTILRRSQSYIPTSGCRASTGPPLIKSGYCVKQGNVRKSWKRRFFALDDFTICYFKCEQDREPLRTIFLKDVLKTHECLVKSGDLLMRDNLFEIITSSRTFYVQADSPEDMHSWIKEIGAAVQALKCHPRETSFSRSISLTRPGSSSLSSGPNSILCRGRPPLEEKKALCKAPSVASSWQPWTPVPQAGEKLLPPGDTSEDSLFTPRPGEGSAPGVLPSSRIRHRSEPQHPKEKPFMFNLDDENIRTSDV

SEQ ID NO: 58161 - protein, 300 aa, Homo sapiens
MEGVLYKWTNYLTGWQPRWFVLDNGILSYYDSQDDVCKGSKGSIKMAVCEIKVHSADNTRMELIIPGEQHFYMKAVNAAERQRWLVALGSSKACLTDTRTKKEKEISETSESLKTKMSELRLYCDLLMQQVHTIQEFVHHDENHSSPSAENMNEASSLLSATCNTFITTLEECVKIANAKFKPEMFQLHHPDPLVSPVSPSPVQMMKRSVSHPGSCSSERSSHSIKEPVSTLHRLSQRRRRTYSDTDSCSDIPLEDPDRPVHCSKNTLNGDLASATIPEESRLMAKKQSESEDTLPSFSS

SEQ ID NO: 58162 - protein, 779 aa, Homo sapiens
MEGSRPRSSLSLASSASTISSLSSLSPKKPTRAVNKIHAFGKRGNALRRDPNLPVHIRGWLHKQDSSGLRLWKRRWFVLSGHCLFYYKDSREESVLGSVLLPSYNIRPDGPGAPRGRRFTFTAEHPGMRTYVLAADTLEDLRGWLRALGRASRAEGDDYGQPRSPARPQPGEGPGGPGGPPEVSRGEEGRISESPEVTRLSRGRGRPRLLTPSPTTDLHSGLQMRRARSPDLFTPLSRPPSPLSLPRPRSAPARRPPAPSGDTAPPARPHTPLSRIDVRPPLDWGPQRQTLSRPPTPRRGPPSEAGGGKPPRSPQHWSQEPRTQAHSGSPTYLQLPPRPPGTRASMVLLPGPPLESTFHQSLETDTLLTKLCGQDRLLRRLQEEIDQKQEEKEQLEAALELTRQQLGQATREAGAPGRAWGRQRLLQDRLVSVRATLCHLTQERERVWDTYSGLEQELGTLRETLEYLLHLGSPQDRVSAQQQLWMVEDTLAGLGGPQKPPPHTEPDSPSPVLQGEESSERESLPESLELSSPRSPETDWGRPPGGDKDLASPHLGLGSPRVSRASSPEGRHLPSPQLGTKAPVARPRMSAQEQLERMRRNQECGRPFPRPTSPRLLTLGRTLSPARRQPDVEQRPVVGHSGAQKWLRSSGSWSSPRNTTPYLPTSEGHRERVLSLSQALATEASQWHRMMTGGNLDSQGDPLPGVPLPPSDPTRQETPPPRSPPVANSGSTGFSRRGSGRGGGPTPWGPAWDAGIAPPVLPQDEGAWPLRVTLLQSSF

SEQ ID NO: 58163 - protein, 583 aa, Homo sapiens
MEGSRPRSSLSLASSASTISSLSSLSPKKPTRAVNKIHAFGKRGNALRRDPNLPVHIRGWLHKQDSSGLRLWKRRWFVLSGHCLFYYKDSREESVLGSVLLPSYNIRPDGPGAPRGRRFTFTAEHPGMRTYVLAADTLEDLRGWLRALGRASRAEGDDYGQPRSPARPQPGEGPGGPGGPPEVSRGEEGRISESPEVTRLSRGRGRPRLLTPSPTTDLHSGLQMRRARSPDLFTPLSRPPSPLSLPRPRSAPARRPPAPSGDTAPPARPHTPLSRIDVRPPLDWGPQRQTLSRPPTPRRGPPSEAGGGKPPRSPQHWSQEPRTQPGPPLESTFHQSLETDTLLTKLCGQDRLLRRLQEEIDQKQEEKEQLEAALELTRQQLGQATREAGAPGRAWGRQRLLQDRLVSVRATLCHLTQERERVWDTYSGLEQELGTLRETLEYLLHLGSPQDRVSAQQQLWMVEDTLAGLGGPQKPPPHTEPDSPSPVLQGEESSERESLPESLELSSPRSPETDWGRPPGGDKDLASPHLGLGSPRVSRASSPEGRHLPSPQLGTKSKEHHPLLADFRRSPGAGSQPLPSPGY

SEQ ID NO: 58164 - protein, 1121 aa, Homo sapiens
MAAATVGRDTLPEHWSYGVCRDGRVFFINDQLRCTTWLHPRTGEPVNSGHMIRSDLPRGWEEGFTEEGASYFIDHNQQTTAFRHPVTGQFSPENSEFILQEEPNPHMSKQDRNQRPSSMVSETSTAGTASTLEAKPGPKIIKSSSKVHSFGKRDQAIRRNPNVPVVVRGWLHKQDSSGMRLWKRRWFVLADYCLFYYKDSREEAVLGSIPLPSYVISPVAPEDRISRKYSFKAVHTGMRALIYNSSTAGSQAEQSGMRTYYFSADTQEDMNAWVRAMNQAAQVLSRSSLKRDMEKVERQAVPQANHTESCHECGRVGPGHTRDCPHRGHDDIVNFERQEQEGEQYRSQRDPLEGKRDRSKARSPYSPAEEDALFMDLPTGPRGQQAQPQRAEKNGMLPASYGPGEQNGTGGYQRAFPPRTNPEKHSQRKSNLAQVEHWARAQKGDSRSLPLDQTLPRQGPGQSLSFPENYQTLPKSTRHPSGGSSPPPRNLPSDYKYAQDRASHLKMSSEERRAHRDGTVWQLYEWQQRQQFRHGSPTAPICLGSPEFTDQGRSRSMLEVPRSISVPPSPSDIPPPGPPRVFPPRRPHTPAERVTVKPPDQRRSVDISLGDSPRRARGHAVKNSSHVDRRSMPSMGYMTHTVSAPSLHGKSADDTYLQLKKDLEYLDLKMTGRDLLKDRSLKPVKIAESDTDVKLSIFCEQDRVLQDLEDKIRALKENKDQLESVLEVLHRQMEQYRDQPQHLEKIAYQQKLLQEDLVHIRAELSRESTEMENAWNEYLKLENDVEQLKQTLQEQHRRAFFFQEKSQIQKDLWRIEDVTAGLSANKENFRILVESVKNPERKTVPLFPHPPVPSLSTSESKPPPQPSPPTSPVRTPLEVRLFPQLQTYVPYRPHPPQLRKVTSPLQSPTKAKPKVEDEAPPRPPLPELYSPEDQPPAVPPLPREATIIRHTSVRGLKRQSDERKRDRELGQCVNGDSRVELRSYVSEPELATLSGDMAQPSLGLVGPESRYQTLPGRGLSGSTSRLQQSSTIAPYVTLRRGLNAESSKATFPRPKSALERLYSGDHQRGKMSAEEQLERMKRHQKALVRERKRTLGQGERTGLPSSRYLSRPLPGDLGSVC

SEQ ID NO: 58165 - protein, 1122 aa, Homo sapiens
MAAATVGRDTLPEHWSYGVCRDGRVFFINDQLRCTTWLHPRTGEPVNSGHMIRSDLPRGWEEGFTEEGASYFIDHNQQTTAFRHPVTGQFSPENSEFILQEEPNPHMSKQDRNQRPSSMVSETSTAGTASTLEAKPGPKIIKSSSKVHSFGKRDQAIRRNPNVPVVVRGWLHKQDSSGMRLWKRRWFVLADYCLFYYKDSREEAVLGSIPLPSYVISPVAPEDRISRKYSFKAVHTGMRALIYNSSTAGSQAEQSGMRTYYFSADTQEDMNAWVRAMNQAAQVLSRSSLKRDMEKVERQAVPQANHTESCHECGRVGPGHTRDCPHRGHDDIVNFERQEQEGEQYRSQRDPLEGKRDRSKARSPYSPAEEDALFMDLPTGPRGQQAQPQRAEKNGMLPASYGPGEQNGTGGYQRAFPPRTNPEKHSQRKSNLAQVEHWARAQKGDSRSLPLDQTLPRQGPGQSLSFPENYQTLPKSTRHPSGGSSPPPRNLPSDYKYAQDRASHLKMSSEERRAHRDGTVWQLYEWQQRQQFRHGSPTAPICLGSPEFTDQGRSRSMLEVPRSISVPPSPSDIPPPGPPRVFPPRRPHTPAERVTVKPPDQRRSVDISLGDSPRRARGHAVKNSSHVDRRSMPSMGYMTHTVSAPSLHGKSADDTYLQLKKDLEYLDLKMTGRDLLKDRSLKPVKIAESDTDVKLSIFCEQDRVLQDLEDKIRALKENKDQLESVLEVLHRQMEQYRDQPQHLEKIAYQQKLLQEDLVHIRAELSRESTEMENAWNEYLKLENDVEQLKQTLQEQHRRAFFFQEKSQIQKDLWRIEDVTAGLSANKENFRILVESVKNPERKTVPLFPHPPVPSLSTSESKPPPQPSPPTSPVRTPLEVRLFPQLQTYVPYRPHPPQLRKVTSPLQSPTKAKPKVQEDEAPPRPPLPELYSPEDQPPAVPPLPREATIIRHTSVRGLKRQSDERKRDRELGQCVNGDSRVELRSYVSEPELATLSGDMAQPSLGLVGPESRYQTLPGRGLSGSTSRLQQSSTIAPYVTLRRGLNAESSKATFPRPKSALERLYSGDHQRGKMSAEEQLERMKRHQKALVRERKRTLGQGERTGLPSSRYLSRPLPGDLGSVC

SEQ ID NO: 58166 - protein, 753 aa, Homo sapiens
  VARIANT 1: note = MOD_RES - Any amino acid
XDALFMDLPTGPRGQQAQPQRAEKNGMLPASYGPGEQNGTGGYQRAFPPRTNPEKHSQRKSNLAQVEHWARAQKGDSRSLPLDQTLPRQGPGQSLSFPENYQTLPKSTRHPSGGSSPPPRNLPSDYKYAQDRASHLKMSSEERRAHRDGTVWQLYEWQQRQQFRHGSPTAPICLGSPEFTDQGRSRSMLEVPRSISVPPSPSDIPPPGPPRVFPPRRPHTPAERVTVKPPDQRRSVDISLGDSPRRARGHAVKNSSHVDRRSMPSMGYMTHTVSAPSLHGKSADDTYLQLKKDLEYLDLKMTGRDLLKDRSLKPVKIAESDTDVKLSIFCEQDRVLQDLEDKIRALKENKDQLESVLEVLHRQMEQYRDQPQHLEKIAYQQKLLQEDLVHIRAELSRESTEMENAWNEYLKLENDVEQLKQTLQEQHRRAFFFQEKSQIQKDLWRIEDVTAGLSANKENFRILVESVKNPERKTVPLFPHPPVPSLSTSESKPPPQPSPPTSPVRTPLEVRLFPQLQTYVPYRPHPPQLRKVTSPLQSPTKAKPKVQEDEAPPRPPLPELYSPEDQPPAVPPLPREATIIRHTSVRGLKRQSDERKRDRELGQCVNGDSRVELRSYVSEPELATLSGDMAQPSLGLVGPESRYQTLPGRGLSGSTSRLQQSSTIAPYVTLRRGLNAESSKATFPRPKSALERLYSGDHQRGKMSAEEQLERMKRHQKALVRERKRTLGQGERTGLPSSRYLSRPLPGDLGSVC

SEQ ID NO: 58167 - protein, 189 aa, Homo sapiens
MALVRGGWLWRQSSILRRWKRNWFALWLDGTLGYYHDETAQDEEDRVLIHFNVRDIKIGPECHDVQPPEGRSRDGLLTVNLREGGRLHLCAETKDDALAWKTALLEANSTPVRVYSPYQDYYEVVPPNAHEATYVRSYYGPPYAGPGVTHVIVREDPCYSAGAPLAMGMLAGAATGAALGSLMWSPCWF

SEQ ID NO: 58168 - protein, 243 aa, Homo sapiens
MSPAAPVPPDSALESPFEEMALVRGGWLWRQSSILRRWKRNWFALWLDGTLGYYHDETAQDEEDRVLIHFNVRDIKIGPECHDVQPPEGRSRDGLLTVNLREGGRLHLCAETKDDALAWKTALLEANSTPAPAGATVPPRSRRVCSKVRCVTRSWSPCKVERRIWVRVYSPYQDYYEVVPPNAHEATYVRSYYGPPYAGPGVTHVIVREDPCYSAGAPLAMGMLAGAATGAALGSLMWSPCWF

SEQ ID NO: 58169 - protein, 208 aa, Homo sapiens
MSPAAPVPPDSALESPFEEMALVRGGWLWRQSSILRRWKRNWFALWLDGTLGYYHDETAQDEEDRVLIHFNVRDIKIGPECHDVQPPEGRSRDGLLTVNLREGGRLHLCAETKDDALAWKTALLEANSTPVRVYSPYQDYYEVVPPNAHEATYVRSYYGPPYAGPGVTHVIVREDPCYSAGAPLAMGMLAGAATGAALGSLMWSPCWF

SEQ ID NO: 58170 - protein, 224 aa, Homo sapiens
MALVRGGWLWRQSSILRRWKRNWFALWLDGTLGYYHDETAQDEEDRVLIHFNVRDIKIGPECHDVQPPEGRSRDGLLTVNLREGGRLHLCAETKDDALAWKTALLEANSTPAPAGATVPPRSRRVCSKVRCVTRSWSPCKVERRIWVRVYSPYQDYYEVVPPNAHEATYVRSYYGPPYAGPGVTHVIVREDPCYSAGAPLAMGMLAGAATGAALGSLMWSPCWF

SEQ ID NO: 58171 - protein, 189 aa, Homo sapiens; identical to SEQ ID NO: 58167

SEQ ID NO: 58172 - protein, 117 aa, Homo sapiens
MALVRGGWLWRQSSILRRWKRNWFALWLDGTLGYYHDETAQDEEDRVLIHFNVRDIKIGPECHDVQPPEGRSRDGLLTVNLREGGRLHLCAETKDDALAWKTALLEANSTPVRVYSP

SEQ ID NO: 58173 - protein, 163 aa, Homo sapiens
MALVRGGWLWRQSSILRRWKRNWFALWLDGTLGYYHDETAQDEEDRVLIHFNVRDIKIGPECHDVQPPEGRSRDGLLTVNLREGGRLHLCAETKDDALAWKTALLEANSTPVRVYSPYQDYYEVVPPNAHEATYVRSYYGPPYAGPGVTHVIVREDPCYSAGA

SEQ ID NO: 58174 - protein, 159 aa, Homo sapiens
MALVRGGWLWRQSSILRRWKRNWFALWLDGTLGYYHDETAQDEEDRVLIHFNVRDIKIGPECHDVQPPEGRSRDGLLTVNLREGGRLHLCAETKDDALAWKTALLEANSTPMIRLKLIHPHNKYLLSCYSAGAPLAMGMLAGAATGAALGSLMWSPCWF

SEQ ID NO: 58175 - protein, 160 aa, Homo sapiens
MALVRGGWLWRQSSILRRWKRNWFALWLDGTLGYYHDETAQDEEDRVLIHFNVRDIKIGPECHDVQPPEGRSRDGLLTVNLREGGRLHLCAETKDDALAWKTALLEANSTPAPAGATVPPRSRRVCSKVRCVTRSWSPCKVERRIWVRVYSPYQDYYEVV

SEQ ID NO: 58176 - protein, 154 aa, Homo sapiens
MALVRGGWLWRQSSILRRWKRNWFALWLDGTLGYYHDETAQDEEDRVLIHFNVRDIKIGPECHDVQPPEGRSRDGLLTVNLREGGRLHLCAETKDDALAWKTALLEANSTPVRVYSPYQDYYEVVPPNAHEATYVRSYYGPPYAGPGVTHVIVR

SEQ ID NO: 58177 - protein, 85 aa, Homo sapiens
MALVRGGWLWRQSSILRRWKRNWFALWLDGTLGYYHDETAQDEEDRVLIHFNVRDIKIGPECHDVQPPEGRSRDGLLTVNLREGG

SEQ ID NO: 58178 - protein, 1191 aa, Homo sapiens
MERPLENGDESPDSQGHATDWRFAVCSFRDAWEEEEPASQMHVKDPGPPRPPAGATQDEELQGSPLSRKFQLPPAADESGDAQRGTVESSSVLSEGPGPSGVESLLCPMSSHLSLAQGESDTPGVGLVGDPGPSRAMPSGLSPGALDSDPVGLGDPLSEISKLLEAAPSGSGLPKPADCLLAQDLCWELLASGMATLPGTRDVQGRAVLLLCAHSPAWLQSECSSQELIRLLLYLRSIPRPEVQALGLTVLVDARICAPSSSLFSGLSQLQEAAPGAVYQVLLVGSTLLKEVPSGLQLEQLPSQSLLTHIPTAGLPTSLGGGLPYCHQAWLDFRRRLEALLQNCQAACALLQGAIESVKAVPQPMEPGEVGQLLQQTEVLMQQVLDSPWLAWLQCQGGRELTWLKQEVPEVTLSPDYRTAMDKADELYDRVDGLLHQLTLQSNQRIQALELVQTLEARESGLHQIEVWLQQVGWPALEEAGEPSLDMLLQAQGSFQELYQVAQEQVRQGEKFLQPLTGWEAAELDPPGARFLALRAQLTEFSRALAQRCQRLADAERLFQLFREALTWAEEGQRVLAELEQERPGVVLQQLQLHWTRHPDLPPAHFRKMWALATGLGSEAIRQECRWAWARCQDTWLALDQKLEASLKLPPVGSTASLCVSQVPAAPAHPPLRKAYSFDRNLGQSLSEPACHCHHAATIAACRRPEAGGGALPQASPTVPPPGSSDPRSLNRLQLVLAEMVATEREYVRALEYTMENYFPELDRPDVPQGLRGQRAHLFGNLEKLRDFHCHFFLRELEACTRHPPRVAYAFLRHRVQFGMYALYSKNKPRSDALMSSYGHTFFKDKQQALGDHLDLASYLLKPIQRMGKYALLLQELARACGGPTQELSALREAQSLVHFQLRHGNDLLAMDAIQGCDVNLKEQGQLVRQDEFVVRTGRHKSVRRIFLFEELLLFSKPRHGPTGVDTFAYKRSFKMADLGLTECCGNSNLRFEIWFRRRKARDTFVLQASSLAIKQAWTADISHLLWRQAVHNKEVRMAEMVSMGVGNKAFRDIAPSEEAINDRTVNYVLKCREVRSRASIAVAPFDHDSLYLGASNSLPGDPASCSVLGSLNLHLYRDPALLGLRCPLYPSFPEEAALEAEAELGGQPSLTAEDSEISSQCPSASGSSGSDSSCVSGQALGRGLEDLPCV

SEQ ID NO: 58179 - protein, 1191 aa, Homo sapiens; identical to SEQ ID NO: 58178

SEQ ID NO: 58180 - protein, 193 aa, Homo sapiens
MERPLENGDESPDSQGHATDWRFAVCSFRDAWEEEEPASQMHVKDPGPPRPPAGATQDEELQGSPLSRKFQLPPAADESGDAQRGTVESSSVLSEGPGPSGVESLLCPMSSHLSLAQGESDTPGVGLVGDPGPSRAMPSGLSPGALDSDPVGLGDPLSEISKLLEAGKEGWAREVWEGNGDAWRDECQDFGGL

SEQ ID NO: 58181 - protein, 1191 aa, Homo sapiens; identical to SEQ ID NO: 58178

SEQ ID NO: 58182 - protein, 1110 aa, Homo sapiens
MERPLENGDESPDSQGHATDWRFAVCSFRDAWEEEEPASQMHVKDPGPPRPPAGATQDEELQGSPLSRKFQLPPAADESGDAQRGTVESSSVLSEGPGPSGVESLLCPMSSHLSLAQGTRDVQGRAVLLLCAHSPAWLQSECSSQELIRLLLYLRSIPRPEVQALGLTVLVDARICAPSSSLFSGLSQLQEAAPGAVYQVLLVGSTLLKEVPSGLQLEQLPSQSLLTHIPTAGLPTSLGGGLPYCHQAWLDFRRRLEALLQNCQAACALLQGAIESVKAVPQPMEPGEVGQLLQQTEVLMQQVLDSPWLAWLQCQGGRELTWLKQEVPEVTLSPDYRTAMDKADELYDRVDGLLHQLTLQSNQRIQALELVQTLEARESGLHQIEVWLQQVGWPALEEAGEPSLDMLLQAQGSFQELYQVAQEQVRQGEKFLQPLTGWEAAELDPPGARFLALRAQLTEFSRALAQRCQRLADAERLFQLFREALTWAEEGQRVLAELEQERPGVVLQQLQLHWTRHPDLPPAHFRKMWALATGLGSEAIRQECRWAWARCQDTWLALDQKLEASLKLPPVGSTASLCVSQVPAAPAHPPLRKAYSFDRNLGQSLSEPACHCHHAATIAACRRPEAGGGALPQASPTVPPPGSSDPRSLNRLQLVLAEMVATEREYVRALEYTMENYFPELDRPDVPQGLRGQRAHLFGNLEKLRDFHCHFFLRELEACTRHPPRVAYAFLRHRVQFGMYALYSKNKPRSDALMSSYGHTFFKDKQQALGDHLDLASYLLKPIQRMGKYALLLQELARACGGPTQELSALREAQSLVHFQLRHGNDLLAMDAIQGCDVNLKEQGQLVRQDEFVVRTGRHKSVRRIFLFEELLLFSKPRHGPTGVDTFAYKRSFKMADLGLTECCGNSNLRFEIWFRRRKARDTFVLQASSLAIKQAWTADISHLLWRQAVHNKEVRMAEMVSMGVGNKAFRDIAPSEEAINDRTVNYVLKCREVRSRASIAVAPFDHDSLYLGASNSLPGDPASCSVLGSLNLHLYRDPALLGLRCPLYPSFPEEAALEAEAELGGQPSLTAEDSEISSQCPSASGSSGSDSSCVSGQALGRGLEDLPCV

SEQ ID NO: 58183 - protein, 1006 aa, Homo sapiens
MHYDGHVRFDLPPQGSVLARNVSTRSCPPRTSPAVDLEEEEEESSVDGKGDRKSTGLKLSKKKARRRHTDDPSKECFTLKFDLNVDIETEIVPAMKKKSLGEVLLPVFERKGIALGKVDIYLDQSNTPLSLTFEAYRFGGHYLRVKAPAKPGDEGKVEQGMKDSKSLSLPILRPAGTGPPALERVDAQSRRESLDILAPGRRRKNMSEFLGEASIPGQEPPTPSSCSLPSGSSGSTNTGDSWKNRAASRFSGFFSSGPSTSAFGREVDKMEQLEGKLHTYSLFGLPRLPRGLRFDHDSWEEEYDEDEDEDNACLRLEDSWRELIDGHEKLTRRQCHQQEAVWELLHTEASYIRKLRVIINLFLCCLLNLQESGLLCEVEAERLFSNIPEIAQLHRRLWASVMAPVLEKARRTRALLQPGDFLKGFKMFGSLFKPYIRYCMEEEGCMEYMRGLLRDNDLFRAYITWAEKHPQCQRLKLSDMLAKPHQRLTKYPLLLKSVLRKTEEPRAKEAVVAMIGSVERFIHHVNACMRQRQERQRLAAVVSRIDAYEVVESSSDEVDKLLKEFLHLDLTAPIPGASPEETRQLLLEGSLRMKEGKDSKMDVYCFLFTDLLLVTKAVKKAERTRVIRPPLLVDKIVCRELRDPGSFLLIYLNEFHSAVGAYTFQASGQALCRGWVDTIYNAQNQLQQLRAQEPPGSQQPLQSLEEEEDEQEEEEEEEEEEEEGEDSGTSAASSPTIMRKSSGSPDSQHCASDGSTETLAMVVVEPGDTLSSPEFDSGPFSSQSDETSLSTTASSATPTSELLPLGPVDGRSCSMDSAYGTLSPTSLQDFVAPGPMAELVPRAPESPRVPSPPPSPRLRRRTPVQLLSCPPHLLKSKSEASLLQLLAGAGTHGTPSAPSRSLSELCLAVPAPGIRTQGSPQEAGPSWDCRGAPSPGSGPGLVGCLAGEPAGSHRKRCGDLPSGASPRVQPEPPPGVSAQHRKLTLAQLYRIRTTLLLNSTLTASEV

SEQ ID NO: 58184 - protein, 930 aa, Homo sapiens
MHYDGHVRFDLPPQGSVLARNVSTRSCPPRTSPAVDLEEEEEESSVDGKGDRKSTGLKLSKKKARRRHTDDPSKECFTLKFDLNVDIETEIVPAMKKKSLGEVLLPVFERKGIALGKVDIYLDQSNTPLSLTFEAYRFGGHYLRVKAPAKPGDEGKVEQGMKDSKSLSLPILRPAGTGPPALERVDAQSRRESLDILAPGRRRKNMSEFLGEASIPGQEPPTPSSCSLPSGSSGSTNTGDSWKNRAASRFSGFFSSGPSTSAFGREVDKMEQLEGKLHTYSLFGLPRLPRGLRFDHDSWEEEYDEDEDEDNACLRLEDSWRELIDGHEKLTRRQCHQQEAVWELLHTEASYIRKLRVIINLFLCCLLNLQESGLLCEVEAERLFSNIPEIAQLHRRLWASVMAPVLEKARRTRALLQPGDFLKGFKMFGSLFKPYIRYCMEEEGCMEYMRGLLRDNDLFRAYITWAEKHPQCQRLKLSDMLAKPHQRLTKYPLLLKSVLRKTEEPRAKEAVVAMIGSVERFIHHVNACMRQRQERQRLAAVVSRIDAYEVVESSSDEVDKLLKEFLHLDLTAPIPGASPEETRQLLLEGSLRMKEGKDSKMDVYCFLFTDLLLVTKAVKKAERTRVIRPPLLVDKIVCRELRDPGSFLLIYLNEFHSAVGAYTFQASGQALCRGWVDTIYNAQNQLQQLRAQEPPGSQQPLQSLEEEEDEQEEEEEEEEEEEEGEDSGTSAASSPTIMRKSSGSPDSQHCASDGSTETLAMVVVEPGDTLSSPEFDSGPFSSQSDETSLSTTASSATPTSELLPLGPVDGRSCSMDSAYGTLSPTSLQDFVAPGPMAELVPRAPESPRVPSPPPSPRLRRRTPVQLLSCPPHLLKSKSEASLLQLLAGAGTHGTPSAPSRSLSELCLAVPAPAQEADPGPALPNQDHPAA

SEQ ID NO: 58185 - protein, 1006 aa, Homo sapiens; identical to SEQ ID NO: 58183

SEQ ID NO: 58186 - protein, 1043 aa, Homo sapiens
MDKGRAAKVCHHADCQQLHRRGPLNLCEACDSKFHSTMHYDGHVRFDLPPQGSVLARNVSTRSCPPRTSPAVDLEEEEEESSVDGKGDRKSTGLKLSKKKARRRHTDDPSKECFTLKFDLNVDIETEIVPAMKKKSLGEVLLPVFERKGIALGKVDIYLDQSNTPLSLTFEAYRFGGHYLRVKAPAKPGDEGKVEQGMKDSKSLSLPILRPAGTGPPALERVDAQSRRESLDILAPGRRRKNMSEFLGEASIPGQEPPTPSSCSLPSGSSGSTNTGDSWKNRAASRFSGFFSSGPSTSAFGREVDKMEQLEGKLHTYSLFGLPRLPRGLRFDHDSWEEEYDEDEDEDNACLRLEDSWRELIDGHEKLTRRQCHQQEAVWELLHTEASYIRKLRVIINLFLCCLLNLQESGLLCEVEAERLFSNIPEIAQLHRRLWASVMAPVLEKARRTRALLQPGDFLKGFKMFGSLFKPYIRYCMEEEGCMEYMRGLLRDNDLFRAYITWAEKHPQCQRLKLSDMLAKPHQRLTKYPLLLKSVLRKTEEPRAKEAVVAMIGSVERFIHHVNACMRQRQERQRLAAVVSRIDAYEVVESSSDEVDKLLKEFLHLDLTAPIPGASPEETRQLLLEGSLRMKEGKDSKMDVYCFLFTDLLLVTKAVKKAERTRVIRPPLLVDKIVCRELRDPGSFLLIYLNEFHSAVGAYTFQASGQALCRGWVDTIYNAQNQLQQLRAQEPPGSQQPLQSLEEEEDEQEEEEEEEEEEEEGEDSGTSAASSPTIMRKSSGSPDSQHCASDGSTETLAMVVVEPGDTLSSPEFDSGPFSSQSDETSLSTTASSATPTSELLPLGPVDGRSCSMDSAYGTLSPTSLQDFVAPGPMAELVPRAPESPRVPSPPPSPRLRRRTPVQLLSCPPHLLKSKSEASLLQLLAGAGTHGTPSAPSRSLSELCLAVPAPGIRTQGSPQEAGPSWDCRGAPSPGSGPGLVGCLAGEPAGSHRKRCGDLPSGASPRVQPEPPPGVSAQHRKLTLAQLYRIRTTLLLNSTLTASEV

SEQ ID NO: 58187 - protein, 1006 aa, Homo sapiens; identical to SEQ ID NO: 58183

SEQ ID NO: 58188 - protein, 852 aa, Homo sapiens
MNSVLTKHGSPPRSWLSLCSGTDDQSPAEKKGLRCQNPACMDKGRAAKVCHHADCQQLHRRGPLNLCEACDSKFHSTMHYDGHVRFDLPPQGSVLARNVSTRSCPPRTSPAVDLEEEEEESSVDGKGDRKSTGLKLSKKKARRRHTDDPSKECFTLKFDLNVDIETEIVPAMKKKSLGEVLLPVFERKGIALGKVDIYLDQSNTPLSLTFEAYRFGGHYLRVKAPAKPGDEGKVEQGMKDSKSLSLPILRPAGTGPPALERVDAQSRRESLDILAPGRRRKNMSEFLGEASIPGQEPPTPSSCSLPSGSSGSTNTGDSWKNRAASRFSGFFSSGPSTSAFGREVDKMEQLEGKLHTYSLFGLPRLPRGLRFDHDSWEEEYDEDEDEDNACLRLEDSWRELIDGHEKLTRRQCHQQEAVWELLHTEASYIRKLRVIINLFLCCLLNLQESGLLCEVEAERLFSNIPEIAQLHRRLWASVMAPVLEKARRTRALLQPGDFLKGFKMFGSLFKPYIRYCMEEEGCMEYMRGLLRDNDLFRAYITWAEKHPQCQRLKLSDMLAKPHQRLTKYPLLLKSVLRKTEEPRAKEAVVAMIGSVERFIHHVNACMRQRQERQRLAAVVSRIDAYEVVESSSDEVDKLLKEFLHLDLTAPIPGASPEETRQLLLEGSLRMKEGKDSKMDVYCFLFTDLLLVTKAVKKAERTRVIRPPLLVDKIVCRELRDPGSFLLIYLNEFHSAVGAYTFQASGQALCRGWVDTIYNAQNQLQQLRAQEPPGSQQPLQSLEEEEDEQEEEEEEEEEEEEGEDSGTSAASSPTIMRKSSGSPDSQHWKLTLAQLYRIRTTLLLNSTLTASEV

SEQ ID NO: 58189 - protein, 1083 aa, Homo sapiens
MNSVLTKHGSPPRSWLSLCSGTDDQSPAEKKGLRCQNPACMDKGRAAKVCHHADCQQLHRRGPLNLCEACDSKFHSTMHYDGHVRFDLPPQGSVLARNVSTRSCPPRTSPAVDLEEEEEESSVDGKGDRKSTGLKLSKKKARRRHTDDPSKECFTLKFDLNVDIETEIVPAMKKKSLGEVLLPVFERKGIALGKVDIYLDQSNTPLSLTFEAYRFGGHYLRVKAPAKPGDEGKVEQGMKDSKSLSLPILRPAGTGPPALERVDAQSRRESLDILAPGRRRKNMSEFLGEASIPGQEPPTPSSCSLPSGSSGSTNTGDSWKNRAASRFSGFFSSGPSTSAFGREVDKMEQLEGKLHTYSLFGLPRLPRGLRFDHDSWEEEYDEDEDEDNACLRLEDSWRELIDGHEKLTRRQCHQQEAVWELLHTEASYIRKLRVIINLFLCCLLNLQESGLLCEVEAERLFSNIPEIAQLHRRLWASVMAPVLEKARRTRALLQPGDFLKGFKMFGSLFKPYIRYCMEEEGCMEYMRGLLRDNDLFRAYITWAEKHPQCQRLKLSDMLAKPHQRLTKYPLLLKSVLRKTEEPRAKEAVVAMIGSVERFIHHVNACMRQRQERQRLAAVVSRIDAYEVVESSSDEVDKLLKEFLHLDLTAPIPGASPEETRQLLLEGSLRMKEGKDSKMDVYCFLFTDLLLVTKAVKKAERTRVIRPPLLVDKIVCRELRDPGSFLLIYLNEFHSAVGAYTFQASGQALCRGWVDTIYNAQNQLQQLRAQEPPGSQQPLQSLEEEEDEQEEEEEEEEEEEEGEDSGTSAASSPTIMRKSSGSPDSQHCASDGSTETLAMVVVEPGDTLSSPEFDSGPFSSQSDETSLSTTASSATPTSELLPLGPVDGRSCSMDSAYGTLSPTSLQDFVAPGPMAELVPRAPESPRVPSPPPSPRLRRRTPVQLLSCPPHLLKSKSEASLLQLLAGAGTHGTPSAPSRSLSELCLAVPAPGIRTQGSPQEAGPSWDCRGAPSPGSGPGLVGCLAGEPAGSHRKRCGDLPSGASPRVQPEPPPGVSAQHRKLTLAQLYRIRTTLLLNSTLTASEV

SEQ ID NO: 58190 - protein, 1006 aa, Homo sapiens; identical to SEQ ID NO: 58183

SEQ ID NO: 58191 - protein, 1062 aa, Homo sapiens
MDDQSPAEKKGLRCQNPACMDKGRAAKVCHHADCQQLHRRGPLNLCEACDSKFHSTMHYDGHVRFDLPPQGSVLARNVSTRSCPPRTSPAVDLEEEEEESSVDGKGDRKSTGLKLSKKKARRRHTDDPSKECFTLKFDLNVDIETEIVPAMKKKSLGEVLLPVFERKGIALGKVDIYLDQSNTPLSLTFEAYRFGGHYLRVKAPAKPGDEGKVEQGMKDSKSLSLPILRPAGTGPPALERVDAQSRRESLDILAPGRRRKNMSEFLGEASIPGQEPPTPSSCSLPSGSSGSTNTGDSWKNRAASRFSGFFSSGPSTSAFGREVDKMEQLEGKLHTYSLFGLPRLPRGLRFDHDSWEEEYDEDEDEDNACLRLEDSWRELIDGHEKLTRRQCHQQEAVWELLHTEASYIRKLRVIINLFLCCLLNLQESGLLCEVEAERLFSNIPEIAQLHRRLWASVMAPVLEKARRTRALLQPGDFLKGFKMFGSLFKPYIRYCMEEEGCMEYMRGLLRDNDLFRAYITWAEKHPQCQRLKLSDMLAKPHQRLTKYPLLLKSVLRKTEEPRAKEAVVAMIGSVERFIHHVNACMRQRQERQRLAAVVSRIDAYEVVESSSDEVDKLLKEFLHLDLTAPIPGASPEETRQLLLEGSLRMKEGKDSKMDVYCFLFTDLLLVTKAVKKAERTRVIRPPLLVDKIVCRELRDPGSFLLIYLNEFHSAVGAYTFQASGQALCRGWVDTIYNAQNQLQQLRAQEPPGSQQPLQSLEEEEDEQEEEEEEEEEEEEGEDSGTSAASSPTIMRKSSGSPDSQHCASDGSTETLAMVVVEPGDTLSSPEFDSGPFSSQSDETSLSTTASSATPTSELLPLGPVDGRSCSMDSAYGTLSPTSLQDFVAPGPMAELVPRAPESPRVPSPPPSPRLRRRTPVQLLSCPPHLLKSKSEASLLQLLAGAGTHGTPSAPSRSLSELCLAVPAPGIRTQGSPQEAGPSWDCRGAPSPGSGPGLVGCLAGEPAGSHRKRCGDLPSGASPRVQPEPPPGVSAQHRKLTLAQLYRIRTTLLLNSTLTASEV

SEQ ID NO: 58192 - protein, 1075 aa, Homo sapiens
MGTGPGVSGRLAASRPGPGLPLRDSEPSWAGGRARDGDSQVCHHADCQQLHRRGPLNLCEACDSKFHSTMHYDGHVRFDLPPQGSVLARNVSTRSCPPRTSPAVDLEEEEEESSVDGKGDRKSTGLKLSKKKARRRHTDDPSKECFTLKFDLNVDIETEIVPAMKKKSLGEVLLPVFERKGIALGKVDIYLDQSNTPLSLTFEAYRFGGHYLRVKAPAKPGDEGKVEQGMKDSKSLSLPILRPAGTGPPALERVDAQSRRESLDILAPGRRRKNMSEFLGEASIPGQEPPTPSSCSLPSGSSGSTNTGDSWKNRAASRFSGFFSSGPSTSAFGREVDKMEQLEGKLHTYSLFGLPRLPRGLRFDHDSWEEEYDEDEDEDNACLRLEDSWRELIDGHEKLTRRQCHQQEAVWELLHTEASYIRKLRVIINLFLCCLLNLQESGLLCEVEAERLFSNIPEIAQLHRRLWASVMAPVLEKARRTRALLQPGDFLKGFKMFGSLFKPYIRYCMEEEGCMEYMRGLLRDNDLFRAYITWAEKHPQCQRLKLSDMLAKPHQRLTKYPLLLKSVLRKTEEPRAKEAVVAMIGSVERFIHHVNACMRQRQERQRLAAVVSRIDAYEVVESSSDEVDKLLKEFLHLDLTAPIPGASPEETRQLLLEGSLRMKEGKDSKMDVYCFLFTDLLLVTKAVKKAERTRVIRPPLLVDKIVCRELRDPGSFLLIYLNEFHSAVGAYTFQASGQALCRGWVDTIYNAQNQLQQLRAQEPPGSQQPLQSLEEEEDEQEEEEEEEEEEEEGEDSGTSAASSPTIMRKSSGSPDSQHCASDGSTETLAMVVVEPGDTLSSPEFDSGPFSSQSDETSLSTTASSATPTSELLPLGPVDGRSCSMDSAYGTLSPTSLQDFVAPGPMAELVPRAPESPRVPSPPPSPRLRRRTPVQLLSCPPHLLKSKSEASLLQLLAGAGTHGTPSAPSRSLSELCLAVPAPGIRTQGSPQEAGPSWDCRGAPSPGSGPGLVGCLAGEPAGSHRKRCGDLPSGASPRVQPEPPPGVSAQHRKLTLAQLYRIRTTLLLNSTLTASEV

SEQ ID NO: 58193 - protein, 912 aa, Homo sapiens
MKKKSLGEVLLPVFERKGIALGKVDIYLDQSNTPLSLTFEAYRFGGHYLRVKAPAKPGDEGKVEQGMKDSKSLSLPILRPAGTGPPALERVDAQSRRESLDILAPGRRRKNMSEFLGEASIPGQEPPTPSSCSLPSGSSGSTNTGDSWKNRAASRFSGFFSSGPSTSAFGREVDKMEQLEGKLHTYSLFGLPRLPRGLRFDHDSWEEEYDEDEDEDNACLRLEDSWRELIDGHEKLTRRQCHQQEAVWELLHTEASYIRKLRVIINLFLCCLLNLQESGLLCEVEAERLFSNIPEIAQLHRRLWASVMAPVLEKARRTRALLQPGDFLKGFKMFGSLFKPYIRYCMEEEGCMEYMRGLLRDNDLFRAYITWAEKHPQCQRLKLSDMLAKPHQRLTKYPLLLKSVLRKTEEPRAKEAVVAMIGSVERFIHHVNACMRQRQERQRLAAVVSRIDAYEVVESSSDEVDKLLKEFLHLDLTAPIPGASPEETRQLLLEGSLRMKEGKDSKMDVYCFLFTDLLLVTKAVKKAERTRVIRPPLLVDKIVCRELRDPGSFLLIYLNEFHSAVGAYTFQASGQALCRGWVDTIYNAQNQLQQLRAQEPPGSQQPLQSLEEEEDEQEEEEEEEEEEEEGEDSGTSAASSPTIMRKSSGSPDSQHCASDGSTETLAMVVVEPGDTLSSPEFDSGPFSSQSDETSLSTTASSATPTSELLPLGPVDGRSCSMDSAYGTLSPTSLQDFVAPGPMAELVPRAPESPRVPSPPPSPRLRRRTPVQLLSCPPHLLKSKSEASLLQLLAGAGTHGTPSAPSRSLSELCLAVPAPGIRTQGSPQEAGPSWDCRGAPSPGSGPGLVGCLAGEPAGSHRKRCGDLPSGASPRVQPEPPPGVSAQHRKLTLAQLYRIRTTLLLNSTLTASEV

SEQ ID NO: 58194 - protein, 1085 aa, Homo sapiens
MSLGERGSPQTFGGSSVSKGSDAGHDQSPAEKKGLRCQNPACMDKGRAAKVCHHADCQQLHRRGPLNLCEACDSKFHSTMHYDGHVRFDLPPQGSVLARNVSTRSCPPRTSPAVDLEEEEEESSVDGKGDRKSTGLKLSKKKARRRHTDDPSKECFTLKFDLNVDIETEIVPAMKKKSLGEVLLPVFERKGIALGKVDIYLDQSNTPLSLTFEAYRFGGHYLRVKAPAKPGDEGKVEQGMKDSKSLSLPILRPAGTGPPALERVDAQSRRESLDILAPGRRRKNMSEFLGEASIPGQEPPTPSSCSLPSGSSGSTNTGDSWKNRAASRFSGFFSSGPSTSAFGREVDKMEQLEGKLHTYSLFGLPRLPRGLRFDHDSWEEEYDEDEDEDNACLRLEDSWRELIDGHEKLTRRQCHQQEAVWELLHTEASYIRKLRVIINLFLCCLLNLQESGLLCEVEAERLFSNIPEIAQLHRRLWASVMAPVLEKARRTRALLQPGDFLKGFKMFGSLFKPYIRYCMEEEGCMEYMRGLLRDNDLFRAYITWAEKHPQCQRLKLSDMLAKPHQRLTKYPLLLKSVLRKTEEPRAKEAVVAMIGSVERFIHHVNACMRQRQERQRLAAVVSRIDAYEVVESSSDEVDKLLKEFLHLDLTAPIPGASPEETRQLLLEGSLRMKEGKDSKMDVYCFLFTDLLLVTKAVKKAERTRVIRPPLLVDKIVCRELRDPGSFLLIYLNEFHSAVGAYTFQASGQALCRGWVDTIYNAQNQLQQLRAQEPPGSQQPLQSLEEEEDEQEEEEEEEEEEEEGEDSGTSAASSPTIMRKSSGSPDSQHCASDGSTETLAMVVVEPGDTLSSPEFDSGPFSSQSDETSLSTTASSATPTSELLPLGPVDGRSCSMDSAYGTLSPTSLQDFVAPGPMAELVPRAPESPRVPSPPPSPRLRRRTPVQLLSCPPHLLKSKSEASLLQLLAGAGTHGTPSAPSRSLSELCLAVPAPGIRTQGSPQEAGPSWDCRGAPSPGSGPGLVGCLAGEPAGSHRKRCGDLPSGASPRVQPEPPPGVSAQHRKLTLAQLYRIRTTLLLNSTLTASEV

SEQ ID NO: 58195 - protein, 930 aa, Homo sapiens; identical to SEQ ID NO: 58184

SEQ ID NO: 58196 - protein, 790 aa, Homo sapiens
MKAFGPPHEGPLQGLVASRIETYGGRHRASAQSTAGRLYPRGYPVLDPSRRRLQQYVPFARGSGQARGLSPMRLRDPEPEKRHGGHVGAGLLHSPKLKELTKAHELEVRLHTFSMFGMPRLPPEDRRHWEIGEGGDSGLTIEKSWRELVPGHKEMSQELCHQQEALWELLTTELIYVRKLKIMTDLLAAGLLNLQRVGLLMEVSAETLFGNVPSLIRTHRSFWDEVLGPTLEETRASGQPLDPIGLQSGFLTFGQRFHPYVQYCLRVKQTMAYAREQQETNPLFHAFVQWCEKHKRSGRQMLCDLLIKPHQRITKYPLLLHAVLKRSPEARAQEALNAMIEAVESFLRHINGQVRQGEEQESLAAAAQRIGPYEVLEPPSDEVEKNLRPFSTLDLTSPMLGVASEHTRQLLLEGPVRVKEGREGKLDVYLFLFSDVLLVTKPQRKADKAKVIRPPLMLEKLVCQPLRDPNSFLLIHLTEFQCVSSALLVHCPSPTDRAQWLEKTQQAQAALQKLKAEEYVQQKRELLTLYRDQDRESPSTRPSTPSLEGSQSSAEGRTPEFSTIIPHLVVTEDTDEDAPLVPDDTSDSGYGTLIPGTPTGSRSPLSRLRQRALRRDPRLTFSTLELRDIPLRPHPPDPQAPQRRSAPELPEGILKGGSLPQEDPPTWSEEEDGASERGNVVVETLHRARLRGQLPSSPTHADSAGESPWESSGEEEEEGPLFLKAGHTSLRPMRAEDMLREIREELASQRIEGAEEPRDSRPRKLTRAQLQRMRGPHIIQLDTPLSASEV

SEQ ID NO: 58197 - protein, 320 aa, Homo sapiens
MCPREGGRASTIHQKTEKAFGQLLCQPLGEPKIQHPLKAALQKLKAEEYVQQKRELLTLYRDQDRESPSTRPSTPSLEGSQSSAEGRTPEFSTIIPHLVVTEDTDEDAPLVPDDTSDSGYGTLIPGTPTGSRSPLSRLRQRALRRDPRLTFSTLELRDIPLRPHPPDPQAPQRRSAPELPEGILKGGSLPQEDPPTWSEEEDGASERGNVVVETLHRARLRGQLPSSPTHADSAGESPWESSGEEEEEGPLFLKAGHTSLRPMRAEDMLREIREELASQRIEGAEEPRDSRPRKLTRAQLQRMRGPHIIQLDTPLSASEV

SEQ ID NO: 58198 - protein, 790 aa, Homo sapiens; identical to SEQ ID NO: 58196

SEQ ID NO: 58199 - protein, 758 aa, Homo sapiens
MGCRLHAPGEKAAHDPSRRRLQQYVPFARGSGQARGLSPMRLRDPEPEKRHGGHVGAGLLHSPKLKELTKAHELEVRLHTFSMFGMPRLPPEDRRHWEIGEGGDSGLTIEKSWRELVPGHKEMSQELCHQQEALWELLTTELIYVRKLKIMTDLLAAGLLNLQRVGLLMEVSAETLFGNVPSLIRTHRSFWDEVLGPTLEETRASGQPLDPIGLQSGFLTFGQRFHPYVQYCLRVKQTMAYAREQQETNPLFHAFVQWCEKHKRSGRQMLCDLLIKPHQRITKYPLLLHAVLKRSPEARAQEALNAMIEAVESFLRHINGQVRQGEEQESLAAAAQRIGPYEVLEPPSDEVEKNLRPFSTLDLTSPMLGVASEHTRQLLLEGPVRVKEGREGKLDVYLFLFSDVLLVTKPQRKADKAKVIRPPLMLEKLVCQPLRDPNSFLLIHLTEFQCVSSALLVHCPSPTDRAQWLEKTQQAQAALQKLKAEEYVQQKRELLTLYRDQDRESPSTRPSTPSLEGSQSSAEGRTPEFSTIIPHLVVTEDTDEDAPLVPDDTSDSGYGTLIPGTPTGSRSPLSRLRQRALRRDPRLTFSTLELRDIPLRPHPPDPQAPQRRSAPELPEGILKGGSLPQEDPPTWSEEEDGASERGNVVVETLHRARLRGQLPSSPTHADSAGESPWESSGEEEEEGPLFLKAGHTSLRPMRAEDMLREIREELASQRIEGAEEPRDSRPRKLTRAQLQRMRGPHIIQLDTPLSASEV

SEQ ID NO: 58200 - protein, 1493 aa, Homo sapiens
MAELSEPEGPVDWKERCVALESQLMKFRVQASKIRELLAEKMQQLERQVIDAERQAEKAFQQVQVMEDKLKAANIQTSESETRLYNKCQDLESLIQEKDDVIQNLELQLEEQKQIRIQEAKIIEEKAAKIKEWVTVKLNELELENQNLRLINQNQTEEIRTMQSKLQEVQGKKSSTVSTLKLSEGQRLSSLTFGCFLSRARSPPQVVKSEEMSKISSKEPEFTEGKDMEEMEIPEKSVDNQVLENNRGQRTLHQTPCGSEQNRKTRTSFATDGGISQNSGAPVSDWSSDEEDGSKGRSKSRCTSTLSSHTSEEGVQCSRMGSEMYLTASDDSSSIFEEETFGIKRPEHKKLYSWQQEAQWKALNSPLGKGNSELSKKEQDSSSDELNKKFQSQRLDYSSSSSEANTPSPILTPALMPKHPNSLSGKGTQLVPSSHLPPPKLRIPNVFSISVALAKRHLSQPQLSSDRMFGTNRNAISMIRPLRPQETDLDLVDGDSTEVLENMDTSCDDGLFSYDSLDSPNSDDQEHCDSAKKVAYSKPPTPPLHRFPSWESRIYAVAKSGIRMSEAFNMESVNKNSAATLSYTTSGLYTSLIYKNMTTPVYTTLKGKATQISSSPFLDDSSGSEEEDSSRSSSRTSESDSRSRSGPGSPRAMKRGVSLSSVASESDYAIPPDAYSTDTEYSQPEQKLPKTCSSSSDNGKNEPLEKSGYLLKMSGKVKSWKRRWFVLKGGELLYYKSPSDVIRKPQGHIELSASCSILRGDNKQTVQLTTEKHTYYLTADSPNILEEWIKVLQNVLRVQAANPLSLQPEGKPTMKGLLTKVKHGYSKRVWCTLIGKTLYYFRSQEDKFPLGQIKLWEAKVEEVDRSCDSDEDYEASGRSLLSTHYTIVIHPKDQGPTYLLIGSKHEKDTWLYHLTVAAGSNNVNVGSEFEQLVCKLLNIDGEPSSQIWRHPTLCHSKEGIISPLTTLPSEALQTEAIKLFKTCQLFINAAVDSPAIDYHISLAQSALQICLTHPELQNEICCQLIKQTRRRQPQNQPGPLQGWQLLALCVGLFLPHHPFLWLLRLHLKRNADSRTEFGKYAIYCQRCVERTQQNGDREARPSRMEILSTLLRNPYHHSLPFSIPVHFMNGIYQVVGFDASTTVEEFLNTLNQDTGMRKPAQSGFALFTDDPSGRDLEHCLQGNIKICDIISKWEQASKEQQPGKCEGTRTVRLTYKNRLYFSVQARGETDREKLLLMYQTNDQIINGLFPLNKDLALEMAALLSQVEIGDFERPFSTPAGHVTNQCKVNQTLKQVIEKFYPKRYRDGCSEEQLRQLCQRLSTRWMALRGHSAADCVRIYLTVARKWPFFGAKLFLAKPITPSSLGSTFLWLAVHEDGLSLLEYNSMRLIVSYVYKSLMTFGGYQDDFMVVINNTHSKDKPTEKLLFAMAKPKILEITLLIASYINNFHQQKAAFHHLSAPALLSAQTRGPQARMMGSQPLLSSSRPTKGPTLL

SEQ ID NO: 58201 - protein, 967 aa, Homo sapiens
MDWTPRLPSRHIISELEHLTFVNTDVGRCRAWLRLALNDGLMECYLKLLLQEQARLHEYYQPTALLRDAEEGEFLLSFLQGLTSLSFELSYKSAILNEWTLTPLALSGLCPLSELDPLSTSGAELQRKESLDSISHSSGSEDIEVHHSGHKIRRNQKLTASSLSLDTASSSQLSCSLNSDSCLLQENGSKSPDHCEEPMSCDSDLGTANAEDSDRSLQEVLLEFSKAQVNSVPTNGLSQETEIPTPQASLSLHGLNTSTYLHCEAPAEPLPAQAASGTQDGVHVQEPRPQAPSPLDLQQPVESTSGQQPSSTVSETAREVGQGNGLQKAQAHDGAGLKLVVSSPTSPKNKSWISEDDFYRPSREQPLESASDHPIASYRGTPGSRPGLHRHFSQEPRKNCSLGALDQACVPSPGRRQAQAAPSQGHKSFRVVHRRQMGLSNPFRGLMKLGTVERRGAMGIWKELFCELSPLEFRLYLSNEEHTCVENCSLLRCESVGPAHSDGRFELVFSGKKLALRASSQDEAEDWLDRVREALQKVRPQQEDEWVNVQYPDQPEEPPEAPQGCLSPSDLLSEPAALQGTQFDWSSAQVPEPDAIKESLLYLYMDRTWMPYIFSLSLEALKCFRIRNNEKMLSDSHGVETIRDILPDTSLGGPSFFKIITAKAVLKLQAGNAEEAALWRDLVRKVLASYLETAEEAVTLGGSLDENCQEVLKFATRENGFLLQYLVAIPMEKGLDSQGCFCAGCSRQIGFSFVRPKLCAFSGLYYCDICHQDDASVIPARIIHNWDLTKRPICRQALKFLTQIRAQPLINLQMVNASLYEHVERMHLIGRRREQLKLLGDYLGLCRSGALKELSKRLNHRNYLLESPHRFSVADLQQIADGVYEGFLKALIEFASQHVYHCDLCTQRGFICQICQHHDIIFPFEFDTTVRCAECKTVFHQSCQAVVKKGCPRCARRRKYQEQNIFA

SEQ ID NO: 58202 - protein, 1056 aa, Homo sapiens
MLSVVENGLDPQAAIPVIKKKLVGSVKALQKQYVSLDTVVTSEDGDANTMCSALEAVFIHGLHAKHIRAEAGGKRKKSAHQKPLPQPVFWPLLKAVTHKHIISELEHLTFVNTDVGRCRAWLRLALNDGLMECYLKLLLQEQARLHEYYQPTALLRDAEEGEFLLSFLQGLTSLSFELSYKSAILNEWTLTPLALSGLCPLSELDPLSTSGAELQRKESLDSISHSSGSEDIEVHHSGHKIRRNQKLTASSLSLDTASSSQLSCSLNSDSCLLQENGSKSPDHCEEPMSCDSDLGTANAEDSDRSLQEVLLEFSKAQVNSVPTNGLSQETEIPTPQASLSLHGLNTSTYLHCEAPAEPLPAQAASGTQDGVHVQEPRPQAPSPLDLQQPVESTSGQQPSSTVSETAREVGQGNGLQKAQAHDGAGLKLVVSSPTSPKNKSWISEDDFYRPSREQPLESASDHPIASYRGTPGSRPGLHRHFSQEPRKNCSLGALDQACVPSPGRRQAQAAPSQGHKSFRVVHRRQMGLSNPFRGLMKLGTVERRGAMGIWKELFCELSPLEFRLYLSNEEHTCVENCSLLRCESVGPAHSDGRFELVFSGKKLALRASSQDEAEDWLDRVREALQKVRPQQEDEWVNVQYPDQPEEPPEAPQGCLSPSDLLSEPAALQGTQFDWSSAQVPEPDAIKESLLYLYMDRTWMPYIFSLSLEALKCFRIRNNEKMLSDSHGVETIRDILPDTSLGGPSFFKIITAKAVLKLQAGNAEEAALWRDLVRKVLASYLETAEEAVTLGGSLDENCQEVLKFATRENGFLLQYLVAIPMEKGLDSQGCFCAGCSRQIGFSFVRPKLCAFSGLYYCDICHQDDASVIPARIIHNWDLTKRPICRQALKFLTQIRAQPLINLQMVNASLYEHVERMHLIGRRREQLKLLGDYLGLCRSGALKELSKRLNHRNYLLESPHRFSVADLQQIADGVYEGFLKALIEFASQHVYHCDLCTQRGFICQICQHHDIIFPFEFDTTVRCAECKTVFHQSCQAVVKKGCPRCARRRKYQEQNIFA

SEQ ID NO: 58203 - protein, 1000 aa, Homo sapiens
MVECFESGGTRLSLSSFNVSCDSLREQLREWRCFQWWRMDWTPRLPSRHIISELEHLTFVNTDVGRCRAWLRLALNDGLMECYLKLLLQEQARLHEYYQPTALLRDAEEGEFLLSFLQGLTSLSFELSYKSAILNEWTLTPLALSGLCPLSELDPLSTSGAELQRKESLDSISHSSGSEDIEVHHSGHKIRRNQKLTASSLSLDTASSSQLSCSLNSDSCLLQENGSKSPDHCEEPMSCDSDLGTANAEDSDRSLQEVLLEFSKAQVNSVPTNGLSQETEIPTPQASLSLHGLNTSTYLHCEAPAEPLPAQAASGTQDGVHVQEPRPQAPSPLDLQQPVESTSGQQPSSTVSETAREVGQGNGLQKAQAHDGAGLKLVVSSPTSPKNKSWISEDDFYRPSREQPLESASDHPIASYRGTPGSRPGLHRHFSQEPRKNCSLGALDQACVPSPGRRQAQAAPSQGHKSFRVVHRRQMGLSNPFRGLMKLGTVERRGAMGIWKELFCELSPLEFRLYLSNEEHTCVENCSLLRCESVGPAHSDGRFELVFSGKKLALRASSQDEAEDWLDRVREALQKVRPQQEDEWVNVQYPDQPEEPPEAPQGCLSPSDLLSEPAALQGTQFDWSSAQVPEPDAIKESLLYLYMDRTWMPYIFSLSLEALKCFRIRNNEKMLSDSHGVETIRDILPDTSLGGPSFFKIITAKAVLKLQAGNAEEAALWRDLVRKVLASYLETAEEAVTLGGSLDENCQEVLKFATRENGFLLQYLVAIPMEKGLDSQGCFCAGCSRQIGFSFVRPKLCAFSGLYYCDICHQDDASVIPARIIHNWDLTKRPICRQALKFLTQIRAQPLINLQMVNASLYEHVERMHLIGRRREQLKLLGDYLGLCRSGALKELSKRLNHRNYLLESPHRFSVADLQQIADGVYEGFSPKVPSEAAGLRPWGARSPEAASAFRCIDSSRLPSLRKVVPTLFLKCYFMQYTVPSEQGSGPEESLQCIEGIAAV

SEQ ID NO: 58204 - protein, 1821 aa, Homo sapiens
MSCERKGLSELRSELYFLIARFLEDGPCQQAAQVLIREVAEKELLPRRTDWTGKEHPRTYQNLVKYYRHLAPDHLLQICHRLGPLLEQEIPQSVPGVQTLLGAGRQSLLRTNKSCKHVVWKGSALAALHCGRPPESPVNYGSPPSIADTLFSRKLNGKYRLERLVPTAVYQHMKMHKRILGHLSSVYCVTFDRTGRRIFTGSDDCLVKIWATDDGRLLATLRGHAAEISDMAVNYENTMIAAGSCDKMIRVWCLRTCAPLAVLQGHSASITSLQFSPLCSGSKRYLSSTGADGTICFWLWDAGTLKINPRPAKFTERPRPGVQMICSSFSAGGMFLATGSTDHIIRVYFFGSGQPEKISELEFHTDKVDSIQFSNTSNRFVSGSRDGTARIWQFKRREWKSILLDMATRPAGQNLQGIEDKITKMKVTMVAWDRHDNTVITAVNNMTLKVWNSYTGQLIHVLMGHEDEVFVLEPHPFDPRVLFSAGHDGNVIVWDLARGVKIRSYFNMIEGQGHGAVFDCKCSPDGQHFACTDSHGHLLIFGFGSSSKYDKIADQMFFHSDYRPLIRDANNFVLDEQTQQAPHLMPPPFLVDVDGNPHPSRYQRLVPGRENCREEQLIPQMGVTSSGLNQVLSQQANQEISPLDSMIQRLQQEQDLRRSGEAVISNTSRLSRGSISSTSEVHSPPNVGLRRSGQIEGVRQMHSNAPRSEIATERDLVAWSRRVVVPELSAGVASRQEEWRTAKGEEEIKTYRSEEKRKHLTVPKENKIPTVSKNHAHEHFLDLGESKKQQTNQHNYRTRSALEETPRPSEEIENGSSSSDEGEVVAVSGGTSEEEERAWHSDGSSSDYSSDYSDWTADAGINLQPPKKVPKNKTKKAESSSDEEEESEKQKQKQIKKEKKKVNEEKDGPISPKKKKPKERKQKRLAVGELTENGLTLEEWLPSTWITDTIPRRCPFVPQMGDEVYYFRQGHEAYVEMARKNKIYSINPKKQPWHKMELREQELMKIVGIKYEVGLPTLCCLKLAFLDPDTGKLTGGSFTMKYHDMPDVIDFLVLRQQFDDAKYRRWNIGDRFRSVIDDAWWFGTIESQEPLQLEYPDSLFQCYNVCWDNGDTEKMSPWDMELIPNNAVFPEELGTSVPLTDGECRSLIYKPLDGEWGTNPRDEECERIVAGINQLMTLDIASAFVAPVDLQAYPMYCTVVAYPTDLSTIKQRLENRFYRRVSSLMWEVRYIEHNTRTFNEPGSPIVKSAKFVTDLLLHFIKDQTCYNIIPLYNSMKKKVLSDSEDEEKDADVPGTSTRKRKDHQPRRRLRNRAQSYDIQAWKKQCEELLNLIFQCEDSEPFRQPVDLLEYPDYRDIIDTPMDFATVRETLEAGNYESPMELCKDVRLIFSNSKAYTPSKRSRIYSMSLRLSAFFEEHISSVLSDYKSALRFHKRNTITKRRKKRNRSSSVSSSAASSPERKKRILKPQLKSESSTSAFSTPTRSIPPRHNAAQINGKTESSSVVRTRSNRVVVDPVVTEQPSTSSAAKTFITKANASAIPGKTILENSVKHSKALNTLSSPGQSSFSHGTRNNSAKENMEKEKPVKRKMKSSVLPKASTLSKSSAVIEQGDCKNNALVPGTIQVNGHGGQPSKLVKRGPGRKPKVEVNTNSGEIIHKKRGRKPKKLQYAKPEDLEQNNVHPIRDEVLPSSTCNFLSETNNVKEDLLQKKNRGGRKPKRKMKTQKLDADLLVPASVKVLRRSNRKKIDDPIDEEEEFEELKGSEPHMRTRNQGRRTAFYNEDDSEEEQRQLLFEDTSLTFGTSSRGRVRKLTEKAKANLIGW

SEQ ID NO: 58205 - protein, 398 aa, Homo sapiens
MKKKVLSDSEDEEKDADVPGTSTRKRKDHQPRRRLRNRAQSYDIQAWKKQCEELLNLIFQCEDSEPFRQPVDLLEYPDYRDIIDTPMDFATVRETLEAGNYESPMELCKDVRLIFSNSKAYTPSKRSRIYSMSLRLSAFFEEHISSVLSDYKSALRFHKRNTITKRRKKRNRSSSVSSSAASSPERKKRILKPQLKSESSTSAFSTPTRSIPPRHNAAQINGKTESSSVVRTRSNRVVVDPVVTEQPSTSSAAKTFITKANASAIPGKTILENSVKHSKALNTLSSPGQSSFSHGTRNNSAKENMEKEKPVKRKMKSSVLPKASTLSKSSAVIEQGDCKNNALVPGTIQVNGHGGQPSKLVKRGPGRKPKVEVNIVVKLYTRKGVESPKSYSMQSQKI

SEQ ID NO: 58206 - protein, 401 aa, Homo sapiens
MRRAPAAERLLELGFPPRCGRQEPPFPLGVTRGWGRWPIQKRREGARPVPFSERSQEDGRGPAARSSGTLWRIRTRLSLCRDPEPPPPLCLLRVSLLCALRAGGRGSRWGEDGARLLLLPPARAAGNGEAEPSGGPSYAGRMLESSGCKALKEGVLEKRSDGLLQLWKKKCCILTEEGLLLIPPKQLQHQQQQQQQQQQQQQQQPGQGPAEPSQPSGPAVASLEPPVKLKELHFSNMKTVDCVERKGKYMYFTVVMAEGKEIDFRCPQDQGWNAEITLQMVQYKNRQAILAVKSTRQKQQHLVQQQPPSQPQPQPQLQPQPQPQPQPQPQPQSQPQPQPQPKPQPQQLHPYPHPHPHPHSHPHSHPHPHPHPHPHQIPHPHPQPHSQPHGHRLLRSTSNSA

SEQ ID NO: 58207 - protein, 219 aa, Homo sapiens
MLESSGCKALKEGVLEKRSDGLLQLWKKKCCILTEEGLLLIPPKQLQHQQQQQQQQQQQQQQQPGQGPAEPSQPSGPAVASLEPPVKLKELHFSNMKTVDCVERKGKYMYFTVVMAEGKEIDFRCPQDQGWNAEITLQMVQYKNRQAILAVKSTRQKQQHLVQQQLHPYPHPHPHPHSHPHSHPHPHPHPHPHQIPHPHPQPHSQPHGHRLLRSTSNSA

SEQ ID NO: 58208 - protein, 152 aa, Homo sapiens
MKSPDEVLREGELEKRSDSLFQLWKKKRGVLTSDRLSLFPASPRARPKELRFHSILKVDCVERTGKYVYFTIVTTDHKEIDFRCAGESCWNAAIALALIDFQNRRALQDFRSRQERTAPAAPAEDAVAAAAAAPSEPSEPSRPSPQPKPRTP

SEQ ID NO: 58209 - protein, 1319 aa, Homo sapiens
MDALNRNQIGPGCQTQTMVQKGPLDLIETGKGLKVQTDKPHLVSLGSGRLSTAITLLPLEEGRTVIGSAARDISLQGPGLAPEHCYIENLRGTLTLYPCGNACTIDGLPVRQPTRLTQGCMLCLGQSTFLRFNHPAEAKWMKSMIPAGGRAPGPPYSPVPAESESLVNGNHTPQTATRGPSACASHSSLVSSIEKDLQEIMDSLVLEEPGAAGKKPAATSPLSPMANGGRYLLSPPTSPGAMSVGSSYENTSPAFSPLSSPASSGSCASHSPSGQEPGPSVPPLVPARSSSYHLALQPPQSRPSGARSESPRLSRKGGHERPPSPGLRGLLTDSPAATVLAEARRATESPRLGGQLPVVAISLSEYPASGALSQPTSIPGSPKFQPPVPAPRNKIGTLQDRPPSPFREPPGSERVLTTSPSRQLVGRTFSDGLATRTLQPPESPRLGRRGLDSMRELPPLSPSLSRRALSPLPTRTTPDPKLNREVAESPRPRRWAAHGASPEDFSLTLGARGRRTRSPSPTLGESLAPHKGSFSGRLSPAYSLGSLTGASPCQSPCVQRKLSSGDLRVPVTRERKNSITEISDNEDDLLEYHRRQRQERLREQEMERLERQRLETILNLCAEYSRADGGPEAGELPSIGEATAALALAGRRPSRGLAGASGRSSEEPGVATQRLWESMERSDEENLKEECSSTESTQQEHEDAPSTKLQGEVLALEEERAQVLGHVEQLKVRVKELEQQLQESAREAEMERALLQGEREAERALLQKEQKAVDQLQEKLVALETGIQKERDKEAEALETETKLFEDLEFQQLERESRVEEERELAGQGLLRSKAELLRSIAKRKERLAILDSQAGQIRAQAVQESERLARDKNASLQLLQKEKEKLTVLERRYHSLTGGRPFPKTTSTLKEVYRSKMDGEATSPLPRTRSGPLPSSSGSSSSSSQLSVATLGRSPSPKSALLTQNGTGSLPRNLAATLQDIETKRQLALQQKGQQVIEEQRRRLAELKQKAAAEAQCQWDALHGAAPFPAGPSGFPPLMHHSILHHLPAGRERGEEGEHAYDTLSLESSDSMETSISTGGNSACSPDNMSSASGLDMGKIEEMEKMLKEAHAEKNRLMESREREMELRRQALEEERRRREQVERRLQSESARRQQLVEKEVKMREKQFSQARPLTRYLPIRKEDFDLKTHIESSGHGVDTCLHVVLSSKVCRGYLVKMGGKIKSWKKRWFVFDRLKRTLSYYVDKHETKLKGVIYFQAIEEVYYDHLRSAAKSPNPALTFCVKTHDRLYYMVAPSAEAMRIWMDVIVTGAEGYTQFMN

SEQ ID NO: 58210 - protein, 730 aa, Homo sapiens
MERSDEENLKEECSSTESTQQEHEDAPSTKLQGEVLALEEERAQVLGHVEQLKVRVKELEQQLQESAREAEMERALLQGEREAERALLQKEQKAVDQLQEKLVALETGIQKERDKERAELAAGRRHLARQALYAELQTQLDNCPESVREQLQEQLRREAEALETETKLFEDLEFQQLERESRVEEERELAGQGLLRSKAELLRSIAKRKERLAILDSQAGQIRAQAVQESERLARDKNASLQLLQKEKEKLTVLERRYHSLTGGRPFPKTTSTLKEMEKLLLPAVDLEQWYQELMAGLGTGPAAASPHSSPPPLPAKASRQLQVYRSKMDGEATSPLPRTRSGPLPSSSGSSSSSSQLSVATLGRSPSPKSALLTQNGTGSLPRNLAATLQDIETKRQLALQQKGQQVIEEQRRRLAELKQKAAAEAQCQWDALHGAAPFPAGPSGFPPLMHHSILHHLPAGRERGEEGEHAYDTLSLESSDSMETSISTGGNSACSPDNMSSASGLDMGKIEEMEKMLKEAHAEKNRLMESREREMELRRQALEEERRRREQVERRLQSESARRQQLVEKEVKMREKQFSQARPLTRYLPIRKEDFDLKTHIESSGHGVDTCLHVVLSSKVCRGYLVKMGGKIKSWKKRWFVFDRLKRTLSYYVDKHETKLKGVIYFQAIEEVYYDHLRSAAKSPNPALTFCVKTHDRLYYMVAPSAEAMRIWMDVIVTGAEGYTQFMN

SEQ ID NO: 58211 - protein, 1377 aa, Homo sapiens
MDALNRNQIGPGCQTQTMVQKGPLDLIETGKGLKVQTDKPHLVSLGSGRLSTAITLLPLEEGRTVIGSAARDISLQGPGLAPEHCYIENLRGTLTLYPCGNACTIDGLPVRQPTRLTQGCMLCLGQSTFLRFNHPAEAKWMKSMIPAGGRAPGPPYSPVPAESESLVNGNHTPQTATRGPSACASHSSLVSSIEKDLQEIMDSLVLEEPGAAGKKPAATSPLSPMANGGRYLLSPPTSPGAMSVGSSYENTSPAFSPLSSPASSGSCASHSPSGQEPGPSVPPLVPARSSSYHLALQPPQSRPSGARSESPRLSRKGGHERPPSPGLRGLLTDSPAATVLAEARRATESPRLGGQLPVVAISLSEYPASGALSQPTSIPGSPKFQPPVPAPRNKIGTLQDRPPSPFREPPGSERVLTTSPSRQLVGRTFSDGLATRTLQPPESPRLGRRGLDSMRELPPLSPSLSRRALSPLPTRTTPDPKLNREVAESPRPRRWAAHGASPEDFSLTLGARGRRTRSPSPTLGESLAPHKGSFSGRLSPAYSLGSLTGASPCQSPCVQRKLSSGDLRVPVTRERKNSITEISDNEDDLLEYHRRQRQERLREQEMERLERQRLETILNLCAEYSRADGGPEAGELPSIGEATAALALAGRRPSRGLAGASGRSSEEPGVATQRLWESMERSDEENLKEECSSTESTQQEHEDAPSTKLQGEVLALEEERAQVLGHVEQLKVRVKELEQQLQESAREAEMERALLQGEREAERALLQKEQKAVDQLQEKLVALETGIQKERDKEAEALETETKLFEDLEFQQLERESRVEEERELAGQGLLRSKAELLRSIAKRKERLAILDSQAGQIRAQAVQESERLARDKNASLQLLQKEKEKLTVLERRYHSLTGGRPFPKTTSTLKEMEKLLLPAVDLEQWYQELMAGLGTGPAAASPHSSPPPLPAKASRQLQVYRSKMDGEATSPLPRTRSGPLPSSSGSSSSSSQLSVATLGRSPSPKSALLTQNGTGSLPRNLAATLQDIETKRQLALQQKGQQVIEEQRRRLAELKQKAAAEAQCQWDALHGAAPFPAGPSGFPPLMHHSILHHLPAGRERGEEGEHAYDTLSLESSDSMETSISTGGNSACSPDNMSSASGLDMGKIEEMEKMLKEAHAEKNRLMESREREMELRRQALEEERRRREQVERRLQSESARRQQLVEKEVKMREKQFSQARPLTRYLPIRKEDFDLKTHIESSGHGVDTCLHVVLSSKVCRGYLVKMGGKIKSWKKRWFVFDRLKRTLSYYVDKHETKLKGVIYFQAIEEVYYDHLRSAAKKRFFRFTMVTESPNPALTFCVKTHDRLYYMVAPSAEAMRIWMDVIVTGAEGYTQFMN

SEQ ID NO: 58212 - protein, 1140 aa, Homo sapiens
MSVGSSYENTSPAFSPLSSPASSGSCASHSPSGQEPGPSVPPLVPARSSSYHLALQPPQSRPSGARSESPRLSRKGGHERPPSPGLRGLLTDSPAATVLAEARRATESPRLGGQLPVVAISLSEYPASGALSQPTSIPGSPKFQPPVPAPRNKIGTLQDRPPSPFREPPGSERVLTTSPSRQLVGRTFSDGLATRTLQPPESPRLGRRGLDSMRELPPLSPSLSRRALSPLPTRTTPDPKLNREVAESPRPRRWAAHGASPEDFSLTLGARGRRTRSPSPTLGESLAPHKGSFSGRLSPAYSLGSLTGASPCQSPCVQRKLSSGDLRVPVTRERKNSITEISDNEDDLLEYHRRQRQERLREQEMERLERQRLETILNLCAEYSRADGGPEAGELPSIGEATAALALAGRRPSRGLAGASGRSSEEPGVATQRLWESMERSDEENLKEECSSTESTQQEHEDAPSTKLQGEVLALEEERAQVLGHVEQLKVRVKELEQQLQESAREAEMERALLQGEREAERALLQKEQKAVDQLQEKLVALETGIQKERDKEAEALETETKLFEDLEFQQLERESRVEEERELAGQGLLRSKAELLRSIAKRKERLAILDSQAGQIRAQAVQESERLARDKNASLQLLQKEKEKLTVLERRYHSLTGGRPFPKTTSTLKEMEKLLLPAVDLEQWYQELMAGLGTGPAAASPHSSPPPLPAKASRQLQVYRSKMDGEATSPLPRTRSGPLPSSSGSSSSSSQLSVATLGRSPSPKSALLTQNGTGSLPRNLAATLQDIETKRQLALQQKVESLPAEPLPTDDPAGQQVIEEQRRRLAELKQKAAAEAQCQWDALHGAAPFPAGPSGFPPLMHHSILHHLPAGRERGEEGEHAYDTLSLESSDSMETSISTGGNSACSPDNMSSASGLDMGKIEEMEKMLKEAHAEKNRLMESREREMELRRQALEEERRRREQVERRLQSESARRQQLVEKEVKMREKQFSQARPLTRYLPIRKEDFDLKTHIESSGHGVDTCLHVVLSSKVCRGYLVKMGGKIKSWKKRWFVFDRLKRTLSYYVDKHETKLKGVIYFQAIEEVYYDHLRSAAKSPNPALTFCVKTHDRLYYMVAPSAEAMRIWMDVIVTGAEGYTQFMN

SEQ ID NO: 58213 - protein, 101 aa, Homo sapiens
MGGKIKSWKKRWFVFDRLKRTLSYYVDKHETKLKGVIYFQAIEEVYYDHLRSAAKSPNPALTFCVKTHDRLYYMVAPSAEAMRIWMDVIVTGAEGYTQFMN

SEQ ID NO: 58214 - protein, 372 aa, Homo sapiens
MDALNRNQIGPGCQTQTMVQKGPLDLIETGKGLKVQTDKPHLVSLGSGRLSTAITLLPLEEGRTVIGSAARDISLQGPGLAPEHCYIENLRGTLTLYPCGNACTIDGLPVRQPTRLTQGCMLCLGQSTFLRFNHPAEAKWMKSMIPAGGRAPGPPYSPVPESESLVNGNHTPQTATRGPSACASHSSLVSSIEKDLQEIMDSLVLEEPGAAGKKPAATSPLSPMANGGRYLLSPPTSPGAMSVGSSYENTSPAFSPLSSPASSGSCASHSPSGQEPGPSVPPLVPARSSSYHLALQPPQSRPSGARSESPRLSRKGGHERPPSPGLRGLLTDSPAATVLAEARRATESPRLGGQLPVVAISLSEYPAARRCT

SEQ ID NO: 58215 - protein, 247 aa, Homo sapiens
MDALNRNQIGPGCQTQTMVQKGPLDLIETGKGLKVQTDKPHLVSLGSGRLSTAITLLPLEEGRTVIGSAARDISLQGPGLAPEHCYIENLRGTLTLYPCGNACTIDGLPVRQPTRLTQGCMLCLGQSTFLRFNHPAEAKWMKSMIPAGGRAPGPPYSPVPAESESLVNGNHTPQTATRGPSACASHSSLVSSIEKDLQEIMDSLVLEEPGAAGKKPAATSPLSPMANGGRYLLSPPTSPGHVCGLQL

SEQ ID NO: 58216 - protein, 4684 aa, Homo sapiens
MVAGMLMPRDQLRAIYEVLFREGVMVAKKDRRPRSLHPHVPGVTNLQVMRAMASLRARGLVRETFAWCHFYWYLTNEGIAHLRQYLHLPPEIVPASLQRVRRPVAMVMPARRTPHVQAVQGPLGSPPKRGPLPTEEQRVYRRKELEEVSPETPVVPATTQRTLARPGPEPAPATDERDRVQKKTFTKWVNKHLIKAQRHISDLYEDLRDGHNLISLLEVLSGDSLPREKGRMRFHKLQNVQIALDYLRHRQVKLVNIRNDDIADGNPKLTLGLIWTIILHFQISDIQVSGQSEDMTAKEKLLLWSQRMVEGYQGLRCDNFTSSWRDGRLFNAIIHRHKPLLIDMNKVYRQTNLENLDQAFSVAERDLGVTRLLDPEDVDVPQPDEKSIITYVSSLYDAMPRVPDVQDGVRANELQLRWQEYRELVLLLLQWMRHHTAAFEERRFPSSFEEIEILWSQFLKFKEMELPAKEADKNRSKGIYQSLEGAVQAGQLKVPPGYHPLDVEKEWGKLHVAILEREKQLRSEFERLECLQRIVTKLQMEAGLCEEQLNQADALLQSDVRLLAAGKVPQRAGEVERDLDKADSMIRLLFNDVQTLKDGRHPQGEQMYRRVYRLHERLVAIRTEYNLRLKAGVAAPATQVAQVTLQSVQRRPELEDSTLRYLQDLLAWVEENQHRVDGAEWGVDLPSVEAQLGSHRGLHQSIEEFRAKIERARSDEGQLSPATRGAYRDCLGRLDLQYAKLLNSSKARLRSLESLHSFVAAATKELMWLNEKEEEEVGFDWSDRNTNMTAKKESYSALMRELELKEKKIKELQNAGDRLLREDHPARPTVESFQAALQTQWSWMLQLCCCIEAHLKENAAYFQFFSDVREAEGQLQKLQEALRRKYSCDRSATVTRLEDLLQDAQDEKEQLNEYKGHLSGLAKRAKAVVQLKPRHPAHPMRGRLPLLAVCDYKQVEVTVHKGDECQLVGPAQPSHWKVLSSSGSEAAVPSVCFLVPPPNQEAQEAVTRLEAQHQALVTLWHQLHVDMKSLLAWQSLRRDVQLIRSWSLATFRTLKPEEQRQALHSLELHYQAFLRDSQDAGGFGPEDRLMAEREYGSCSHHYQQLLQSLEQGAQEESRCQRCISELKDIRLQLEACETRTVHRLRLPLDKEPARECAQRIAEQQKAQAEVEGLGKGVARLSAEAEKVLALPEPSPAAPTLRSELELTLGKLEQVRSLSAIYLEKLKTISLVIRGTQGAEEVLRAHEEQLKEAQAVPATLPELEATKASLKKLRAQAEAQQPTFDALRDELRGAQEVGERLQQRHGERDVEVERWRERVAQLLERWQAVLAQTDVRQRELEQLGRQLRYYRESADPLGAWLQDARRRQEQIQAMPLADSQAVREQLRQEQALLEEIERHGEKVEECQRFAKQYINAIKDYELQLVTYKAQLEPVASPAKKPKVQSGSESVIQEYVDLRTHYSELTTLTSQYIKFISETLRRMEEEERLAEQQRAEERERLAEVEAALEKQRQLAEAHAQAKAQAEREAKELQQRMQEEVVRREEAAVDAQQQKRSIQEELQQLRQSSEAEIQAKARQAEAAERSRLRIEEEIRVVRLQLEATERQRGGAEGELQALRARAEEAEAQKRQAQEEAERLRRQVQDESQRKRQAEVELASRVKAEAEAAREKQRALQALEELRLQAEEAERRLRQAEVERARQVQVALETAQRSAEAELQSKRASFAEKTAQLERSLQEEHVAVAQLREEAERRAQQQAEAERAREEAERELERWQLKANEALRLRLQAEEVAQQKSLAQAEAEKQKEEAEREARRRGKAEEQAVRQRELAEQELEKQRQLAEGTAQQRLAAEQELIRLRAETEQGEQQRQLLEEELARLQREAAAATQKRQELEAELAKVRAEMEVLLASKARAEEESRSTSEKSKQRLEAEAGRFRELAEEAARLRALAEEAKRQRQLAEEDAARQRAEAERVLAEKLAAIGEATRLKTEAEIALKEKEAENERLRRLAEDEAFQRRRLEEQAAQHKADIEERLAQLRKASDSELERQKGLVEDTLRQRRQVEEEILALKASFEKAAAGKAELELELGRIRSNAEDTLRSKEQAELEAARQRQLAAEEERRRREAEERVQKSLAAEEEAARQRKAALEEVERLKAKVEEARRLRERAEQESARQLQLAQEAAQKRLQAEEKAHAFAVQQKEQELQQTLQQEQSVLDQLRGEAEAARRAAEEAEEARVQAEREAAQSRRQVEEAERLKQSAEEQAQARAQAQAAAEKLRKEAEQEAARRAQAEQAALRQKQAADAEMEKHKKFAEQTLRQKAQVEQELTTLRLQLEETDHQKNLLDEELQRLKAEATEAARQRSQVEEELFSVRVQMEELSKLKARIEAENRALILRDKDNTQRFLQEEAEKMKQVAEEAARLSVAAQEAARLRQLAEEDLAQQRALAEKMLKEKMQAVQEATRLKAEAELLQQQKELAQEQARRLQEDKEQMAQQLAEETQGFQRTLEAERQRQLEMSAEAERLKLRVAEMSRAQARAEEDAQRFRKQAEEIGEKLHRTELATQEKVTLVQTLEIQRQQSDHDAERLREAIAELEREKEKLQQEAKLLQLKSEEMQTVQQEQLLQETQALQQSFLSEKDSLLQRERFIEQEKAKLEQLFQDEVAKAQQLREEQQRQQQQMEQERQRLVASMEEARRRQHEAEEGVRRKQEELQQLEQQRRQQEELLAEENQRLREQLQLLEEQHRAALAHSEEVTASQVAATKTLPNGRDALDGPAAEAEPEHSFDGLRRKVSAQRLQEAGILSAEELQRLAQGHTTVDELARREDVRHYLQGRSSIAGLLLKATNEKLSVYAALQRQLLSPGTALILLEAQAASGFLLDPVRNRRLTVNEAVKEGVVGPELHHKLLSAERAVTGYKDPYTGQQISLFQAMQKGLIVREHGIRLLEAQIATGGVIDPVHSHRVPVDVAYRRGYFDEEMNRVLADPSDDTKGFFDPNTHENLTYLQLLERCVEDPETGLCLLPLTDKAAKGGELVYTDSEARDVFEKATVSAPFGKFQGKTVTIWEIINSEYFTAEQRRDLLRQFRTGRITVEKIIKIIITVVEEQEQKGRLCFEGLRSLVPAAELLESRVIDRELYQQLQRGERSVRDVAEVDTVRRALRGANVIAGVWLEEAGQKLSIYNALKKDLLPSDMAVALLEAQAGTGHIIDPATSARLTVDEAVRAGLVGPEFHEKLLSAEKAVTGYRDPYTGQSVSLFQALKKGLIPREQGLRLLDAQLSTGGIVDPSKSHRVPLDVACARGCLDEETSRALSAPRADAKAYSDPSTGEPATYGELQQRCRPDQLTGLSLLPLSEKAARARQEELYSELQARETFEKTPVEVPVGGFKGRTVTVWELISSEYFTAEQRQELLRQFRTGKVTVEKVIKILITIVEEVETLRQERLSFSGLRAPVPASELLASGVLSRAQFEQLKDGKTTVKDLSELGSVRTLLQGSGCLAGIYLEDTKEKVSIYEAMRRGLLRATTAALLLEAQAATGFLVDPVRNQRLYVHEAVKAGVVGPELHEQLLSAEKAVTGYRDPYSGSTISLFQAMQKGLVLRQHGIRLLEAQIATGGIIDPVHSHRVPVDVAYQRGYFSEEMNRVLADPSDDTKGFFDPNTHENLTYRQLLERCVEDPETGLRLLPLKGAEKAEVVETTQVYTEEETRRAFEETQIDIPGGGSHGGSTMSLWEVMQSDLIPEEQRAQLMADFQAGRVTKERMIIIIIEIIEKTEIIRQQGLASYDYVRRRLTAEDLFEARIISLETYNLLREGTRSLREALEAESAWCYLYGTGSVAGVYLPGSRQTLSIYQALKKGLLSAEVARLLLEAQAATGFLLDPVKGERLTVDEAVRKGLVGPELHDRLLSAERAVTGYRDPYTEQTISLFQAMKKELIPTEEALRLLDAQLATGGIVDPRLGFHLPLEVAYQRGYLNKDTHDQLSEPSEVRSYVDPSTDERLSYTQLLRRCRRDDGTGQLLLPLSDARKLTFRGLRKQITMEELVRSQVMDEATALQLREGLTSIEEVTKNLQKFLEGTSCIAGVFVDATKERLSVYQAMKKGIIRPGTAFELLEAQAATGYVIDPIKGLKLTVEEAVRMGIVGPEFKDKLLSAERAVTGYKDPYSGKLISLFQAMKKGLILKDHGIRLLEAQIATGGIIDPEESHRLPVEVAYKRGLFDEEMNEILTDPSDDTKGFFDPNTEENLTYLQLMERCITDPQTGLCLLPLKEKKRERKTSSKSSVRKRRVVIVDPETGKEMSVYEAYRKGLIDHQTYLELSEQECEWEEITISSSDGVVKSMIIDRRSGRQYDIDDAIAKNLIDRSALDQYRAGTLSITEFADMLSGNAGGFRSRSSSVGSSSSYPISPAVSRTQLASWSDPTEETGPVAGILDTETLEKVSITEAMHRNLVDNITGQRLLEAQACTGGIIDPSTGERFPVTDAVNKGLVDKIMVDRINLAQKAFCGFEDPRTKTKMSAAQALKKGWLYYEAGQRFLEVQYLTGGLIEPDTPGRVPLDEALQRGTVDARTAQKLRDVGAYSKYLTCPKTKLKISYKDALDRSMVEEGTGLRLLEAAAQSTKGYYSPYSVSGSGSTAGSRTGSRTGSRAGSRRGSFDATGSGFSMTFSSSSYSSSGYGRRYASGSSASLGGPESAVA

SEQ ID NO: 58217 - protein, 4547 aa, Homo sapiens
MSQHQLRVPQPEGLGRKRTSSEDNLYLAVLRASEGKKDERDRVQKKTFTKWVNKHLIKAQRHISDLYEDLRDGHNLISLLEVLSGDSLPREKGRMRFHKLQNVQIALDYLRHRQVKLVNIRNDDIADGNPKLTLGLIWTIILHFQISDIQVSGQSEDMTAKEKLLLWSQRMVEGYQGLRCDNFTSSWRDGRLFNAIIHRHKPLLIDMNKVYRQTNLENLDQAFSVAERDLGVTRLLDPEDVDVPQPDEKSIITYVSSLYDAMPRVPDVQDGVRANELQLRWQEYRELVLLLLQWMRHHTAAFEERRFPSSFEEIEILWSQFLKFKEMELPAKEADKNRSKGIYQSLEGAVQAGQLKVPPGYHPLDVEKEWGKLHVAILEREKQLRSEFERLECLQRIVTKLQMEAGLCEEQLNQADALLQSDVRLLAAGKVPQRAGEVERDLDKADSMIRLLFNDVQTLKDGRHPQGEQMYRRVYRLHERLVAIRTEYNLRLKAGVAAPATQVAQVTLQSVQRRPELEDSTLRYLQDLLAWVEENQHRVDGAEWGVDLPSVEAQLGSHRGLHQSIEEFRAKIERARSDEGQLSPATRGAYRDCLGRLDLQYAKLLNSSKARLRSLESLHSFVAAATKELMWLNEKEEEEVGFDWSDRNTNMTAKKESYSALMRELELKEKKIKELQNAGDRLLREDHPARPTVESFQAALQTQWSWMLQLCCCIEAHLKENAAYFQFFSDVREAEGQLQKLQEALRRKYSCDRSATVTRLEDLLQDAQDEKEQLNEYKGHLSGLAKRAKAVVQLKPRHPAHPMRGRLPLLAVCDYKQVEVTVHKGDECQLVGPAQPSHWKVLSSSGSEAAVPSVCFLVPPPNQEAQEAVTRLEAQHQALVTLWHQLHVDMKSLLAWQSLRRDVQLIRSWSLATFRTLKPEEQRQALHSLELHYQAFLRDSQDAGGFGPEDRLMAEREYGSCSHHYQQLLQSLEQGAQEESRCQRCISELKDIRLQLEACETRTVHRLRLPLDKEPARECAQRIAEQQKAQAEVEGLGKGVARLSAEAEKVLALPEPSPAAPTLRSELELTLGKLEQVRSLSAIYLEKLKTISLVIRGTQGAEEVLRAHEEQLKEAQAVPATLPELEATKASLKKLRAQAEAQQPTFDALRDELRGAQEVGERLQQRHGERDVEVERWRERVAQLLERWQAVLAQTDVRQRELEQLGRQLRYYRESADPLGAWLQDARRRQEQIQAMPLADSQAVREQLRQEQALLEEIERHGEKVEECQRFAKQYINAIKDYELQLVTYKAQLEPVASPAKKPKVQSGSESVIQEYVDLRTHYSELTTLTSQYIKFISETLRRMEEEERLAEQQRAEERERLAEVEAALEKQRQLAEAHAQAKAQAEREAKELQQRMQEEVVRREEAAVDAQQQKRSIQEELQQLRQSSEAEIQAKARQAEAAERSRLRIEEEIRVVRLQLEATERQRGGAEGELQALRARAEEAEAQKRQAQEEAERLRRQVQDESQRKRQAEVELASRVKAEAEAAREKQRALQALEELRLQAEEAERRLRQAEVERARQVQVALETAQRSAEAELQSKRASFAEKTAQLERSLQEEHVAVAQLREEAERRAQQQAEAERAREEAERELERWQLKANEALRLRLQAEEVAQQKSLAQAEAEKQKEEAEREARRRGKAEEQAVRQRELAEQELEKQRQLAEGTAQQRLAAEQELIRLRAETEQGEQQRQLLEEELARLQREAAAATQKRQELEAELAKVRAEMEVLLASKARAEEESRSTSEKSKQRLEAEAGRFRELAEEAARLRALAEEAKRQRQLAEEDAARQRAEAERVLAEKLAAIGEATRLKTEAEIALKEKEAENERLRRLAEDEAFQRRRLEEQAAQHKADIEERLAQLRKASDSELERQKGLVEDTLRQRRQVEEEILALKASFEKAAAGKAELELELGRIRSNAEDTLRSKEQAELEAARQRQLAAEEERRRREAEERVQKSLAAEEEAARQRKAALEEVERLKAKVEEARRLRERAEQESARQLQLAQEAAQKRLQAEEKAHAFAVQQKEQELQQTLQQEQSVLDQLRGEAEAARRAAEEAEEARVQAEREAAQSRRQVEEAERLKQSAEEQAQARAQAQAAAEKLRKEAEQEAARRAQAEQAALRQKQAADAEMEKHKKFAEQTLRQKAQVEQELTTLRLQLEETDHQKNLLDEELQRLKAEATEAARQRSQVEEELFSVRVQMEELSKLKARIEAENRALILRDKDNTQRFLQEEAEKMKQVAEEAARLSVAAQEAARLRQLAEEDLAQQRALAEKMLKEKMQAVQEATRLKAEAELLQQQKELAQEQARRLQEDKEQMAQQLAEETQGFQRTLEAERQRQLEMSAEAERLKLRVAEMSRAQARAEEDAQRFRKQAEEIGEKLHRTELATQEKVTLVQTLEIQRQQSDHDAERLREAIAELEREKEKLQQEAKLLQLKSEEMQTVQQEQLLQETQALQQSFLSEKDSLLQRERFIEQEKAKLEQLFQDEVAKAQQLREEQQRQQQQMEQERQRLVASMEEARRRQHEAEEGVRRKQEELQQLEQQRRQQEELLAEENQRLREQLQLLEEQHRAALAHSEEVTASQVAATKTLPNGRDALDGPAAEAEPEHSFDGLRRKVSAQRLQEAGILSAEELQRLAQGHTTVDELARREDVRHYLQGRSSIAGLLLKATNEKLSVYAALQRQLLSPGTALILLEAQAASGFLLDPVRNRRLTVNEAVKEGVVGPELHHKLLSAERAVTGYKDPYTGQQISLFQAMQKGLIVREHGIRLLEAQIATGGVIDPVHSHRVPVDVAYRRGYFDEEMNRVLADPSDDTKGFFDPNTHENLTYLQLLERCVEDPETGLCLLPLTDKAAKGGELVYTDSEARDVFEKATVSAPFGKFQGKTVTIWEIINSEYFTAEQRRDLLRQFRTGRITVEKIIKIIITVVEEQEQKGRLCFEGLRSLVPAAELLESRVIDRELYQQLQRGERSVRDVAEVDTVRRALRGANVIAGVWLEEAGQKLSIYNALKKDLLPSDMAVALLEAQAGTGHIIDPATSARLTVDEAVRAGLVGPEFHEKLLSAEKAVTGYRDPYTGQSVSLFQALKKGLIPREQGLRLLDAQLSTGGIVDPSKSHRVPLDVACARGCLDEETSRALSAPRADAKAYSDPSTGEPATYGELQQRCRPDQLTGLSLLPLSEKAARARQEELYSELQARETFEKTPVEVPVGGFKGRTVTVWELISSEYFTAEQRQELLRQFRTGKVTVEKVIKILITIVEEVETLRQERLSFSGLRAPVPASELLASGVLSRAQFEQLKDGKTTVKDLSELGSVRTLLQGSGCLAGIYLEDTKEKVSIYEAMRRGLLRATTAALLLEAQAATGFLVDPVRNQRLYVHEAVKAGVVGPELHEQLLSAEKAVTGYRDPYSGSTISLFQAMQKGLVLRQHGIRLLEAQIATGGIIDPVHSHRVPVDVAYQRGYFSEEMNRVLADPSDDTKGFFDPNTHENLTYRQLLERCVEDPETGLRLLPLKGAEKAEVVETTQVYTEEETRRAFEETQIDIPGGGSHGGSTMSLWEVMQSDLIPEEQRAQLMADFQAGRVTKERMIIIIIEIIEKTEIIRQQGLASYDYVRRRLTAEDLFEARIISLETYNLLREGTRSLREALEAESAWCYLYGTGSVAGVYLPGSRQTLSIYQALKKGLLSAEVARLLLEAQAATGFLLDPVKGERLTVDEAVRKGLVGPELHDRLLSAERAVTGYRDPYTEQTISLFQAMKKELIPTEEALRLLDAQLATGGIVDPRLGFHLPLEVAYQRGYLNKDTHDQLSEPSEVRSYVDPSTDERLSYTQLLRRCRRDDGTGQLLLPLSDARKLTFRGLRKQITMEELVRSQVMDEATALQLREGLTSIEEVTKNLQKFLEGTSCIAGVFVDATKERLSVYQAMKKGIIRPGTAFELLEAQAATGYVIDPIKGLKLTVEEAVRMGIVGPEFKDKLLSAERAVTGYKDPYSGKLISLFQAMKKGLILKDHGIRLLEAQIATGGIIDPEESHRLPVEVAYKRGLFDEEMNEILTDPSDDTKGFFDPNTEENLTYLQLMERCITDPQTGLCLLPLKEKKRERKTSSKSSVRKRRVVIVDPETGKEMSVYEAYRKGLIDHQTYLELSEQECEWEEITISSSDGVVKSMIIDRRSGRQYDIDDAIAKNLIDRSALDQYRAGTLSITEFADMLSGNAGGFRSRSSSVGSSSSYPISPAVSRTQLASWSDPTEETGPVAGILDTETLEKVSITEAMHRNLVDNITGQRLLEAQACTGGIIDPSTGERFPVTDAVNKGLVDKIMVDRINLAQKAFCGFEDPRTKTKMSAAQALKKGWLYYEAGQRFLEVQYLTGGLIEPDTPGRVPLDEALQRGTVDARTAQKLRDVGAYSKYLTCPKTKLKISYKDALDRSMVEEGTGLRLLEAAAQSTKGYYSPYSVSGSGSTAGSRTGSRTGSRAGSRRGSFDATGSGFSMTFSSSSYSSSGYGRRYASGSSASLGGPESAVA

SEQ ID NO: 58218 - protein, 4547 aa, Homo sapiens
MEPSGSLFPSLVVVGHVVTLAAVWHWRRGRRWAQDEQDERDRVQKKTFTKWVNKHLIKAQRHISDLYEDLRDGHNLISLLEVLSGDSLPREKGRMRFHKLQNVQIALDYLRHRQVKLVNIRNDDIADGNPKLTLGLIWTIILHFQISDIQVSGQSEDMTAKEKLLLWSQRMVEGYQGLRCDNFTSSWRDGRLFNAIIHRHKPLLIDMNKVYRQTNLENLDQAFSVAERDLGVTRLLDPEDVDVPQPDEKSIITYVSSLYDAMPRVPDVQDGVRANELQLRWQEYRELVLLLLQWMRHHTAAFEERRFPSSFEEIEILWSQFLKFKEMELPAKEADKNRSKGIYQSLEGAVQAGQLKVPPGYHPLDVEKEWGKLHVAILEREKQLRSEFERLECLQRIVTKLQMEAGLCEEQLNQADALLQSDVRLLAAGKVPQRAGEVERDLDKADSMIRLLFNDVQTLKDGRHPQGEQMYRRVYRLHERLVAIRTEYNLRLKAGVAAPATQVAQVTLQSVQRRPELEDSTLRYLQDLLAWVEENQHRVDGAEWGVDLPSVEAQLGSHRGLHQSIEEFRAKIERARSDEGQLSPATRGAYRDCLGRLDLQYAKLLNSSKARLRSLESLHSFVAAATKELMWLNEKEEEEVGFDWSDRNTNMTAKKESYSALMRELELKEKKIKELQNAGDRLLREDHPARPTVESFQAALQTQWSWMLQLCCCIEAHLKENAAYFQFFSDVREAEGQLQKLQEALRRKYSCDRSATVTRLEDLLQDAQDEKEQLNEYKGHLSGLAKRAKAVVQLKPRHPAHPMRGRLPLLAVCDYKQVEVTVHKGDECQLVGPAQPSHWKVLSSSGSEAAVPSVCFLVPPPNQEAQEAVTRLEAQHQALVTLWHQLHVDMKSLLAWQSLRRDVQLIRSWSLATFRTLKPEEQRQALHSLELHYQAFLRDSQDAGGFGPEDRLMAEREYGSCSHHYQQLLQSLEQGAQEESRCQRCISELKDIRLQLEACETRTVHRLRLPLDKEPARECAQRIAEQQKAQAEVEGLGKGVARLSAEAEKVLALPEPSPAAPTLRSELELTLGKLEQVRSLSAIYLEKLKTISLVIRGTQGAEEVLRAHEEQLKEAQAVPATLPELEATKASLKKLRAQAEAQQPTFDALRDELRGAQEVGERLQQRHGERDVEVERWRERVAQLLERWQAVLAQTDVRQRELEQLGRQLRYYRESADPLGAWLQDARRRQEQIQAMPLADSQAVREQLRQEQALLEEIERHGEKVEECQRFAKQYINAIKDYELQLVTYKAQLEPVASPAKKPKVQSGSESVIQEYVDLRTHYSELTTLTSQYIKFISETLRRMEEEERLAEQQRAEERERLAEVEAALEKQRQLAEAHAQAKAQAEREAKELQQRMQEEVVRREEAAVDAQQQKRSIQEELQQLRQSSEAEIQAKARQAEAAERSRLRIEEEIRVVRLQLEATERQRGGAEGELQALRARAEEAEAQKRQAQEEAERLRRQVQDESQRKRQAEVELASRVKAEAEAAREKQRALQALEELRLQAEEAERRLRQAEVERARQVQVALETAQRSAEAELQSKRASFAEKTAQLERSLQEEHVAVAQLREEAERRAQQQAEAERAREEAERELERWQLKANEALRLRLQAEEVAQQKSLAQAEAEKQKEEAEREARRRGKAEEQAVRQRELAEQELEKQRQLAEGTAQQRLAAEQELIRLRAETEQGEQQRQLLEEELARLQREAAAATQKRQELEAELAKVRAEMEVLLASKARAEEESRSTSEKSKQRLEAEAGRFRELAEEAARLRALAEEAKRQRQLAEEDAARQRAEAERVLAEKLAAIGEATRLKTEAEIALKEKEAENERLRRLAEDEAFQRRRLEEQAAQHKADIEERLAQLRKASDSELERQKGLVEDTLRQRRQVEEEILALKASFEKAAAGKAELELELGRIRSNAEDTLRSKEQAELEAARQRQLAAEEERRRREAEERVQKSLAAEEEAARQRKAALEEVERLKAKVEEARRLRERAEQESARQLQLAQEAAQKRLQAEEKAHAFAVQQKEQELQQTLQQEQSVLDQLRGEAEAARRAAEEAEEARVQAEREAAQSRRQVEEAERLKQSAEEQAQARAQAQAAAEKLRKEAEQEAARRAQAEQAALRQKQAADAEMEKHKKFAEQTLRQKAQVEQELTTLRLQLEETDHQKNLLDEELQRLKAEATEAARQRSQVEEELFSVRVQMEELSKLKARIEAENRALILRDKDNTQRFLQEEAEKMKQVAEEAARLSVAAQEAARLRQLAEEDLAQQRALAEKMLKEKMQAVQEATRLKAEAELLQQQKELAQEQARRLQEDKEQMAQQLAEETQGFQRTLEAERQRQLEMSAEAERLKLRVAEMSRAQARAEEDAQRFRKQAEEIGEKLHRTELATQEKVTLVQTLEIQRQQSDHDAERLREAIAELEREKEKLQQEAKLLQLKSEEMQTVQQEQLLQETQALQQSFLSEKDSLLQRERFIEQEKAKLEQLFQDEVAKAQQLREEQQRQQQQMEQERQRLVASMEEARRRQHEAEEGVRRKQEELQQLEQQRRQQEELLAEENQRLREQLQLLEEQHRAALAHSEEVTASQVAATKTLPNGRDALDGPAAEAEPEHSFDGLRRKVSAQRLQEAGILSAEELQRLAQGHTTVDELARREDVRHYLQGRSSIAGLLLKATNEKLSVYAALQRQLLSPGTALILLEAQAASGFLLDPVRNRRLTVNEAVKEGVVGPELHHKLLSAERAVTGYKDPYTGQQISLFQAMQKGLIVREHGIRLLEAQIATGGVIDPVHSHRVPVDVAYRRGYFDEEMNRVLADPSDDTKGFFDPNTHENLTYLQLLERCVEDPETGLCLLPLTDKAAKGGELVYTDSEARDVFEKATVSAPFGKFQGKTVTIWEIINSEYFTAEQRRDLLRQFRTGRITVEKIIKIIITVVEEQEQKGRLCFEGLRSLVPAAELLESRVIDRELYQQLQRGERSVRDVAEVDTVRRALRGANVIAGVWLEEAGQKLSIYNALKKDLLPSDMAVALLEAQAGTGHIIDPATSARLTVDEAVRAGLVGPEFHEKLLSAEKAVTGYRDPYTGQSVSLFQALKKGLIPREQGLRLLDAQLSTGGIVDPSKSHRVPLDVACARGCLDEETSRALSAPRADAKAYSDPSTGEPATYGELQQRCRPDQLTGLSLLPLSEKAARARQEELYSELQARETFEKTPVEVPVGGFKGRTVTVWELISSEYFTAEQRQELLRQFRTGKVTVEKVIKILITIVEEVETLRQERLSFSGLRAPVPASELLASGVLSRAQFEQLKDGKTTVKDLSELGSVRTLLQGSGCLAGIYLEDTKEKVSIYEAMRRGLLRATTAALLLEAQAATGFLVDPVRNQRLYVHEAVKAGVVGPELHEQLLSAEKAVTGYRDPYSGSTISLFQAMQKGLVLRQHGIRLLEAQIATGGIIDPVHSHRVPVDVAYQRGYFSEEMNRVLADPSDDTKGFFDPNTHENLTYRQLLERCVEDPETGLRLLPLKGAEKAEVVETTQVYTEEETRRAFEETQIDIPGGGSHGGSTMSLWEVMQSDLIPEEQRAQLMADFQAGRVTKERMIIIIIEIIEKTEIIRQQGLASYDYVRRRLTAEDLFEARIISLETYNLLREGTRSLREALEAESAWCYLYGTGSVAGVYLPGSRQTLSIYQALKKGLLSAEVARLLLEAQAATGFLLDPVKGERLTVDEAVRKGLVGPELHDRLLSAERAVTGYRDPYTEQTISLFQAMKKELIPTEEALRLLDAQLATGGIVDPRLGFHLPLEVAYQRGYLNKDTHDQLSEPSEVRSYVDPSTDERLSYTQLLRRCRRDDGTGQLLLPLSDARKLTFRGLRKQITMEELVRSQVMDEATALQLREGLTSIEEVTKNLQKFLEGTSCIAGVFVDATKERLSVYQAMKKGIIRPGTAFELLEAQAATGYVIDPIKGLKLTVEEAVRMGIVGPEFKDKLLSAERAVTGYKDPYSGKLISLFQAMKKGLILKDHGIRLLEAQIATGGIIDPEESHRLPVEVAYKRGLFDEEMNEILTDPSDDTKGFFDPNTEENLTYLQLMERCITDPQTGLCLLPLKEKKRERKTSSKSSVRKRRVVIVDPETGKEMSVYEAYRKGLIDHQTYLELSEQECEWEEITISSSDGVVKSMIIDRRSGRQYDIDDAIAKNLIDRSALDQYRAGTLSITEFADMLSGNAGGFRSRSSSVGSSSSYPISPAVSRTQLASWSDPTEETGPVAGILDTETLEKVSITEAMHRNLVDNITGQRLLEAQACTGGIIDPSTGERFPVTDAVNKGLVDKIMVDRINLAQKAFCGFEDPRTKTKMSAAQALKKGWLYYEAGQRFLEVQYLTGGLIEPDTPGRVPLDEALQRGTVDARTAQKLRDVGAYSKYLTCPKTKLKISYKDALDRSMVEEGTGLRLLEAAAQSTKGYYSPYSVSGSGSTAGSRTGSRTGSRAGSRRGSFDATGSGFSMTFSSSSYSSSGYGRRYASGSSASLGGPESAVA

SEQ ID NO: 58219 - protein, 4525 aa, Homo sapiens
MDPSRAIQNEISSLKDERDRVQKKTFTKWVNKHLIKAQRHISDLYEDLRDGHNLISLLEVLSGDSLPREKGRMRFHKLQNVQIALDYLRHRQVKLVNIRNDDIADGNPKLTLGLIWTIILHFQISDIQVSGQSEDMTAKEKLLLWSQRMVEGYQGLRCDNFTSSWRDGRLFNAIIHRHKPLLIDMNKVYRQTNLENLDQAFSVAERDLGVTRLLDPEDVDVPQPDEKSIITYVSSLYDAMPRVPDVQDGVRANELQLRWQEYRELVLLLLQWMRHHTAAFEERRFPSSFEEIEILWSQFLKFKEMELPAKEADKNRSKGIYQSLEGAVQAGQLKVPPGYHPLDVEKEWGKLHVAILEREKQLRSEFERLECLQRIVTKLQMEAGLCEEQLNQADALLQSDVRLLAAGKVPQRAGEVERDLDKADSMIRLLFNDVQTLKDGRHPQGEQMYRRVYRLHERLVAIRTEYNLRLKAGVAAPATQVAQVTLQSVQRRPELEDSTLRYLQDLLAWVEENQHRVDGAEWGVDLPSVEAQLGSHRGLHQSIEEFRAKIERARSDEGQLSPATRGAYRDCLGRLDLQYAKLLNSSKARLRSLESLHSFVAAATKELMWLNEKEEEEVGFDWSDRNTNMTAKKESYSALMRELELKEKKIKELQNAGDRLLREDHPARPTVESFQAALQTQWSWMLQLCCCIEAHLKENAAYFQFFSDVREAEGQLQKLQEALRRKYSCDRSATVTRLEDLLQDAQDEKEQLNEYKGHLSGLAKRAKAVVQLKPRHPAHPMRGRLPLLAVCDYKQVEVTVHKGDECQLVGPAQPSHWKVLSSSGSEAAVPSVCFLVPPPNQEAQEAVTRLEAQHQALVTLWHQLHVDMKSLLAWQSLRRDVQLIRSWSLATFRTLKPEEQRQALHSLELHYQAFLRDSQDAGGFGPEDRLMAEREYGSCSHHYQQLLQSLEQGAQEESRCQRCISELKDIRLQLEACETRTVHRLRLPLDKEPARECAQRIAEQQKAQAEVEGLGKGVARLSAEAEKVLALPEPSPAAPTLRSELELTLGKLEQVRSLSAIYLEKLKTISLVIRGTQGAEEVLRAHEEQLKEAQAVPATLPELEATKASLKKLRAQAEAQQPTFDALRDELRGAQEVGERLQQRHGERDVEVERWRERVAQLLERWQAVLAQTDVRQRELEQLGRQLRYYRESADPLGAWLQDARRRQEQIQAMPLADSQAVREQLRQEQALLEEIERHGEKVEECQRFAKQYINAIKDYELQLVTYKAQLEPVASPAKKPKVQSGSESVIQEYVDLRTHYSELTTLTSQYIKFISETLRRMEEEERLAEQQRAEERERLAEVEAALEKQRQLAEAHAQAKAQAEREAKELQQRMQEEVVRREEAAVDAQQQKRSIQEELQQLRQSSEAEIQAKARQAEAAERSRLRIEEEIRVVRLQLEATERQRGGAEGELQALRARAEEAEAQKRQAQEEAERLRRQVQDESQRKRQAEVELASRVKAEAEAAREKQRALQALEELRLQAEEAERRLRQAEVERARQVQVALETAQRSAEAELQSKRASFAEKTAQLERSLQEEHVAVAQLREEAERRAQQQAEAERAREEAERELERWQLKANEALRLRLQAEEVAQQKSLAQAEAEKQKEEAEREARRRGKAEEQAVRQRELAEQELEKQRQLAEGTAQQRLAAEQELIRLRAETEQGEQQRQLLEEELARLQREAAAATQKRQELEAELAKVRAEMEVLLASKARAEEESRSTSEKSKQRLEAEAGRFRELAEEAARLRALAEEAKRQRQLAEEDAARQRAEAERVLAEKLAAIGEATRLKTEAEIALKEKEAENERLRRLAEDEAFQRRRLEEQAAQHKADIEERLAQLRKASDSELERQKGLVEDTLRQRRQVEEEILALKASFEKAAAGKAELELELGRIRSNAEDTLRSKEQAELEAARQRQLAAEEERRRREAEERVQKSLAAEEEAARQRKAALEEVERLKAKVEEARRLRERAEQESARQLQLAQEAAQKRLQAEEKAHAFAVQQKEQELQQTLQQEQSVLDQLRGEAEAARRAAEEAEEARVQAEREAAQSRRQVEEAERLKQSAEEQAQARAQAQAAAEKLRKEAEQEAARRAQAEQAALRQKQAADAEMEKHKKFAEQTLRQKAQVEQELTTLRLQLEETDHQKNLLDEELQRLKAEATEAARQRSQVEEELFSVRVQMEELSKLKARIEAENRALILRDKDNTQRFLQEEAEKMKQVAEEAARLSVAAQEAARLRQLAEEDLAQQRALAEKMLKEKMQAVQEATRLKAEAELLQQQKELAQEQARRLQEDKEQMAQQLAEETQGFQRTLEAERQRQLEMSAEAERLKLRVAEMSRAQARAEEDAQRFRKQAEEIGEKLHRTELATQEKVTLVQTLEIQRQQSDHDAERLREAIAELEREKEKLQQEAKLLQLKSEEMQTVQQEQLLQETQALQQSFLSEKDSLLQRERFIEQEKAKLEQLFQDEVAKAQQLREEQQRQQQQMEQERQRLVASMEEARRRQHEAEEGVRRKQEELQQLEQQRRQQEELLAEENQRLREQLQLLEEQHRAALAHSEEVTASQVAATKTLPNGRDALDGPAAEAEPEHSFDGLRRKVSAQRLQEAGILSAEELQRLAQGHTTVDELARREDVRHYLQGRSSIAGLLLKATNEKLSVYAALQRQLLSPGTALILLEAQAASGFLLDPVRNRRLTVNEAVKEGVVGPELHHKLLSAERAVTGYKDPYTGQQISLFQAMQKGLIVREHGIRLLEAQIATGGVIDPVHSHRVPVDVAYRRGYFDEEMNRVLADPSDDTKGFFDPNTHENLTYLQLLERCVEDPETGLCLLPLTDKAAKGGELVYTDSEARDVFEKATVSAPFGKFQGKTVTIWEIINSEYFTAEQRRDLLRQFRTGRITVEKIIKIIITVVEEQEQKGRLCFEGLRSLVPAAELLESRVIDRELYQQLQRGERSVRDVAEVDTVRRALRGANVIAGVWLEEAGQKLSIYNALKKDLLPSDMAVALLEAQAGTGHIIDPATSARLTVDEAVRAGLVGPEFHEKLLSAEKAVTGYRDPYTGQSVSLFQALKKGLIPREQGLRLLDAQLSTGGIVDPSKSHRVPLDVACARGCLDEETSRALSAPRADAKAYSDPSTGEPATYGELQQRCRPDQLTGLSLLPLSEKAARARQEELYSELQARETFEKTPVEVPVGGFKGRTVTVWELISSEYFTAEQRQELLRQFRTGKVTVEKVIKILITIVEEVETLRQERLSFSGLRAPVPASELLASGVLSRAQFEQLKDGKTTVKDLSELGSVRTLLQGSGCLAGIYLEDTKEKVSIYEAMRRGLLRATTAALLLEAQAATGFLVDPVRNQRLYVHEAVKAGVVGPELHEQLLSAEKAVTGYRDPYSGSTISLFQAMQKGLVLRQHGIRLLEAQIATGGIIDPVHSHRVPVDVAYQRGYFSEEMNRVLADPSDDTKGFFDPNTHENLTYRQLLERCVEDPETGLRLLPLKGAEKAEVVETTQVYTEEETRRAFEETQIDIPGGGSHGGSTMSLWEVMQSDLIPEEQRAQLMADFQAGRVTKERMIIIIIEIIEKTEIIRQQGLASYDYVRRRLTAEDLFEARIISLETYNLLREGTRSLREALEAESAWCYLYGTGSVAGVYLPGSRQTLSIYQALKKGLLSAEVARLLLEAQAATGFLLDPVKGERLTVDEAVRKGLVGPELHDRLLSAERAVTGYRDPYTEQTISLFQAMKKELIPTEEALRLLDAQLATGGIVDPRLGFHLPLEVAYQRGYLNKDTHDQLSEPSEVRSYVDPSTDERLSYTQLLRRCRRDDGTGQLLLPLSDARKLTFRGLRKQITMEELVRSQVMDEATALQLREGLTSIEEVTKNLQKFLEGTSCIAGVFVDATKERLSVYQAMKKGIIRPGTAFELLEAQAATGYVIDPIKGLKLTVEEAVRMGIVGPEFKDKLLSAERAVTGYKDPYSGKLISLFQAMKKGLILKDHGIRLLEAQIATGGIIDPEESHRLPVEVAYKRGLFDEEMNEILTDPSDDTKGFFDPNTEENLTYLQLMERCITDPQTGLCLLPLKEKKRERKTSSKSSVRKRRVVIVDPETGKEMSVYEAYRKGLIDHQTYLELSEQECEWEEITISSSDGVVKSMIIDRRSGRQYDIDDAIAKNLIDRSALDQYRAGTLSITEFADMLSGNAGGFRSRSSSVGSSSSYPISPAVSRTQLASWSDPTEETGPVAGILDTETLEKVSITEAMHRNLVDNITGQRLLEAQACTGGIIDPSTGERFPVTDAVNKGLVDKIMVDRINLAQKAFCGFEDPRTKTKMSAAQALKKGWLYYEAGQRFLEVQYLTGGLIEPDTPGRVPLDEALQRGTVDARTAQKLRDVGAYSKYLTCPKTKLKISYKDALDRSMVEEGTGLRLLEAAAQSTKGYYSPYSVSGSGSTAGSRTGSRTGSRAGSRRGSFDATGSGFSMTFSSSSYSSSGYGRRYASGSSASLGGPESAVA

SEQ ID NO: 58220 - protein, 4533 aa, Homo sapiens
MAGPLPDEQDFIQAYEEVREKYKDERDRVQKKTFTKWVNKHLIKAQRHISDLYEDLRDGHNLISLLEVLSGDSLPREKGRMRFHKLQNVQIALDYLRHRQVKLVNIRNDDIADGNPKLTLGLIWTIILHFQISDIQVSGQSEDMTAKEKLLLWSQRMVEGYQGLRCDNFTSSWRDGRLFNAIIHRHKPLLIDMNKVYRQTNLENLDQAFSVAERDLGVTRLLDPEDVDVPQPDEKSIITYVSSLYDAMPRVPDVQDGVRANELQLRWQEYRELVLLLLQWMRHHTAAFEERRFPSSFEEIEILWSQFLKFKEMELPAKEADKNRSKGIYQSLEGAVQAGQLKVPPGYHPLDVEKEWGKLHVAILEREKQLRSEFERLECLQRIVTKLQMEAGLCEEQLNQADALLQSDVRLLAAGKVPQRAGEVERDLDKADSMIRLLFNDVQTLKDGRHPQGEQMYRRVYRLHERLVAIRTEYNLRLKAGVAAPATQVAQVTLQSVQRRPELEDSTLRYLQDLLAWVEENQHRVDGAEWGVDLPSVEAQLGSHRGLHQSIEEFRAKIERARSDEGQLSPATRGAYRDCLGRLDLQYAKLLNSSKARLRSLESLHSFVAAATKELMWLNEKEEEEVGFDWSDRNTNMTAKKESYSALMRELELKEKKIKELQNAGDRLLREDHPARPTVESFQAALQTQWSWMLQLCCCIEAHLKENAAYFQFFSDVREAEGQLQKLQEALRRKYSCDRSATVTRLEDLLQDAQDEKEQLNEYKGHLSGLAKRAKAVVQLKPRHPAHPMRGRLPLLAVCDYKQVEVTVHKGDECQLVGPAQPSHWKVLSSSGSEAAVPSVCFLVPPPNQEAQEAVTRLEAQHQALVTLWHQLHVDMKSLLAWQSLRRDVQLIRSWSLATFRTLKPEEQRQALHSLELHYQAFLRDSQDAGGFGPEDRLMAEREYGSCSHHYQQLLQSLEQGAQEESRCQRCISELKDIRLQLEACETRTVHRLRLPLDKEPARECAQRIAEQQKAQAEVEGLGKGVARLSAEAEKVLALPEPSPAAPTLRSELELTLGKLEQVRSLSAIYLEKLKTISLVIRGTQGAEEVLRAHEEQLKEAQAVPATLPELEATKASLKKLRAQAEAQQPTFDALRDELRGAQEVGERLQQRHGERDVEVERWRERVAQLLERWQAVLAQTDVRQRELEQLGRQLRYYRESADPLGAWLQDARRRQEQIQAMPLADSQAVREQLRQEQALLEEIERHGEKVEECQRFAKQYINAIKDYELQLVTYKAQLEPVASPAKKPKVQSGSESVIQEYVDLRTHYSELTTLTSQYIKFISETLRRMEEEERLAEQQRAEERERLAEVEAALEKQRQLAEAHAQAKAQAEREAKELQQRMQEEVVRREEAAVDAQQQKRSIQEELQQLRQSSEAEIQAKARQAEAAERSRLRIEEEIRVVRLQLEATERQRGGAEGELQALRARAEEAEAQKRQAQEEAERLRRQVQDESQRKRQAEVELASRVKAEAEAAREKQRALQALEELRLQAEEAERRLRQAEVERARQVQVALETAQRSAEAELQSKRASFAEKTAQLERSLQEEHVAVAQLREEAERRAQQQAEAERAREEAERELERWQLKANEALRLRLQAEEVAQQKSLAQAEAEKQKEEAEREARRRGKAEEQAVRQRELAEQELEKQRQLAEGTAQQRLAAEQELIRLRAETEQGEQQRQLLEEELARLQREAAAATQKRQELEAELAKVRAEMEVLLASKARAEEESRSTSEKSKQRLEAEAGRFRELAEEAARLRALAEEAKRQRQLAEEDAARQRAEAERVLAEKLAAIGEATRLKTEAEIALKEKEAENERLRRLAEDEAFQRRRLEEQAAQHKADIEERLAQLRKASDSELERQKGLVEDTLRQRRQVEEEILALKASFEKAAAGKAELELELGRIRSNAEDTLRSKEQAELEAARQRQLAAEEERRRREAEERVQKSLAAEEEAARQRKAALEEVERLKAKVEEARRLRERAEQESARQLQLAQEAAQKRLQAEEKAHAFAVQQKEQELQQTLQQEQSVLDQLRGEAEAARRAAEEAEEARVQAEREAAQSRRQVEEAERLKQSAEEQAQARAQAQAAAEKLRKEAEQEAARRAQAEQAALRQKQAADAEMEKHKKFAEQTLRQKAQVEQELTTLRLQLEETDHQKNLLDEELQRLKAEATEAARQRSQVEEELFSVRVQMEELSKLKARIEAENRALILRDKDNTQRFLQEEAEKMKQVAEEAARLSVAAQEAARLRQLAEEDLAQQRALAEKMLKEKMQAVQEATRLKAEAELLQQQKELAQEQARRLQEDKEQMAQQLAEETQGFQRTLEAERQRQLEMSAEAERLKLRVAEMSRAQARAEEDAQRFRKQAEEIGEKLHRTELATQEKVTLVQTLEIQRQQSDHDAERLREAIAELEREKEKLQQEAKLLQLKSEEMQTVQQEQLLQETQALQQSFLSEKDSLLQRERFIEQEKAKLEQLFQDEVAKAQQLREEQQRQQQQMEQERQRLVASMEEARRRQHEAEEGVRRKQEELQQLEQQRRQQEELLAEENQRLREQLQLLEEQHRAALAHSEEVTASQVAATKTLPNGRDALDGPAAEAEPEHSFDGLRRKVSAQRLQEAGILSAEELQRLAQGHTTVDELARREDVRHYLQGRSSIAGLLLKATNEKLSVYAALQRQLLSPGTALILLEAQAASGFLLDPVRNRRLTVNEAVKEGVVGPELHHKLLSAERAVTGYKDPYTGQQISLFQAMQKGLIVREHGIRLLEAQIATGGVIDPVHSHRVPVDVAYRRGYFDEEMNRVLADPSDDTKGFFDPNTHENLTYLQLLERCVEDPETGLCLLPLTDKAAKGGELVYTDSEARDVFEKATVSAPFGKFQGKTVTIWEIINSEYFTAEQRRDLLRQFRTGRITVEKIIKIIITVVEEQEQKGRLCFEGLRSLVPAAELLESRVIDRELYQQLQRGERSVRDVAEVDTVRRALRGANVIAGVWLEEAGQKLSIYNALKKDLLPSDMAVALLEAQAGTGHIIDPATSARLTVDEAVRAGLVGPEFHEKLLSAEKAVTGYRDPYTGQSVSLFQALKKGLIPREQGLRLLDAQLSTGGIVDPSKSHRVPLDVACARGCLDEETSRALSAPRADAKAYSDPSTGEPATYGELQQRCRPDQLTGLSLLPLSEKAARARQEELYSELQARETFEKTPVEVPVGGFKGRTVTVWELISSEYFTAEQRQELLRQFRTGKVTVEKVIKILITIVEEVETLRQERLSFSGLRAPVPASELLASGVLSRAQFEQLKDGKTTVKDLSELGSVRTLLQGSGCLAGIYLEDTKEKVSIYEAMRRGLLRATTAALLLEAQAATGFLVDPVRNQRLYVHEAVKAGVVGPELHEQLLSAEKAVTGYRDPYSGSTISLFQAMQKGLVLRQHGIRLLEAQIATGGIIDPVHSHRVPVDVAYQRGYFSEEMNRVLADPSDDTKGFFDPNTHENLTYRQLLERCVEDPETGLRLLPLKGAEKAEVVETTQVYTEEETRRAFEETQIDIPGGGSHGGSTMSLWEVMQSDLIPEEQRAQLMADFQAGRVTKERMIIIIIEIIEKTEIIRQQGLASYDYVRRRLTAEDLFEARIISLETYNLLREGTRSLREALEAESAWCYLYGTGSVAGVYLPGSRQTLSIYQALKKGLLSAEVARLLLEAQAATGFLLDPVKGERLTVDEAVRKGLVGPELHDRLLSAERAVTGYRDPYTEQTISLFQAMKKELIPTEEALRLLDAQLATGGIVDPRLGFHLPLEVAYQRGYLNKDTHDQLSEPSEVRSYVDPSTDERLSYTQLLRRCRRDDGTGQLLLPLSDARKLTFRGLRKQITMEELVRSQVMDEATALQLREGLTSIEEVTKNLQKFLEGTSCIAGVFVDATKERLSVYQAMKKGIIRPGTAFELLEAQAATGYVIDPIKGLKLTVEEAVRMGIVGPEFKDKLLSAERAVTGYKDPYSGKLISLFQAMKKGLILKDHGIRLLEAQIATGGIIDPEESHRLPVEVAYKRGLFDEEMNEILTDPSDDTKGFFDPNTEENLTYLQLMERCITDPQTGLCLLPLKEKKRERKTSSKSSVRKRRVVIVDPETGKEMSVYEAYRKGLIDHQTYLELSEQECEWEEITISSSDGVVKSMIIDRRSGRQYDIDDAIAKNLIDRSALDQYRAGTLSITEFADMLSGNAGGFRSRSSSVGSSSSYPISPAVSRTQLASWSDPTEETGPVAGILDTETLEKVSITEAMHRNLVDNITGQRLLEAQACTGGIIDPSTGERFPVTDAVNKGLVDKIMVDRINLAQKAFCGFEDPRTKTKMSAAQALKKGWLYYEAGQRFLEVQYLTGGLIEPDTPGRVPLDEALQRGTVDARTAQKLRDVGAYSKYLTCPKTKLKISYKDALDRSMVEEGTGLRLLEAAAQSTKGYYSPYSVSGSGSTAGSRTGSRTGSRAGSRRGSFDATGSGFSMTFSSSSYSSSGYGRRYASGSSASLGGPESAVA

SEQ ID NO: 58221 - protein, 4551 aa, Homo sapiens
MSGAGGAFASPREVLLERPCWLDGGCEPARRGYLYQQLCCVDERDRVQKKTFTKWVNKHLIKAQRHISDLYEDLRDGHNLISLLEVLSGDSLPREKGRMRFHKLQNVQIALDYLRHRQVKLVNIRNDDIADGNPKLTLGLIWTIILHFQISDIQVSGQSEDMTAKEKLLLWSQRMVEGYQGLRCDNFTSSWRDGRLFNAIIHRHKPLLIDMNKVYRQTNLENLDQAFSVAERDLGVTRLLDPEDVDVPQPDEKSIITYVSSLYDAMPRVPDVQDGVRANELQLRWQEYRELVLLLLQWMRHHTAAFEERRFPSSFEEIEILWSQFLKFKEMELPAKEADKNRSKGIYQSLEGAVQAGQLKVPPGYHPLDVEKEWGKLHVAILEREKQLRSEFERLECLQRIVTKLQMEAGLCEEQLNQADALLQSDVRLLAAGKVPQRAGEVERDLDKADSMIRLLFNDVQTLKDGRHPQGEQMYRRVYRLHERLVAIRTEYNLRLKAGVAAPATQVAQVTLQSVQRRPELEDSTLRYLQDLLAWVEENQHRVDGAEWGVDLPSVEAQLGSHRGLHQSIEEFRAKIERARSDEGQLSPATRGAYRDCLGRLDLQYAKLLNSSKARLRSLESLHSFVAAATKELMWLNEKEEEEVGFDWSDRNTNMTAKKESYSALMRELELKEKKIKELQNAGDRLLREDHPARPTVESFQAALQTQWSWMLQLCCCIEAHLKENAAYFQFFSDVREAEGQLQKLQEALRRKYSCDRSATVTRLEDLLQDAQDEKEQLNEYKGHLSGLAKRAKAVVQLKPRHPAHPMRGRLPLLAVCDYKQVEVTVHKGDECQLVGPAQPSHWKVLSSSGSEAAVPSVCFLVPPPNQEAQEAVTRLEAQHQALVTLWHQLHVDMKSLLAWQSLRRDVQLIRSWSLATFRTLKPEEQRQALHSLELHYQAFLRDSQDAGGFGPEDRLMAEREYGSCSHHYQQLLQSLEQGAQEESRCQRCISELKDIRLQLEACETRTVHRLRLPLDKEPARECAQRIAEQQKAQAEVEGLGKGVARLSAEAEKVLALPEPSPAAPTLRSELELTLGKLEQVRSLSAIYLEKLKTISLVIRGTQGAEEVLRAHEEQLKEAQAVPATLPELEATKASLKKLRAQAEAQQPTFDALRDELRGAQEVGERLQQRHGERDVEVERWRERVAQLLERWQAVLAQTDVRQRELEQLGRQLRYYRESADPLGAWLQDARRRQEQIQAMPLADSQAVREQLRQEQALLEEIERHGEKVEECQRFAKQYINAIKDYELQLVTYKAQLEPVASPAKKPKVQSGSESVIQEYVDLRTHYSELTTLTSQYIKFISETLRRMEEEERLAEQQRAEERERLAEVEAALEKQRQLAEAHAQAKAQAEREAKELQQRMQEEVVRREEAAVDAQQQKRSIQEELQQLRQSSEAEIQAKARQAEAAERSRLRIEEEIRVVRLQLEATERQRGGAEGELQALRARAEEAEAQKRQAQEEAERLRRQVQDESQRKRQAEVELASRVKAEAEAAREKQRALQALEELRLQAEEAERRLRQAEVERARQVQVALETAQRSAEAELQSKRASFAEKTAQLERSLQEEHVAVAQLREEAERRAQQQAEAERAREEAERELERWQLKANEALRLRLQAEEVAQQKSLAQAEAEKQKEEAEREARRRGKAEEQAVRQRELAEQELEKQRQLAEGTAQQRLAAEQELIRLRAETEQGEQQRQLLEEELARLQREAAAATQKRQELEAELAKVRAEMEVLLASKARAEEESRSTSEKSKQRLEAEAGRFRELAEEAARLRALAEEAKRQRQLAEEDAARQRAEAERVLAEKLAAIGEATRLKTEAEIALKEKEAENERLRRLAEDEAFQRRRLEEQAAQHKADIEERLAQLRKASDSELERQKGLVEDTLRQRRQVEEEILALKASFEKAAAGKAELELELGRIRSNAEDTLRSKEQAELEAARQRQLAAEEERRRREAEERVQKSLAAEEEAARQRKAALEEVERLKAKVEEARRLRERAEQESARQLQLAQEAAQKRLQAEEKAHAFAVQQKEQELQQTLQQEQSVLDQLRGEAEAARRAAEEAEEARVQAEREAAQSRRQVEEAERLKQSAEEQAQARAQAQAAAEKLRKEAEQEAARRAQAEQAALRQKQAADAEMEKHKKFAEQTLRQKAQVEQELTTLRLQLEETDHQKNLLDEELQRLKAEATEAARQRSQVEEELFSVRVQMEELSKLKARIEAENRALILRDKDNTQRFLQEEAEKMKQVAEEAARLSVAAQEAARLRQLAEEDLAQQRALAEKMLKEKMQAVQEATRLKAEAELLQQQKELAQEQARRLQEDKEQMAQQLAEETQGFQRTLEAERQRQLEMSAEAERLKLRVAEMSRAQARAEEDAQRFRKQAEEIGEKLHRTELATQEKVTLVQTLEIQRQQSDHDAERLREAIAELEREKEKLQQEAKLLQLKSEEMQTVQQEQLLQETQALQQSFLSEKDSLLQRERFIEQEKAKLEQLFQDEVAKAQQLREEQQRQQQQMEQERQRLVASMEEARRRQHEAEEGVRRKQEELQQLEQQRRQQEELLAEENQRLREQLQLLEEQHRAALAHSEEVTASQVAATKTLPNGRDALDGPAAEAEPEHSFDGLRRKVSAQRLQEAGILSAEELQRLAQGHTTVDELARREDVRHYLQGRSSIAGLLLKATNEKLSVYAALQRQLLSPGTALILLEAQAASGFLLDPVRNRRLTVNEAVKEGVVGPELHHKLLSAERAVTGYKDPYTGQQISLFQAMQKGLIVREHGIRLLEAQIATGGVIDPVHSHRVPVDVAYRRGYFDEEMNRVLADPSDDTKGFFDPNTHENLTYLQLLERCVEDPETGLCLLPLTDKAAKGGELVYTDSEARDVFEKATVSAPFGKFQGKTVTIWEIINSEYFTAEQRRDLLRQFRTGRITVEKIIKIIITVVEEQEQKGRLCFEGLRSLVPAAELLESRVIDRELYQQLQRGERSVRDVAEVDTVRRALRGANVIAGVWLEEAGQKLSIYNALKKDLLPSDMAVALLEAQAGTGHIIDPATSARLTVDEAVRAGLVGPEFHEKLLSAEKAVTGYRDPYTGQSVSLFQALKKGLIPREQGLRLLDAQLSTGGIVDPSKSHRVPLDVACARGCLDEETSRALSAPRADAKAYSDPSTGEPATYGELQQRCRPDQLTGLSLLPLSEKAARARQEELYSELQARETFEKTPVEVPVGGFKGRTVTVWELISSEYFTAEQRQELLRQFRTGKVTVEKVIKILITIVEEVETLRQERLSFSGLRAPVPASELLASGVLSRAQFEQLKDGKTTVKDLSELGSVRTLLQGSGCLAGIYLEDTKEKVSIYEAMRRGLLRATTAALLLEAQAATGFLVDPVRNQRLYVHEAVKAGVVGPELHEQLLSAEKAVTGYRDPYSGSTISLFQAMQKGLVLRQHGIRLLEAQIATGGIIDPVHSHRVPVDVAYQRGYFSEEMNRVLADPSDDTKGFFDPNTHENLTYRQLLERCVEDPETGLRLLPLKGAEKAEVVETTQVYTEEETRRAFEETQIDIPGGGSHGGSTMSLWEVMQSDLIPEEQRAQLMADFQAGRVTKERMIIIIIEIIEKTEIIRQQGLASYDYVRRRLTAEDLFEARIISLETYNLLREGTRSLREALEAESAWCYLYGTGSVAGVYLPGSRQTLSIYQALKKGLLSAEVARLLLEAQAATGFLLDPVKGERLTVDEAVRKGLVGPELHDRLLSAERAVTGYRDPYTEQTISLFQAMKKELIPTEEALRLLDAQLATGGIVDPRLGFHLPLEVAYQRGYLNKDTHDQLSEPSEVRSYVDPSTDERLSYTQLLRRCRRDDGTGQLLLPLSDARKLTFRGLRKQITMEELVRSQVMDEATALQLREGLTSIEEVTKNLQKFLEGTSCIAGVFVDATKERLSVYQAMKKGIIRPGTAFELLEAQAATGYVIDPIKGLKLTVEEAVRMGIVGPEFKDKLLSAERAVTGYKDPYSGKLISLFQAMKKGLILKDHGIRLLEAQIATGGIIDPEESHRLPVEVAYKRGLFDEEMNEILTDPSDDTKGFFDPNTEENLTYLQLMERCITDPQTGLCLLPLKEKKRERKTSSKSSVRKRRVVIVDPETGKEMSVYEAYRKGLIDHQTYLELSEQECEWEEITISSSDGVVKSMIIDRRSGRQYDIDDAIAKNLIDRSALDQYRAGTLSITEFADMLSGNAGGFRSRSSSVGSSSSYPISPAVSRTQLASWSDPTEETGPVAGILDTETLEKVSITEAMHRNLVDNITGQRLLEAQACTGGIIDPSTGERFPVTDAVNKGLVDKIMVDRINLAQKAFCGFEDPRTKTKMSAAQALKKGWLYYEAGQRFLEVQYLTGGLIEPDTPGRVPLDEALQRGTVDARTAQKLRDVGAYSKYLTCPKTKLKISYKDALDRSMVEEGTGLRLLEAAAQSTKGYYSPYSVSGSGSTAGSRTGSRTGSRAGSRRGSFDATGSGFSMTFSSSSYSSSGYGRRYASGSSASLGGPESAVA

SEQ ID NO: 58222 - protein, 4515 aa, Homo sapiens
MKIVPDERDRVQKKTFTKWVNKHLIKAQRHISDLYEDLRDGHNLISLLEVLSGDSLPREKGRMRFHKLQNVQIALDYLRHRQVKLVNIRNDDIADGNPKLTLGLIWTIILHFQISDIQVSGQSEDMTAKEKLLLWSQRMVEGYQGLRCDNFTSSWRDGRLFNAIIHRHKPLLIDMNKVYRQTNLENLDQAFSVAERDLGVTRLLDPEDVDVPQPDEKSIITYVSSLYDAMPRVPDVQDGVRANELQLRWQEYRELVLLLLQWMRHHTAAFEERRFPSSFEEIEILWSQFLKFKEMELPAKEADKNRSKGIYQSLEGAVQAGQLKVPPGYHPLDVEKEWGKLHVAILEREKQLRSEFERLECLQRIVTKLQMEAGLCEEQLNQADALLQSDVRLLAAGKVPQRAGEVERDLDKADSMIRLLFNDVQTLKDGRHPQGEQMYRRVYRLHERLVAIRTEYNLRLKAGVAAPATQVAQVTLQSVQRRPELEDSTLRYLQDLLAWVEENQHRVDGAEWGVDLPSVEAQLGSHRGLHQSIEEFRAKIERARSDEGQLSPATRGAYRDCLGRLDLQYAKLLNSSKARLRSLESLHSFVAAATKELMWLNEKEEEEVGFDWSDRNTNMTAKKESYSALMRELELKEKKIKELQNAGDRLLREDHPARPTVESFQAALQTQWSWMLQLCCCIEAHLKENAAYFQFFSDVREAEGQLQKLQEALRRKYSCDRSATVTRLEDLLQDAQDEKEQLNEYKGHLSGLAKRAKAVVQLKPRHPAHPMRGRLPLLAVCDYKQVEVTVHKGDECQLVGPAQPSHWKVLSSSGSEAAVPSVCFLVPPPNQEAQEAVTRLEAQHQALVTLWHQLHVDMKSLLAWQSLRRDVQLIRSWSLATFRTLKPEEQRQALHSLELHYQAFLRDSQDAGGFGPEDRLMAEREYGSCSHHYQQLLQSLEQGAQEESRCQRCISELKDIRLQLEACETRTVHRLRLPLDKEPARECAQRIAEQQKAQAEVEGLGKGVARLSAEAEKVLALPEPSPAAPTLRSELELTLGKLEQVRSLSAIYLEKLKTISLVIRGTQGAEEVLRAHEEQLKEAQAVPATLPELEATKASLKKLRAQAEAQQPTFDALRDELRGAQEVGERLQQRHGERDVEVERWRERVAQLLERWQAVLAQTDVRQRELEQLGRQLRYYRESADPLGAWLQDARRRQEQIQAMPLADSQAVREQLRQEQALLEEIERHGEKVEECQRFAKQYINAIKDYELQLVTYKAQLEPVASPAKKPKVQSGSESVIQEYVDLRTHYSELTTLTSQYIKFISETLRRMEEEERLAEQQRAEERERLAEVEAALEKQRQLAEAHAQAKAQAEREAKELQQRMQEEVVRREEAAVDAQQQKRSIQEELQQLRQSSEAEIQAKARQAEAAERSRLRIEEEIRVVRLQLEATERQRGGAEGELQALRARAEEAEAQKRQAQEEAERLRRQVQDESQRKRQAEVELASRVKAEAEAAREKQRALQALEELRLQAEEAERRLRQAEVERARQVQVALETAQRSAEAELQSKRASFAEKTAQLERSLQEEHVAVAQLREEAERRAQQQAEAERAREEAERELERWQLKANEALRLRLQAEEVAQQKSLAQAEAEKQKEEAEREARRRGKAEEQAVRQRELAEQELEKQRQLAEGTAQQRLAAEQELIRLRAETEQGEQQRQLLEEELARLQREAAAATQKRQELEAELAKVRAEMEVLLASKARAEEESRSTSEKSKQRLEAEAGRFRELAEEAARLRALAEEAKRQRQLAEEDAARQRAEAERVLAEKLAAIGEATRLKTEAEIALKEKEAENERLRRLAEDEAFQRRRLEEQAAQHKADIEERLAQLRKASDSELERQKGLVEDTLRQRRQVEEEILALKASFEKAAAGKAELELELGRIRSNAEDTLRSKEQAELEAARQRQLAAEEERRRREAEERVQKSLAAEEEAARQRKAALEEVERLKAKVEEARRLRERAEQESARQLQLAQEAAQKRLQAEEKAHAFAVQQKEQELQQTLQQEQSVLDQLRGEAEAARRAAEEAEEARVQAEREAAQSRRQVEEAERLKQSAEEQAQARAQAQAAAEKLRKEAEQEAARRAQAEQAALRQKQAADAEMEKHKKFAEQTLRQKAQVEQELTTLRLQLEETDHQKNLLDEELQRLKAEATEAARQRSQVEEELFSVRVQMEELSKLKARIEAENRALILRDKDNTQRFLQEEAEKMKQVAEEAARLSVAAQEAARLRQLAEEDLAQQRALAEKMLKEKMQAVQEATRLKAEAELLQQQKELAQEQARRLQEDKEQMAQQLAEETQGFQRTLEAERQRQLEMSAEAERLKLRVAEMSRAQARAEEDAQRFRKQAEEIGEKLHRTELATQEKVTLVQTLEIQRQQSDHDAERLREAIAELEREKEKLQQEAKLLQLKSEEMQTVQQEQLLQETQALQQSFLSEKDSLLQRERFIEQEKAKLEQLFQDEVAKAQQLREEQQRQQQQMEQERQRLVASMEEARRRQHEAEEGVRRKQEELQQLEQQRRQQEELLAEENQRLREQLQLLEEQHRAALAHSEEVTASQVAATKTLPNGRDALDGPAAEAEPEHSFDGLRRKVSAQRLQEAGILSAEELQRLAQGHTTVDELARREDVRHYLQGRSSIAGLLLKATNEKLSVYAALQRQLLSPGTALILLEAQAASGFLLDPVRNRRLTVNEAVKEGVVGPELHHKLLSAERAVTGYKDPYTGQQISLFQAMQKGLIVREHGIRLLEAQIATGGVIDPVHSHRVPVDVAYRRGYFDEEMNRVLADPSDDTKGFFDPNTHENLTYLQLLERCVEDPETGLCLLPLTDKAAKGGELVYTDSEARDVFEKATVSAPFGKFQGKTVTIWEIINSEYFTAEQRRDLLRQFRTGRITVEKIIKIIITVVEEQEQKGRLCFEGLRSLVPAAELLESRVIDRELYQQLQRGERSVRDVAEVDTVRRALRGANVIAGVWLEEAGQKLSIYNALKKDLLPSDMAVALLEAQAGTGHIIDPATSARLTVDEAVRAGLVGPEFHEKLLSAEKAVTGYRDPYTGQSVSLFQALKKGLIPREQGLRLLDAQLSTGGIVDPSKSHRVPLDVACARGCLDEETSRALSAPRADAKAYSDPSTGEPATYGELQQRCRPDQLTGLSLLPLSEKAARARQEELYSELQARETFEKTPVEVPVGGFKGRTVTVWELISSEYFTAEQRQELLRQFRTGKVTVEKVIKILITIVEEVETLRQERLSFSGLRAPVPASELLASGVLSRAQFEQLKDGKTTVKDLSELGSVRTLLQGSGCLAGIYLEDTKEKVSIYEAMRRGLLRATTAALLLEAQAATGFLVDPVRNQRLYVHEAVKAGVVGPELHEQLLSAEKAVTGYRDPYSGSTISLFQAMQKGLVLRQHGIRLLEAQIATGGIIDPVHSHRVPVDVAYQRGYFSEEMNRVLADPSDDTKGFFDPNTHENLTYRQLLERCVEDPETGLRLLPLKGAEKAEVVETTQVYTEEETRRAFEETQIDIPGGGSHGGSTMSLWEVMQSDLIPEEQRAQLMADFQAGRVTKERMIIIIIEIIEKTEIIRQQGLASYDYVRRRLTAEDLFEARIISLETYNLLREGTRSLREALEAESAWCYLYGTGSVAGVYLPGSRQTLSIYQALKKGLLSAEVARLLLEAQAATGFLLDPVKGERLTVDEAVRKGLVGPELHDRLLSAERAVTGYRDPYTEQTISLFQAMKKELIPTEEALRLLDAQLATGGIVDPRLGFHLPLEVAYQRGYLNKDTHDQLSEPSEVRSYVDPSTDERLSYTQLLRRCRRDDGTGQLLLPLSDARKLTFRGLRKQITMEELVRSQVMDEATALQLREGLTSIEEVTKNLQKFLEGTSCIAGVFVDATKERLSVYQAMKKGIIRPGTAFELLEAQAATGYVIDPIKGLKLTVEEAVRMGIVGPEFKDKLLSAERAVTGYKDPYSGKLISLFQAMKKGLILKDHGIRLLEAQIATGGIIDPEESHRLPVEVAYKRGLFDEEMNEILTDPSDDTKGFFDPNTEENLTYLQLMERCITDPQTGLCLLPLKEKKRERKTSSKSSVRKRRVVIVDPETGKEMSVYEAYRKGLIDHQTYLELSEQECEWEEITISSSDGVVKSMIIDRRSGRQYDIDDAIAKNLIDRSALDQYRAGTLSITEFADMLSGNAGGFRSRSSSVGSSSSYPISPAVSRTQLASWSDPTEETGPVAGILDTETLEKVSITEAMHRNLVDNITGQRLLEAQACTGGIIDPSTGERFPVTDAVNKGLVDKIMVDRINLAQKAFCGFEDPRTKTKMSAAQALKKGWLYYEAGQRFLEVQYLTGGLIEPDTPGRVPLDEALQRGTVDARTAQKLRDVGAYSKYLTCPKTKLKISYKDALDRSMVEEGTGLRLLEAAAQSTKGYYSPYSVSGSGSTAGSRTGSRTGSRAGSRRGSFDATGSGFSMTFSSSSYSSSGYGRRYASGSSASLGGPESAVA

SEQ ID NO: 58223 - protein, 4574 aa, Homo sapiens
MSGEDAEVRAVSEDVSNGSSGSPSPGDTLPWNLGKTQRSRRSGGGAGSNGSVLDPAERAVIRIADERDRVQKKTFTKWVNKHLIKAQRHISDLYEDLRDGHNLISLLEVLSGDSLPREKGRMRFHKLQNVQIALDYLRHRQVKLVNIRNDDIADGNPKLTLGLIWTIILHFQISDIQVSGQSEDMTAKEKLLLWSQRMVEGYQGLRCDNFTSSWRDGRLFNAIIHRHKPLLIDMNKVYRQTNLENLDQAFSVAERDLGVTRLLDPEDVDVPQPDEKSIITYVSSLYDAMPRVPDVQDGVRANELQLRWQEYRELVLLLLQWMRHHTAAFEERRFPSSFEEIEILWSQFLKFKEMELPAKEADKNRSKGIYQSLEGAVQAGQLKVPPGYHPLDVEKEWGKLHVAILEREKQLRSEFERLECLQRIVTKLQMEAGLCEEQLNQADALLQSDVRLLAAGKVPQRAGEVERDLDKADSMIRLLFNDVQTLKDGRHPQGEQMYRRVYRLHERLVAIRTEYNLRLKAGVAAPATQVAQVTLQSVQRRPELEDSTLRYLQDLLAWVEENQHRVDGAEWGVDLPSVEAQLGSHRGLHQSIEEFRAKIERARSDEGQLSPATRGAYRDCLGRLDLQYAKLLNSSKARLRSLESLHSFVAAATKELMWLNEKEEEEVGFDWSDRNTNMTAKKESYSALMRELELKEKKIKELQNAGDRLLREDHPARPTVESFQAALQTQWSWMLQLCCCIEAHLKENAAYFQFFSDVREAEGQLQKLQEALRRKYSCDRSATVTRLEDLLQDAQDEKEQLNEYKGHLSGLAKRAKAVVQLKPRHPAHPMRGRLPLLAVCDYKQVEVTVHKGDECQLVGPAQPSHWKVLSSSGSEAAVPSVCFLVPPPNQEAQEAVTRLEAQHQALVTLWHQLHVDMKSLLAWQSLRRDVQLIRSWSLATFRTLKPEEQRQALHSLELHYQAFLRDSQDAGGFGPEDRLMAEREYGSCSHHYQQLLQSLEQGAQEESRCQRCISELKDIRLQLEACETRTVHRLRLPLDKEPARECAQRIAEQQKAQAEVEGLGKGVARLSAEAEKVLALPEPSPAAPTLRSELELTLGKLEQVRSLSAIYLEKLKTISLVIRGTQGAEEVLRAHEEQLKEAQAVPATLPELEATKASLKKLRAQAEAQQPTFDALRDELRGAQEVGERLQQRHGERDVEVERWRERVAQLLERWQAVLAQTDVRQRELEQLGRQLRYYRESADPLGAWLQDARRRQEQIQAMPLADSQAVREQLRQEQALLEEIERHGEKVEECQRFAKQYINAIKDYELQLVTYKAQLEPVASPAKKPKVQSGSESVIQEYVDLRTHYSELTTLTSQYIKFISETLRRMEEEERLAEQQRAEERERLAEVEAALEKQRQLAEAHAQAKAQAEREAKELQQRMQEEVVRREEAAVDAQQQKRSIQEELQQLRQSSEAEIQAKARQAEAAERSRLRIEEEIRVVRLQLEATERQRGGAEGELQALRARAEEAEAQKRQAQEEAERLRRQVQDESQRKRQAEVELASRVKAEAEAAREKQRALQALEELRLQAEEAERRLRQAEVERARQVQVALETAQRSAEAELQSKRASFAEKTAQLERSLQEEHVAVAQLREEAERRAQQQAEAERAREEAERELERWQLKANEALRLRLQAEEVAQQKSLAQAEAEKQKEEAEREARRRGKAEEQAVRQRELAEQELEKQRQLAEGTAQQRLAAEQELIRLRAETEQGEQQRQLLEEELARLQREAAAATQKRQELEAELAKVRAEMEVLLASKARAEEESRSTSEKSKQRLEAEAGRFRELAEEAARLRALAEEAKRQRQLAEEDAARQRAEAERVLAEKLAAIGEATRLKTEAEIALKEKEAENERLRRLAEDEAFQRRRLEEQAAQHKADIEERLAQLRKASDSELERQKGLVEDTLRQRRQVEEEILALKASFEKAAAGKAELELELGRIRSNAEDTLRSKEQAELEAARQRQLAAEEERRRREAEERVQKSLAAEEEAARQRKAALEEVERLKAKVEEARRLRERAEQESARQLQLAQEAAQKRLQAEEKAHAFAVQQKEQELQQTLQQEQSVLDQLRGEAEAARRAAEEAEEARVQAEREAAQSRRQVEEAERLKQSAEEQAQARAQAQAAAEKLRKEAEQEAARRAQAEQAALRQKQAADAEMEKHKKFAEQTLRQKAQVEQELTTLRLQLEETDHQKNLLDEELQRLKAEATEAARQRSQVEEELFSVRVQMEELSKLKARIEAENRALILRDKDNTQRFLQEEAEKMKQVAEEAARLSVAAQEAARLRQLAEEDLAQQRALAEKMLKEKMQAVQEATRLKAEAELLQQQKELAQEQARRLQEDKEQMAQQLAEETQGFQRTLEAERQRQLEMSAEAERLKLRVAEMSRAQARAEEDAQRFRKQAEEIGEKLHRTELATQEKVTLVQTLEIQRQQSDHDAERLREAIAELEREKEKLQQEAKLLQLKSEEMQTVQQEQLLQETQALQQSFLSEKDSLLQRERFIEQEKAKLEQLFQDEVAKAQQLREEQQRQQQQMEQERQRLVASMEEARRRQHEAEEGVRRKQEELQQLEQQRRQQEELLAEENQRLREQLQLLEEQHRAALAHSEEVTASQVAATKTLPNGRDALDGPAAEAEPEHSFDGLRRKVSAQRLQEAGILSAEELQRLAQGHTTVDELARREDVRHYLQGRSSIAGLLLKATNEKLSVYAALQRQLLSPGTALILLEAQAASGFLLDPVRNRRLTVNEAVKEGVVGPELHHKLLSAERAVTGYKDPYTGQQISLFQAMQKGLIVREHGIRLLEAQIATGGVIDPVHSHRVPVDVAYRRGYFDEEMNRVLADPSDDTKGFFDPNTHENLTYLQLLERCVEDPETGLCLLPLTDKAAKGGELVYTDSEARDVFEKATVSAPFGKFQGKTVTIWEIINSEYFTAEQRRDLLRQFRTGRITVEKIIKIIITVVEEQEQKGRLCFEGLRSLVPAAELLESRVIDRELYQQLQRGERSVRDVAEVDTVRRALRGANVIAGVWLEEAGQKLSIYNALKKDLLPSDMAVALLEAQAGTGHIIDPATSARLTVDEAVRAGLVGPEFHEKLLSAEKAVTGYRDPYTGQSVSLFQALKKGLIPREQGLRLLDAQLSTGGIVDPSKSHRVPLDVACARGCLDEETSRALSAPRADAKAYSDPSTGEPATYGELQQRCRPDQLTGLSLLPLSEKAARARQEELYSELQARETFEKTPVEVPVGGFKGRTVTVWELISSEYFTAEQRQELLRQFRTGKVTVEKVIKILITIVEEVETLRQERLSFSGLRAPVPASELLASGVLSRAQFEQLKDGKTTVKDLSELGSVRTLLQGSGCLAGIYLEDTKEKVSIYEAMRRGLLRATTAALLLEAQAATGFLVDPVRNQRLYVHEAVKAGVVGPELHEQLLSAEKAVTGYRDPYSGSTISLFQAMQKGLVLRQHGIRLLEAQIATGGIIDPVHSHRVPVDVAYQRGYFSEEMNRVLADPSDDTKGFFDPNTHENLTYRQLLERCVEDPETGLRLLPLKGAEKAEVVETTQVYTEEETRRAFEETQIDIPGGGSHGGSTMSLWEVMQSDLIPEEQRAQLMADFQAGRVTKERMIIIIIEIIEKTEIIRQQGLASYDYVRRRLTAEDLFEARIISLETYNLLREGTRSLREALEAESAWCYLYGTGSVAGVYLPGSRQTLSIYQALKKGLLSAEVARLLLEAQAATGFLLDPVKGERLTVDEAVRKGLVGPELHDRLLSAERAVTGYRDPYTEQTISLFQAMKKELIPTEEALRLLDAQLATGGIVDPRLGFHLPLEVAYQRGYLNKDTHDQLSEPSEVRSYVDPSTDERLSYTQLLRRCRRDDGTGQLLLPLSDARKLTFRGLRKQITMEELVRSQVMDEATALQLREGLTSIEEVTKNLQKFLEGTSCIAGVFVDATKERLSVYQAMKKGIIRPGTAFELLEAQAATGYVIDPIKGLKLTVEEAVRMGIVGPEFKDKLLSAERAVTGYKDPYSGKLISLFQAMKKGLILKDHGIRLLEAQIATGGIIDPEESHRLPVEVAYKRGLFDEEMNEILTDPSDDTKGFFDPNTEENLTYLQLMERCITDPQTGLCLLPLKEKKRERKTSSKSSVRKRRVVIVDPETGKEMSVYEAYRKGLIDHQTYLELSEQECEWEEITISSSDGVVKSMIIDRRSGRQYDIDDAIAKNLIDRSALDQYRAGTLSITEFADMLSGNAGGFRSRSSSVGSSSSYPISPAVSRTQLASWSDPTEETGPVAGILDTETLEKVSITEAMHRNLVDNITGQRLLEAQACTGGIIDPSTGERFPVTDAVNKGLVDKIMVDRINLAQKAFCGFEDPRTKTKMSAAQALKKGWLYYEAGQRFLEVQYLTGGLIEPDTPGRVPLDEALQRGTVDARTAQKLRDVGAYSKYLTCPKTKLKISYKDALDRSMVEEGTGLRLLEAAAQSTKGYYSPYSVSGSGSTAGSRTGSRTGSRAGSRRGSFDATGSGFSMTFSSSSYSSSGYGRRYASGSSASLGGPESAVA

SEQ ID NO: 58224 - protein, 4570 aa, Homo sapiens
MSGEDAEVRAVSEDVSNGSSGSPSPGDTLPWNLGKTQRSRRSGGGAGSNGSVLDPAERAVIRIADERDRVQKKTFTKWVNKHLIKAQRHISDLYEDLRDGHNLISLLEVLSGDSLPREKGRMRFHKLQNVQIALDYLRHRQVKLVNIRNDDIADGNPKLTLGLIWTIILHFQISDIQVSGQSEDMTAKEKLLLWSQRMVEGYQGLRCDNFTSSWRDGRLFNAIIHRHKPLLIDMNKVYRQTNLENLDQAFSVAERDLGVTRLLDPEDVDVPQPDEKSIITYVSSLYDAMPRVPDVQDGELQLRWQEYRELVLLLLQWMRHHTAAFEERRFPSSFEEIEILWSQFLKFKEMELPAKEADKNRSKGIYQSLEGAVQAGQLKVPPGYHPLDVEKEWGKLHVAILEREKQLRSEFERLECLQRIVTKLQMEAGLCEEQLNQADALLQSDVRLLAAGKVPQRAGEVERDLDKADSMIRLLFNDVQTLKDGRHPQGEQMYRRVYRLHERLVAIRTEYNLRLKAGVAAPATQVAQVTLQSVQRRPELEDSTLRYLQDLLAWVEENQHRVDGAEWGVDLPSVEAQLGSHRGLHQSIEEFRAKIERARSDEGQLSPATRGAYRDCLGRLDLQYAKLLNSSKARLRSLESLHSFVAAATKELMWLNEKEEEEVGFDWSDRNTNMTAKKESYSALMRELELKEKKIKELQNAGDRLLREDHPARPTVESFQAALQTQWSWMLQLCCCIEAHLKENAAYFQFFSDVREAEGQLQKLQEALRRKYSCDRSATVTRLEDLLQDAQDEKEQLNEYKGHLSGLAKRAKAVVQLKPRHPAHPMRGRLPLLAVCDYKQVEVTVHKGDECQLVGPAQPSHWKVLSSSGSEAAVPSVCFLVPPPNQEAQEAVTRLEAQHQALVTLWHQLHVDMKSLLAWQSLRRDVQLIRSWSLATFRTLKPEEQRQALHSLELHYQAFLRDSQDAGGFGPEDRLMAEREYGSCSHHYQQLLQSLEQGAQEESRCQRCISELKDIRLQLEACETRTVHRLRLPLDKEPARECAQRIAEQQKAQAEVEGLGKGVARLSAEAEKVLALPEPSPAAPTLRSELELTLGKLEQVRSLSAIYLEKLKTISLVIRGTQGAEEVLRAHEEQLKEAQAVPATLPELEATKASLKKLRAQAEAQQPTFDALRDELRGAQEVGERLQQRHGERDVEVERWRERVAQLLERWQAVLAQTDVRQRELEQLGRQLRYYRESADPLGAWLQDARRRQEQIQAMPLADSQAVREQLRQEQALLEEIERHGEKVEECQRFAKQYINAIKDYELQLVTYKAQLEPVASPAKKPKVQSGSESVIQEYVDLRTHYSELTTLTSQYIKFISETLRRMEEEERLAEQQRAEERERLAEVEAALEKQRQLAEAHAQAKAQAEREAKELQQRMQEEVVRREEAAVDAQQQKRSIQEELQQLRQSSEAEIQAKARQAEAAERSRLRIEEEIRVVRLQLEATERQRGGAEGELQALRARAEEAEAQKRQAQEEAERLRRQVQDESQRKRQAEVELASRVKAEAEAAREKQRALQALEELRLQAEEAERRLRQAEVERARQVQVALETAQRSAEAELQSKRASFAEKTAQLERSLQEEHVAVAQLREEAERRAQQQAEAERAREEAERELERWQLKANEALRLRLQAEEVAQQKSLAQAEAEKQKEEAEREARRRGKAEEQAVRQRELAEQELEKQRQLAEGTAQQRLAAEQELIRLRAETEQGEQQRQLLEEELARLQREAAAATQKRQELEAELAKVRAEMEVLLASKARAEEESRSTSEKSKQRLEAEAGRFRELAEEAARLRALAEEAKRQRQLAEEDAARQRAEAERVLAEKLAAIGEATRLKTEAEIALKEKEAENERLRRLAEDEAFQRRRLEEQAAQHKADIEERLAQLRKASDSELERQKGLVEDTLRQRRQVEEEILALKASFEKAAAGKAELELELGRIRSNAEDTLRSKEQAELEAARQRQLAAEEERRRREAEERVQKSLAAEEEAARQRKAALEEVERLKAKVEEARRLRERAEQESARQLQLAQEAAQKRLQAEEKAHAFAVQQKEQELQQTLQQEQSVLDQLRGEAEAARRAAEEAEEARVQAEREAAQSRRQVEEAERLKQSAEEQAQARAQAQAAAEKLRKEAEQEAARRAQAEQAALRQKQAADAEMEKHKKFAEQTLRQKAQVEQELTTLRLQLEETDHQKNLLDEELQRLKAEATEAARQRSQVEEELFSVRVQMEELSKLKARIEAENRALILRDKDNTQRFLQEEAEKMKQVAEEAARLSVAAQEAARLRQLAEEDLAQQRALAEKMLKEKMQAVQEATRLKAEAELLQQQKELAQEQARRLQEDKEQMAQQLAEETQGFQRTLEAERQRQLEMSAEAERLKLRVAEMSRAQARAEEDAQRFRKQAEEIGEKLHRTELATQEKVTLVQTLEIQRQQSDHDAERLREAIAELEREKEKLQQEAKLLQLKSEEMQTVQQEQLLQETQALQQSFLSEKDSLLQRERFIEQEKAKLEQLFQDEVAKAQQLREEQQRQQQQMEQERQRLVASMEEARRRQHEAEEGVRRKQEELQQLEQQRRQQEELLAEENQRLREQLQLLEEQHRAALAHSEEVTASQVAATKTLPNGRDALDGPAAEAEPEHSFDGLRRKVSAQRLQEAGILSAEELQRLAQGHTTVDELARREDVRHYLQGRSSIAGLLLKATNEKLSVYAALQRQLLSPGTALILLEAQAASGFLLDPVRNRRLTVNEAVKEGVVGPELHHKLLSAERAVTGYKDPYTGQQISLFQAMQKGLIVREHGIRLLEAQIATGGVIDPVHSHRVPVDVAYRRGYFDEEMNRVLADPSDDTKGFFDPNTHENLTYLQLLERCVEDPETGLCLLPLTDKAAKGGELVYTDSEARDVFEKATVSAPFGKFQGKTVTIWEIINSEYFTAEQRRDLLRQFRTGRITVEKIIKIIITVVEEQEQKGRLCFEGLRSLVPAAELLESRVIDRELYQQLQRGERSVRDVAEVDTVRRALRGANVIAGVWLEEAGQKLSIYNALKKDLLPSDMAVALLEAQAGTGHIIDPATSARLTVDEAVRAGLVGPEFHEKLLSAEKAVTGYRDPYTGQSVSLFQALKKGLIPREQGLRLLDAQLSTGGIVDPSKSHRVPLDVACARGCLDEETSRALSAPRADAKAYSDPSTGEPATYGELQQRCRPDQLTGLSLLPLSEKAARARQEELYSELQARETFEKTPVEVPVGGFKGRTVTVWELISSEYFTAEQRQELLRQFRTGKVTVEKVIKILITIVEEVETLRQERLSFSGLRAPVPASELLASGVLSRAQFEQLKDGKTTVKDLSELGSVRTLLQGSGCLAGIYLEDTKEKVSIYEAMRRGLLRATTAALLLEAQAATGFLVDPVRNQRLYVHEAVKAGVVGPELHEQLLSAEKAVTGYRDPYSGSTISLFQAMQKGLVLRQHGIRLLEAQIATGGIIDPVHSHRVPVDVAYQRGYFSEEMNRVLADPSDDTKGFFDPNTHENLTYRQLLERCVEDPETGLRLLPLKGAEKAEVVETTQVYTEEETRRAFEETQIDIPGGGSHGGSTMSLWEVMQSDLIPEEQRAQLMADFQAGRVTKERMIIIIIEIIEKTEIIRQQGLASYDYVRRRLTAEDLFEARIISLETYNLLREGTRSLREALEAESAWCYLYGTGSVAGVYLPGSRQTLSIYQALKKGLLSAEVARLLLEAQAATGFLLDPVKGERLTVDEAVRKGLVGPELHDRLLSAERAVTGYRDPYTEQTISLFQAMKKELIPTEEALRLLDAQLATGGIVDPRLGFHLPLEVAYQRGYLNKDTHDQLSEPSEVRSYVDPSTDERLSYTQLLRRCRRDDGTGQLLLPLSDARKLTFRGLRKQITMEELVRSQVMDEATALQLREGLTSIEEVTKNLQKFLEGTSCIAGVFVDATKERLSVYQAMKKGIIRPGTAFELLEAQAATGYVIDPIKGLKLTVEEAVRMGIVGPEFKDKLLSAERAVTGYKDPYSGKLISLFQAMKKGLILKDHGIRLLEAQIATGGIIDPEESHRLPVEVAYKRGLFDEEMNEILTDPSDDTKGFFDPNTEENLTYLQLMERCITDPQTGLCLLPLKEKKRERKTSSKSSVRKRRVVIVDPETGKEMSVYEAYRKGLIDHQTYLELSEQECEWEEITISSSDGVVKSMIIDRRSGRQYDIDDAIAKNLIDRSALDQYRAGTLSITEFADMLSGNAGGFRSRSSSVGSSSSYPISPAVSRTQLASWSDPTEETGPVAGILDTETLEKVSITEAMHRNLVDNITGQRLLEAQACTGGIIDPSTGERFPVTDAVNKGLVDKIMVDRINLAQKAFCGFEDPRTKTKMSAAQALKKGWLYYEAGQRFLEVQYLTGGLIEPDTPGRVPLDEALQRGTVDARTAQKLRDVGAYSKYLTCPKTKLKISYKDALDRSMVEEGTGLRLLEAAAQSTKGYYSPYSVSGSGSTAGSRTGSRTGSRAGSRRGSFDATGSGFSMTFSSSSYSSSGYGRRYASGSSASLGGPESAVA

SEQ ID NO: 58225 - protein, 500 aa, Homo sapiens
MATVIPGDLSEVRDTQKVPSGKRKRGETKPRKNFPCQLCDKAFNSVEKLKVHSYSHTGERPYKCIQQDCTKAFVSKYKLQRHMATHSPEKTHKCNYCEKMFHRKDHLKNHLHTHDPNKETFKCEECGKNYNTKLGFKRHLALHAATSGDLTCKVCLQTFESTGVLLEHLKSHAGKSSGGVKEKKHQCEHCDRRFYTRKDVRRHMVVHTGRKDFLCQYCAQRFGRKDHLTRHMKKSHNQELLKVKTEPVDFLDPFTCNVSVPIKDELLPVMSLPSSELLSKPFTNTLQLNLYNTPFQSMQSSGSAHQMITTLPLGMTCPIDMDTVHPSHHLSFKYPFSSTSYAISIPEKEQPLKGEIESYLMELQGGVPSSSQDSQASSSSKLGLDPQIGSLDDGAGDLSLSKSSISISDPLNTPALDFSQLFNFIPLNGPPYNPLSVGSLGMSYSQEEAHSSVSQLPPQTQDLQDPANTIGLGSLHSLSAAFTSSLSTSTTLPRFHQAFQ

SEQ ID NO: 58226 - protein, 418 aa, Homo sapiens
MATHSPEKTHKCNYCEKMFHRKDHLKNHLHTHDPNKETFKCEECGKNYNTKLGFKRHLALHAATSGDLTCKVCLQTFESTGVLLEHLKSHAGKSSGGVKEKKHQCEHCDRRFYTRKDVRRHMVVHTGRKDFLCQYCAQRFGRKDHLTRHMKKSHNQELLKVKTEPVDFLDPFTCNVSVPIKDELLPVMSLPSSELLSKPFTNTLQLNLYNTPFQSMQSSGSAHQMITTLPLGMTCPIDMDTVHPSHHLSFKYPFSSTSYAISIPEKEQPLKGEIESYLMELQGGVPSSSQDSQASSSSKLGLDPQIGSLDDGAGDLSLSKSSISISDPLNTPALDFSQLFNFIPLNGPPYNPLSVGSLGMSYSQEEAHSSVSQLPPQTQDLQDPANTIGLGSLHSLSAAFTSSLSTSTTLPRFHQAFQ

SEQ ID NO: 58227 - protein, 500 aa, Homo sapiens; identical to SEQ ID NO: 58225

SEQ ID NO: 58228 - protein, 463 aa, Homo sapiens
MATFPCQLCGKTFLTLEKFTIHNYSHSRERPYKCVQPDCGKAFVSRYKLMRHMATHSPQKSHQCAHCEKTFNRKDHLKNHLQTHDPNKMAFGCEECGKKYNTMLGYKRHLALHAASSGDLTCGVCALELGSTEVLLDHLKAHAEEKPPSGTKEKKHQCDHCERCFYTRKDVRRHLVVHTGCKDFLCQFCAQRFGRKDHLTRHTKKTHSQELMKESLQTGDLLSTFHTISPSFQLKAAALPPFPLGASAQNGLASSLPAEVHSLTLSPPEQAAQPMQPLPESLASLHPSVSPGSPPPPLPNHKYNTTSTSYSPLASLPLKADTKGFCNISLFEDLPLQEPQSPQKLNPGFDLAKGNAGKVNLPKELPADAVNLTIPASLDLSPLLGFWQLPPPATQNTFGNSTLALGPGESLPHRLSCLGQQQQEPPLAMGTVSLGQLPLPPIPHVFSAGTGSAILPHFHHAFR

SEQ ID NO: 58229 - protein, 463 aa, Homo sapiens; identical to SEQ ID NO: 58228

SEQ ID NO: 58230 - protein, 463 aa, Homo sapiens; identical to SEQ ID NO: 58228

SEQ ID NO: 58231 - protein, 411 aa, Homo sapiens
MATHSPQKSHQCAHCEKTFNRKDHLKNHLQTHDPNKMAFGCEECGKKYNTMLGYKRHLALHAASSGDLTCGVCALELGSTEVLLDHLKAHAEEKPPSGTKEKKHQCDHCERCFYTRKDVRRHLVVHTGCKDFLCQFCAQRFGRKDHLTRHTKKTHSQELMKESLQTGDLLSTFHTISPSFQLKAAALPPFPLGASAQNGLASSLPAEVHSLTLSPPEQAAQPMQPLPESLASLHPSVSPGSPPPPLPNHKYNTTSTSYSPLASLPLKADTKGFCNISLFEDLPLQEPQSPQKLNPGFDLAKGNAGKVNLPKELPADAVNLTIPASLDLSPLLGFWQLPPPATQNTFGNSTLALGPGESLPHRLSCLGQQQQEPPLAMGTVSLGQLPLPPIPHVFSAGTGSAILPHFHHAFR

SEQ ID NO: 58232 - protein, 411 aa, Homo sapiens; identical to SEQ ID NO: 58231

SEQ ID NO: 58233 - protein, 463 aa, Homo sapiens; identical to SEQ ID NO: 58228

SEQ ID NO: 58234 - protein, 463 aa, Homo sapiens; identical to SEQ ID NO: 58228

SEQ ID NO: 58235 - protein, 176 aa, Homo sapiens
MATHSPQKSHQCAHCEKTFNRKDHLKNHLQTHDPNKMAFGCEECGKKYNTMLGYKRHLALHAASSGDLTCGVCALELGSTEVLLDHLKAHAEEKPPSGTKEKKHQCDHCERCFYTRKDVRRHLVVHTGCKDFLCQFCAQRFGRKDHLTRHTKKTHSQELMKESLQTGDLLSTFHTI

SEQ ID NO: 58236 - protein, 463 aa, Homo sapiens; identical to SEQ ID NO: 58228

SEQ ID NO: 58237 - protein, 411 aa, Homo sapiens; identical to SEQ ID NO: 58231

SEQ ID NO: 58238 - protein, 463 aa, Homo sapiens; identical to SEQ ID NO: 58228

SEQ ID NO: 58239 - protein, 252 aa, Homo sapiens
MKESLQTGDLLSTFHTISPSFQLKAAALPPFPLGASAQNGLASSLPAEVHSLTLSPPEQAAQPMQPLPESLASLHPSVSPGSPPPPLPNHKYNTTSTSYSPLASLPLKADTKGFCNISLFEDLPLQEPQSPQKLNPGFDLAKGNAGKVNLPKELPADAVNLTIPASLDLSPLLGFWQLPPPATQNTFGNSTLALGPGESLPHRLSCLGQQQQEPPLAMGTVSLGQLPLPPIPHVFSAGTGSAILPHFHHAFR

SEQ ID NO: 58240 - protein, 496 aa, Homo sapiens
MTTFFTSVPPWIQDAKQEEEVGWKLVPRPRGREAESQVKCQCEISGTPFSNGEKLRPHSLPQPEQRPYSCPQLHCGKAFASKYKLYRHMATHSAQKPHQCMYCDKMFHRKDHLRNHLQTHDPNKEALHCSECGKNYNTKLGYRRHLAMHAASSGDLSCKVCLQTFESTQALLEHLKAHSRRVAGGAKEKKHPCDHCDRRFYTRKDVRRHLVVHTGRKDFLCQYCAQRFGRKDHLTRHVKKSHSQELLKIKTEPVDMLGLLSCSSTVSVKEELSPVLCMASRDVMGTKAFPGMLPMGMYGAHIPTMPSTGVPHSLVHNTLPMGMSYPLESSPISSPAQLPPKYQLGSTSYLPDKLPKVEVDSFLAELPGSLSLSSAEPQPASPQPAAAAALLDEALLAKSPANLSEALCAANVDFSHLLGFLPLNLPPCNPPGATGGLVMGYSQAEAQPLLTTLQAQPQDSPGAGGPLNFGPLHSLPPVFTSGLSSTTLPRFHQAFQ

SEQ ID NO: 58241 - protein, 168 aa, Homo sapiens
MQAQQYQQQRRKFAAAFLAFIFILAAVDTAEAGKKEKPEKKVKKSDCGEWQWSVCVPTSGDCGLGTREGTRTGAECKQTMKTQRCKIPCNWKKQFGAECKYQFQAWGECDLNTALKTRTGSLKRALHNAECQKTVTISKPCGKLTKPKPQAESKKKKKEGKKQEKMLD

SEQ ID NO: 58242 - protein, 505 aa, Homo sapiens
MVEEVQKHSVHTLVFRSLKRTHDMFVADNGKPVPLDEESHKRKMAIKLRNEYGPVLHMPTSKENLKEKGPQNATDSYVHKQYPANQGQEVEYFVAGVALTADTKIQRMPSESAAQSLAVALPLQTKADANRTAPSGSEYRHPGASDRPQPTAMNSIVMETGNTKNSALMAKKAPTMPKPQWHPPWKLYRVISGHLGWVRCIAVEPGNQWFVTGSADRTIKIWDLASGKLKLSLTGHISTVRGVIVSTRSPYLFSCGEDKQVKCWDLEYNKVIRHYHGHLSAVYGLDLHPTIDVLVTCSRDSTARIWDVRTKASVHTLSGHTNAVATVRCQAAEPQIITGSHDTTIRLWDLVAGKTRVTLTNHKKSVRAVVLHPRHYTFASGSPDNIKQWKFPDGSFIQNLSGHNAIINTLTVNSDGVLVSGADNGTMHLWDWRTGYNFQRVHAAVQPGSLDSESGIFACAFDQSESRLLTAEADKTIKVYREDDTATEETHPVSWKPEIIKRKRF

SEQ ID NO: 58243 - protein, 514 aa, Homo sapiens
MICEVQKHSVHTLVFRSLKRTHDMFVADNGKPVPLDEESHKRKMAIKLRNEYGPVLHMPTSKENLKEKGPQNATDSYVHKQYPANQGQEVEYFVAGTHPYPPGPGVALTADTKIQRMPSESAAQSLAVALPLQTKADANRTAPSGSEYRHPGASDRPQPTAMNSIVMETGNTKNSALMAKKAPTMPKPQWHPPWKLYRVISGHLGWVRCIAVEPGNQWFVTGSADRTIKIWDLASGKLKLSLTGHISTVRGVIVSTRSPYLFSCGEDKQVKCWDLEYNKVIRHYHGHLSAVYGLDLHPTIDVLVTCSRDSTARIWDVRTKASVHTLSGHTNAVATVRCQAAEPQIITGSHDTTIRLWDLVAGKTRVTLTNHKKSVRAVVLHPRHYTFASGSPDNIKQWKFPDGSFIQNLSGHNAIINTLTVNSDGVLVSGADNGTMHLWDWRTGYNFQRVHAAVQPGSLDSESGIFACAFDQSESRLLTAEADKTIKVYREDDTATEETHPVSWKPEIIKRKRF

SEQ ID NO: 58244 - protein, 514 aa, Homo sapiens
MVEEVQKHSVHTLVFRSLKRTHDMFVADNGKPVPLDEESHKRKMAIKLRNEYGPVLHMPTSKENLKEKGPQNATDSYVHKQYPANQGQEVEYFVAGTHPYPPGPGVALTADTKIQRMPSESAAQSLAVALPLQTKADANRTAPSGSEYRHPGASDRPQPTAMNSIVMETGNTKNSALMAKKAPTMPKPQWHPPWKLYRVISGHLGWVRCIAVEPGNQWFVTGSADRTIKIWDLASGKLKLSLTGHISTVRGVIVSTRSPYLFSCGEDKQVKCWDLEYNKVIRHYHGHLSAVYGLDLHPTIDVLVTCSRDSTARIWDVRTKASVHTLSGHTNAVATVRCQAAEPQIITGSHDTTIRLWDLVAGKTRVTLTNHKKSVRAVVLHPRHYTFASGSPDNIKQWKFPDGSFIQNLSGHNAIINTLTVNSDGVLVSGADNGTMHLWDWRTGYNFQRVHAAVQPGSLDSESGIFACAFDQSESRLLTAEADKTIKVYREDDTATEETHPVSWKPEIIKRKRF

SEQ ID NO: 58245 - protein, 1873 aa, Homo sapiens
MWAEAGLPRAGGGSQPPFRTFSASDWGLTHLVVHEQTGEVYVGAVNRIYKLSGNLTLLRAHVTGPVEDNEKCYPPPSVQSCPHGLGSTDNVNKLLLLDYAANRLLACGSASQGICQFLRLDDLFKLGEPHHRKEHYLSSVQEAGSMAGVLIAGPPGQGQAKLFVGTPIDGKSEYFPTLSSRRLMANEEDADMFGFVYQDEFVSSQLKIPSDTLSKFPAFDIYYVYSFRSEQFVYYLTLQLDTQLTSPDAAGEHFFTSKIVRLCVDDPKFYSYVEFPIGCEQAGVEYRLVQDAYLSRPGRALAHQLGLAEDEDVLFTVFAQGQKNRVKPPKESALCLFTLRAIKEKIKERIQSCYRGEGKLSLPWLLNKELGCINSPLQIDDDFCGQDFNQPLGGTVTIEGTPLFVDKDDGLTAVAAYDYRGRTVVFAGTRSGRIRKILVDLSNPGGRPALAYESVVAQEGSPILRDLVLSPNHQYLYAMTEKQVTRVPVESCVQYTSCELCLGSRDPHCGWCVLHSICSRRDACERADEPQRFAADLLQCVQLTVQPRNVSVTMSQVPLVLQAWNVPDLSAGVNCSFEDFTESESVLEDGRIHCRSPSAREVAPITRGQGDQRVVKLYLKSKETGKKFASVDFVFYNCSVHQSCLSCVNGSFPCHWCKYRHVCTHNVADCAFLEGRVNVSEDCPQILPSTQIYVPVGVVKPITLAARNLPQPQSGQRGYECLFHIPGSPARVTALRFNSSSLQCQNSSYSYEGNDVSDLPVNLSVVWNGNFVIDNPQNIQAHLYKCPALRESCGLCLKADPRFECGWCVAERRCSLRHHCAADTPASWMHARHGSSRCTDPKILKLSPETGPRQGGTRLTITGENLGLRFEDVRLGVRVGKVLCSPVESEYISAEQIVCEIGDASSVRAHDALVEVCVRDCSPHYRALSPKRFTFVTPTFYRVSPSRGPLSGGTWIGIEGSHLNAGSDVAVSVGGRPCSFSWRNSREIRCLTPPGQSPGSAPIIININRAQLTNPEVKYNYTEDPTILRIDPEWSINSGGTLLTVTGTNLATVREPRIRAKYGGIERENGCLVYNDTTMVCRAPSVANPVRSPPELGERPDELGFVMDNVRSLLVLNSTSFLYYPDPVLEPLSPTGLLELKPSSPLILKGRNLLPPAPGNSRLNYTVLIGSTPCTLTVSETQLLCEAPNLTGQHKVTVRAGGFEFSPGTLQVYSDSLLTLPAIVGIGGGGGLLLLVIVAVLIAYKRKSRDADRTLKRLQLQMDNLESRVALECKEAFAELQTDIHELTNDLDGAGIPFLDYRTYAMRVLFPGIEDHPVLKEMEVQANVEKSLTLFGQLLTKKHFLLTFIRTLEAQRSFSMRDRGNVASLIMTALQGEMEYATGVLKQLLSDLIEKNLESKNHPKLLLRRTESVAEKMLTNWFTFLLYKFLKECAGEPLFMLYCAIKQQMEKGPIDAITGEARYSLSEDKLIRQQIDYKTLTLNCVNPENENAPEVPVKGLDCDTVTQAKEKLLDAAYKGVPYSQRPKAADMDLEWRQGRMARIILQDEDVTTKIDNDWKRLNTLAHYQVTDGSSVALVPKQTSAYNISNSSTFTKSLSRYESMLRTASSPDSLRSRTPMITPDLESGTKLWHLVKNHDHLDQREGDRGSKMVSEIYLTRLLATKGTLQKFVDDLFETIFSTAHRGSALPLAIKYMFDFLDEQADKHQIHDADVRHTWKSNCLPLRFWVNVIKNPQFVFDIHKNSITDACLSVVAQTFMDSCSTSEHKLGKDSPSNKLLYAKDIPNYKSWVERYYADIAKMPAISDQDMSAYLAEQSRLHLSQFNSMSALHEIYSYITKYKDEILAALEKDEQARRQRLRSKLEQVVDTMALSS

SEQ ID NO: 58246 - protein, 1896 aa, Homo sapiens
MPLPPRSLQVLLLLLLLLLLLPGMWAEAGLPRAGGGSQPPFRTFSASDWGLTHLVVHEQTGEVYVGAVNRIYKLSGNLTLLRAHVTGPVEDNEKCYPPPSVQSCPHGLGSTDNVNKLLLLDYAANRLLACGSASQGICQFLRLDDLFKLGEPHHRKEHYLSSVQEAGSMAGVLIAGPPGQGQAKLFVGTPIDGKSEYFPTLSSRRLMANEEDADMFGFVYQDEFVSSQLKIPSDTLSKFPAFDIYYVYSFRSEQFVYYLTLQLDTQLTSPDAAGEHFFTSKIVRLCVDDPKFYSYVEFPIGCEQAGVEYRLVQDAYLSRPGRALAHQLGLAEDEDVLFTVFAQGQKNRVKPPKESALCLFTLRAIKEKIKERIQSCYRGEGKLSLPWLLNKELGCINSPLQIDDDFCGQDFNQPLGGTVTIEGTPLFVDKDDGLTAVAAYDYRGRTVVFAGTRSGRIRKILVDLSNPGGRPALAYESVVAQEGSPILRDLVLSPNHQYLYAMTEKQVTRVPVESCVQYTSCELCLGSRDPHCGWCVLHSICSRRDACERADEPQRFAADLLQCVQLTVQPRNVSVTMSQVPLVLQAWNVPDLSAGVNCSFEDFTESESVLEDGRIHCRSPSAREVAPITRGQGDQRVVKLYLKSKETGKKFASVDFVFYNCSVHQSCLSCVNGSFPCHWCKYRHVCTHNVADCAFLEGRVNVSEDCPQILPSTQIYVPVGVVKPITLAARNLPQPQSGQRGYECLFHIPGSPARVTALRFNSSSLQCQNSSYSYEGNDVSDLPVNLSVVWNGNFVIDNPQNIQAHLYKCPALRESCGLCLKADPRFECGWCVAERRCSLRHHCAADTPASWMHARHGSSRCTDPKILKLSPETGPRQGGTRLTITGENLGLRFEDVRLGVRVGKVLCSPVESEYISAEQIVCEIGDASSVRAHDALVEVCVRDCSPHYRALSPKRFTFVTPTFYRVSPSRGPLSGGTWIGIEGSHLNAGSDVAVSVGGRPCSFSWRNSREIRCLTPPGQSPGSAPIIININRAQLTNPEVKYNYTEDPTILRIDPEWSINSGGTLLTVTGTNLATVREPRIRAKYGGIERENGCLVYNDTTMVCRAPSVANPVRSPPELGERPDELGFVMDNVRSLLVLNSTSFLYYPDPVLEPLSPTGLLELKPSSPLILKGRNLLPPAPGNSRLNYTVLIGSTPCTLTVSETQLLCEAPNLTGQHKVTVRAGGFEFSPGTLQVYSDSLLTLPAIVGIGGGGGLLLLVIVAVLIAYKRKSRDADRTLKRLQLQMDNLESRVALECKEAFAELQTDIHELTNDLDGAGIPFLDYRTYAMRVLFPGIEDHPVLKEMEVQANVEKSLTLFGQLLTKKHFLLTFIRTLEAQRSFSMRDRGNVASLIMTALQGEMEYATGVLKQLLSDLIEKNLESKNHPKLLLRRTESVAEKMLTNWFTFLLYKFLKECAGEPLFMLYCAIKQQMEKGPIDAITGEARYSLSEDKLIRQQIDYKTLTLNCVNPENENAPEVPVKGLDCDTVTQAKEKLLDAAYKGVPYSQRPKAADMDLEWRQGRMARIILQDEDVTTKIDNDWKRLNTLAHYQVTDGSSVALVPKQTSAYNISNSSTFTKSLSRYESMLRTASSPDSLRSRTPMITPDLESGTKLWHLVKNHDHLDQREGDRGSKMVSEIYLTRLLATKGTLQKFVDDLFETIFSTAHRGSALPLAIKYMFDFLDEQADKHQIHDADVRHTWKSNCLPLRFWVNVIKNPQFVFDIHKNSITDACLSVVAQTFMDSCSTSEHKLGKDSPSNKLLYAKDIPNYKSWVERYYADIAKMPAISDQDMSAYLAEQSRLHLSQFNSMSALHEIYSYITKYKDEILAALEKDEQARRQRLRSKLEQVVDTMALSS

SEQ ID NO: 58247 - protein, 1894 aa, Homo sapiens
MEQRRPWPRALEVDSRSVVLLSVVWVLLAPPAAGMPQFSTFHSENRDWTFNHLTVHQGTGAVYVGAINRVYKLTGNLTIQVAHKTGPEEDNKSCYPPLIVQPCSEVLTLTNNVNKLLIIDYSENRLLACGSLYQGVCKLLRLDDLFILVEPSHKKEHYLSSVNKTGTMYGVIVRSEGEDGKLFIGTAVDGKQDYFPTLSSRKLPRDPESSAMLDYELHSDFVSSLIKIPSDTLALVSHFDIFYIYGFASGGFVYFLTVQPETPEGVAINSAGDLFYTSRIVRLCKDDPKFHSYVSLPFGCTRAGVEYRLLQAAYLAKPGDSLAQAFNITSQDDVLFAIFSKGQKQYHHPPDDSALCAFPIRAINLQIKERLQSCYQGEGNLELNWLLGKDVQCTKAPVPIDDNFCGLDINQPLGGSTPVEGLTLYTTSRDRMTSVASYVYNGYSVVFVGTKSGKLKKIRADGPPHGGVQYEMVSVLKDGSPILRDMAFSIDQRYLYVMSERQVTRVPVESCEQYTTCGECLSSGDPHCGWCALHNMCSRRDKCQQAWEPNRFAASISQCVSLAVHPSSISVSEHSRLLSLVVSDAPDLSAGIACAFGNLTEVEGQVSGSQVICISPGPKDVPVIPLDQDWFGLELQLRSKETGKIFVSTEFKFYNCSAHQLCLSCVNSAFRCHWCKYRNLCTHDPTTCSFQEGRINISEDCPQLVPTEEILIPVGEVKPITLKARNLPQPQSGQRGYECVLNIQGAIHRVPALRFNSSSVQCQNSSYQYDGMDISNLAVDFAVVWNGNFIIDNPQDLKVHLYKCAAQRESCGLCLKADRKFECGWCSGERRCTLHQHCTSPSSPWLDWSSHNVKCSNPQITEILTVSGPPEGGTRVTIHGVNLGLDFSEIAHHVQVAGVPCTPLPGEYIIAEQIVCEMGHALVGTTSGPVRLCIGECKPEFMTKSHQQYTFVNPSVLSLNPIRGPESGGTMVTITGHYLGAGSSVAVYLGNQTCEFYGRSMSEIVCVSPPSSNGLGPVPVSVSVDRAHVDSNLQFEYIDDPRVQRIEPEWSIASGHTPLTITGFNLDVIQEPRIRVKFNGKESVNVCKVVNTTTLTCLAPSLTTDYRPGLDTVERPDEFGFVFNNVQSLLIYNDTKFIYYPNPTFELLSPTGVLDQKPGSPIILKGKNLCPPASGGAKLNYTVLIGETPCAVTVSETQLLCEPPNLTGQHKVMVHVGGMVFSPGSVSVISDSLLTLPAIVSIAAGGSLLLIIVIIVLIAYKRKSRENDLTLKRLQMQMDNLESRVALECKEAFAELQTDINELTSDLDRSGIPYLDYRTYAMRVLFPGIEDHPVLRELEVQGNGQQHVEKALKLFAQLINNKVFLLTFIRTLELQRSFSMRDRGNVASLIMTGLQGRLEYATDVLKQLLSDLIDKNLENKNHPKLLLRRTESVAEKMLTNWFAFLLHKFLKECAGEPLFMLYCAIKQQMEKGPIDAITGEARYSLSEDKLIRQQIEYKTLILNCVNPDNENSPEIPVKVLNCDTITQVKEKILDAVYKNVPYSQRPRAVDMDLEWRQGRIARVVLQDEDITTKIEGDWKRLNTLMHYQVSDRSVVALVPKQTSSYNIPASASISRTSISRYDSSFRYTGSPDSLRSRAPMITPDLESGVKVWHLVKNHDHGDQKEGDRGSKMVSEIYLTRLLATKGTLQKFVDDLFETLFSTVHRGSALPLAIKYMFDFLDEQADRHSIHDTDVRHTWKSNCLPLRFWVNVIKNPQFVFDIHKGSITDACLSVVAQTFMDSCSTSEHRLGKDSPSNKLLYAKDIPSYKSWVERYYADIAKLPAISDQDMNAYLAEQSRLHAVEFNMLSALNEIYSYVSKYSEELIGALEQDEQARRQRLAYKVEQLINAMSIES

SEQ ID NO: 58248 - protein, 1894 aa, Homo sapiens
MKAMPWNWTCLLSHLLMVGMGSSTLLTRQPAPLSQKQRSFVTFRGEPAEGFNHLVVDERTGHIYLGAVNRIYKLSSDLKVLVTHETGPDEDNPKCYPPRIVQTCNEPLTTTNNVNKMLLIDYKENRLIACGSLYQGICKLLRLEDLFKLGEPYHKKEHYLSGVNESGSVFGVIVSYSNLDDKLFIATAVDGKPEYFPTISSRKLTKNSEADGMFAYVFHDEFVASMIKIPSDTFTIIPDFDIYYVYGFSSGNFVYFLTLQPEMVSPPGSTTKEQVYTSKLVRLCKEDTAFNSYVEVPIGCERSGVEYRLLQAAYLSKAGAVLGRTLGVHPDDDLLFTVFSKGQKRKMKSLDESALCIFILKQINDRIKERLQSCYRGEGTLDLAWLKVKDIPCSSALLTIDDNFCGLDMNAPLGVSDMVRGIPVFTEDRDRMTSVIAYVYKNHSLAFVGTKSGKLKKIRVDGPRGNALQYETVQVVDPGPVLRDMAFSKDHEQLYIMSERQLTRVPVESCGQYQSCGECLGSGDPHCGWCVLHNTCTRKERCERSKEPRRFASEMKQCVRLTVHPNNISVSQYNVLLVLETYNVPELSAGVNCTFEDLSEMDGLVVGNQIQCYSPAAKEVPRIITENGDHHVVQLQLKSKETGMTFASTSFVFYNCSVHNSCLSCVESPYRCHWCKYRHVCTHDPKTCSFQEGRVKLPEDCPQLLRVDKILVPVEVIKPITLKAKNLPQPQSGQRGYECILNIQGSEQRVPALRFNSSSVQCQNTSYSYEGMEINNLPVELTVVWNGHFNIDNPAQNKVHLYKCGAMRESCGLCLKADPDFACGWCQGPGQCTLRQHCPAQESQWLELSGAKSKCTNPRITEIIPVTGPREGGTKVTIRGENLGLEFRDIASHVKVAGVECSPLVDGYIPAEQIVCEMGEAKPSQHAGFVEICVAVCRPEFMARSSQLYYFMTLTLSDLKPSRGPMSGGTQVTITGTNLNAGSNVVVMFGKQPCLFHRRSPSYIVCNTTSSDEVLEMKVSVQVDRAKIHQDLVFQYVEDPTIVRIEPEWSIVSGNTPIAVWGTHLDLIQNPQIRAKHGGKEHINICEVLNATEMTCQAPALALGPDHQSDLTERPEEFGFILDNVQSLLILNKTNFTYYPNPVFEAFGPSGILELKPGTPIILKGKNLIPPVAGGNVKLNYTVLVGEKPCTVTVSDVQLLCESPNLIGRHKVMARVGGMEYSPGMVYIAPDSPLSLPAIVSIAVAGGLLIIFIVAVLIAYKRKSRESDLTLKRLQMQMDNLESRVALECKEAFAELQTDIHELTSDLDGAGIPFLDYRTYTMRVLFPGIEDHPVLRDLEVPGYRQERVEKGLKLFAQLINNKVFLLSFIRTLESQRSFSMRDRGNVASLIMTVLQSKLEYATDVLKQLLADLIDKNLESKNHPKLLLRRTESVAEKMLTNWFTFLLYKFLKECAGEPLFSLFCAIKQQMEKGPIDAITGEARYSLSEDKLIRQQIDYKTLVLSCVSPDNANSPEVPVKILNCDTITQVKEKILDAIFKNVPCSHRPKAADMDLEWRQGSGARMILQDEDITTKIENDWKRLNTLAHYQVPDGSVVALVSKQVTAYNAVNNSTVSRTSASKYENMIRYTGSPDSLRSRTPMITPDLESGVKMWHLVKNHEHGDQKEGDRGSKMVSEIYLTRLLATKGTLQKFVDDLFETIFSTAHRGSALPLAIKYMFDFLDEQADKHGIHDPHVRHTWKSNCLPLRFWVNMIKNPQFVFDIHKNSITDACLSVVAQTFMDSCSTSEHRLGKDSPSNKLLYAKDIPSYKNWVERYYSDIGKMPAISDQDMNAYLAEQSRMHMNEFNTMSALSEIFSYVGKYSEEILGPLDHDDQCGKQKLAYKLEQVITLMSLDS

SEQ ID NO: 58249 - protein, 1894 aa, Homo sapiens; identical to SEQ ID NO: 58248

SEQ ID NO: 58250 - protein, 522 aa, Homo sapiens
MKAMPWNWTCLLSHLLMVGMGSSTLLTRQPAPLSQKQRSFVTFRGEPAEGFNHLVVDERTGHIYLGAVNRIYKLSSDLKVLVTHETGPDEDNPKCYPPRIVQTCNEPLTTTNNVNKMLLIDYKENRLIACGSLYQGICKLLRLEDLFKLGEPYHKKEHYLSGVNESGSVFGVIVSYSNLDDKLFIATAVDGKPEYFPTISSRKLTKNSEADGMFAYVFHDEFVASMIKIPSDTFTIIPDFDIYYVYGFSSGNFVYFLTLQPEMVSPPGSTTKEQVYTSKLVRLCKEDTAFNSYVEVPIGCERSGVEYRLLQAAYLSKAGAVLGRTLGVHPDDDLLFTVFSKGQKRKMKSLDESALCIFILKQINDRIKERLQSCYRGEGTLDLAWLKVKDIPCSSALLTIDDNFCGLDMNAPLGVSDMVRGIPVFTEDRDRMTSVIAYVYKNHSLAFVGTKSGKLKKSFGTGPQGGITQEWIGVEGDPPGANIASQEQMLCVYLQCSSHKAISDQRVQPLLCCFLNVPGNSS

SEQ ID NO: 58251 - protein, 492 aa, Homo sapiens
MKAMPWNWTCLLSHLLMVGMGSSTLLTRQPAPLSQKQRSFVTFRGEPAEGFNHLVVDERTGHIYLGAVNRIYKLSSDLKVLVTHETGPDEDNPKCYPPRIVQTCNEPLTTTNNVNKMLLIDYKENRLIACGSLYQGICKLLRLEDLFKLGEPYHKKEHYLSGVNESGSVFGVIVSYSNLDDKLFIATAVDGKPEYFPTISSRKLTKNSEADGMFAYVFHDEFVASMIKIPSDTFTIIPDFDIYYVYGFSSGNFVYFLTLQPEMVSPPGSTTKEQVYTSKLVRLCKEDTAFNSYVEVPIGCERSGVEYRLLQAAYLSKAGAVLGRTLGVHPDDDLLFTVFSKGQKRKMKSLDESALCIFILKQINDRIKERLQSCYRGEGTLDLAWLKVKDIPCSSALLTIDDNFCGLDMNAPLGVSDMVRGIPVFTEDRDRMTSVIAYVYKNHSLAFVGTKSGKLKKMPGTSLCPTLELQTGPRSHRATVTLELLFSSCSSN

SEQ ID NO: 58252 - protein, 1838 aa, Homo sapiens
MALQLWALTLLGLLGAGASLRPRKLDFFRSEKELNHLAVDEASGVVYLGAVNALYQLDAKLQLEQQVATGPALDNKKCTPPIEASQCHEAEMTDNVNQLLLLDPPRKRLVECGSLFKGICALRALSNISLRLFYEDGSGEKSFVASNDEGVATVGLVSSTGPGGDRVLFVGKGNGPHDNGIIVSTRLLDRTDSREAFEAYTDHATYKAGYLSTNTQQFVAAFEDGPYVFFVFNQQDKHPARNRTLLARMCREDPNYYSYLEMDLQCRDPDIHAAAFGTCLAASVAAPGSGRVLYAVFSRDSRSSGGPGAGLCLFPLDKVHAKMEANRNACYTGTREARDIFYKPFHGDIQCGGHAPGSSKSFPCGSEHLPYPLGSRDGLRGTAVLQRGGLNLTAVTVAAENNHTVAFLGTSDGRILKVYLTPDGTSSEYDSILVEINKRVKRDLVLSGDLGSLYAMTQDKVFRLPVQECLSYPTCTQCRDSQDPYCGWCVVEGRCTRKAECPRAEEASHWLWSRSKSCVAVTSAQPQNMSRRAQGEVQLTVSPLPALSEEDELLCLFGESPPHPARVEGEAVICNSPSSIPVTPPGQDHVAVTIQLLLRRGNIFLTSYQYPFYDCRQAMSLEENLPCISCVSNRWTCQWDLRYHECREASPNPEDGIVRAHMEDSCPQFLGPSPLVIPMNHETDVNFQGKNLDTVKGSSLHVGSDLLKFMEPVTMQESGTFAFRTPKLSHDANETLPLHLYVKSYGKNIDSKLHVTLYNCSFGRSDCSLCRAANPDYRCAWCGGQSRCVYEALCNTTSECPPPVITRIQPETGPLGGGIRITILGSNLGVQAGDIQRISVAGRNCSFQPERYSVSTRIVCVIEAAETPFTGGVEVDVFGKLGRSPPNVQFTFQQPKPLSVEPQQGPQAGGTTLTIHGTHLDTGSQEDVRVTLNGVPCKVTKFGAQLQCVTGPQATRGQMLLEVSYGGSPVPNPGIFFTYRENPVLRAFEPLRSFASGGRSINVTGQGFSLIQRFAMVVIAEPLQSWQPPREAESLQPMTVVGTDYVFHNDTKVVFLSPAVPEEPEAYNLTVLIEMDGHRALLRTEAGAFEYVPDPTFENFTGGVKKQVNKLIHARGTNLNKAMTLQEAEAFVGAERCTMKTLTETDLYCEPPEVQPPPKRRQKRDTTHNLPEFIVKFGSREWVLGRVEYDTRVSDVPLSLILPLVIVPMVVVIAVSVYCYWRKSQQAEREYEKIKSQLEGLEESVRDRCKKEFTDLMIEMEDQTNDVHEAGIPVLDYKTYTDRVFFLPSKDGDKDVMITGKLDIPEPRRPVVEQALYQFSNLLNSKSFLINFIHTLENQREFSARAKVYFASLLTVALHGKLEYYTDIMHTLFLELLEQYVVAKNPKLMLRRSETVVERMLSNWMSICLYQYLKDSAGEPLYKLFKAIKHQVEKGPVDAVQKKAKYTLNDTGLLGDDVEYAPLTVSVIVQDEGVDAIPVKVLNCDTISQVKEKIIDQVYRGQPCSCWPRPDSVVLEWRPGSTAQILSDLDLTSQREGRWKRVNTLMHYNVRDGATLILSKVGVSQQPEDSQQDLPGERHALLEEENRVWHLVRPTDEVDEGKSKRGSVKEKERTKAITEIYLTRLLSVKGTLQQFVDNFFQSVLAPGHAVPPAVKYFFDFLDEQAEKHNIQDEDTIHIWKTNSLPLRFWVNILKNPHFIFDVHVHEVVDASLSVIAQTFMDACTRTEHKLSRDSPSNKLLYAKEISTYKKMVEDYYKGIRQMVQVSDQDMNTHLAEISRAHTDSLNTLVALHQLYQYTQKYYDEIINALEEDPAAQKMQLAFRLQQIAAALENKVTDL

SEQ ID NO: 58253 - protein, 347 aa, Homo sapiens [sequence omitted]

SEQ ID NO: 58254 - protein, 160 aa, Homo sapiens
GPDVTAGGPVEARQHPYALQCPGWSHPHPVQGGGLPAAGGQPAGPAWGAPCPPGGGEPGVAPGAADRRGGRGQVQERQREREGADEGHHRDLPDAAALSQGHTAAVCGQLLPERAGLGTRCHLQSSTSSTSWTSRQRSTTSRMKTPSTSGRRTAYRSGSG

SEQ ID NO: 58255 - protein, 522 aa, Homo sapiens
MALQLWALTLLGLLGAGASLRPRKLDFFRSEKELNHLAVDEASGVVYLGAVNALYQLDAKLQLEQQVATGPALDNKKCTPPIEASQCHEAEMTDNVNQLLLLDPPRKRLVECGSLFKGICALRALSNISLRLFYEDGSGEKSFVASNDEGVATVGLVSSTGPGGDRVLFVGKGNGPHDNGIIVSTRLLDRTDSREAFEAYTDHATYKAGYLSTNTQQFVAAFEDGPYVFFVFNQQDKHPARNRTLLARMCREDPNYYSYLEMDLQCRDPDIHAAAFGTCLAASVAAPGSGRVLYAVFSRDSRSSGGPGAGLCLFPLDKVHAKMEANRNACYTGTREARDIFYKPFHGDIQCGGHAPGSSKSFPCGSEHLPYPLGSRDGLRGTAVLQRGGLNLTAVTVAAENNHTVAFLGTSDGRILKVYLTPDGTSSEYDSILVEINKRVKRDLVLSGDLGSLYAMTQDKVFRLPVQECLSYPTCTQLPPAAEPASGVHCRVSSDLKMCLTLPRWGQLASASAHAPAAASMP

SEQ ID NO: 58256 - protein, 162 aa, Homo sapiens
MALQLWALTLLGLLGAGASLRPRKLDFFRSEKELNHLAVDEASGVVYLGAVNALYQLDAKLQLEQQVATGPALDNKKCTPPIEASQCHEAEMTDNVNQLLLLDPPRKRLVECGSLFKGICALRALSNISLRLFYEDGSGEKSFVASNDEGVATVGLVSSTGP

SEQ ID NO: 58257 - protein, 477 aa, Homo sapiens
MALQLWALTLLGLLGAGASLRPRKLDFFRSEKELNHLAVDEASGVVYLGAVNALYQLDAKLQLEQQVATGPALDNKKCTPPIEASQCHEAEMTDNVNQLLLLDPPRKRLVECGSLFKGICALRALSNISLRLFYEDGSGEKSFVASNDEGVATVGLVSSTGPGGDRVLFVGKGNGPHDNGIIVSTRLLDRTDSREAFEAYTDHATYKAGYLSTNTQQFVAAFEDGPYVFFVFNQQDKHPARNRTLLARMCREDPNYYSYLEMDLQCRDPDIHAAAFGTCLAASVAAPGSGRVLYAVFSRDSRSSGGPGAGLCLFPLDKVHAKMEANRNACYTGTREARDIFYKPFHGDIQCGGHAPGSSKSFPCGSEHLPYPLGSRDGLRGTAVLQRGGLNLTAVTVAAENNHTVAFLGTSDGRILKVYLTPDGTSSEYDSILVEINKRVKRDLVLSGDLGSLYAMTQDKVFRLPVQECLSYPTCTQ

SEQ ID NO: 58258 - protein, 1838 aa, Homo sapiens; identical to SEQ ID NO: 58252

SEQ ID NO: 58259 - protein, 1909 aa, Homo sapiens
MCHAAQETPLLHHFMAPVMARWPPFGLCLLLLLLSPPPLPLTGAHRFSAPNTTLNHLALAPGRGTLYVGAVNRLFQLSPELQLEAVAVTGPVIDSPDCVPFRDPAECPQAQLTDNANQLLLVSSRAQELVACGQVRQGVCETRRLGDVAEVLYQAEDPGDGQFVAANTPGVATVGLVVPLPGRDLLLVARGLAGKLSAGVPPLAIRQLAGSQPFSSEGLGRLVVGDFSDYNNSYVGAFADARSAYFVFRRRGARAQAEYRSYVARVCLGDTNLYSYVEVPLACQGQGLIQAAFLAPGTLLGVFAAGPRGTQAALCAFPMVELGASMEQARRLCYTAGGRGPSGAEEATVEYGVTSRCVTLPLDSPESYPCGDEHTPSPIAGRQPLEVQPLLKLGQPVSAVAALQADGHMIAFLGDTQGQLYKVFLHGSQGQVYHSQQVGPPGSAISPDLLLDSSGSHLYVLTAHQVDRIPVAACPQFPDCASCLQAQDPLCGWCVLQGRCTRKGQCGRAGQLNQWLWSYEEDSHCLHIQSLLPGHHPRQEQGQVTLSVPRLPILDADEYFHCAFGDYDSLAHVEGPHVACVTPPQDQVPLNPPGTDHVTVPLALMFEDVTVAATNFSFYDCSAVQALEAAAPCRACVGSIWRCHWCPQSSHCVYGEHCPEGERTIYSAQEVDIQVRGPGACPQVEGLAGPHLVPVGWESHLALRVRNLQHFRGLPASFHCWLELPGELRGLPATLEETAGDSGLIHCQAHQFYPSMSQRELPVPIYVTQGEAQRLDNTHALYVILYDCAMGHPDCSHCQAANRSLGCLWCADGQPACRYGPLCPPGAVELLCPAPSIDAVEPLTGPPEGGLALTILGSNLGRAFADVQYAVSVASRPCNPEPSLYRTSARIVCVTSPAPNGTTGPVRVAIKSQPPGISSQHFTYQDPVLLSLSPRWGPQAGGTQLTIRGQHLQTGGNTSAFVGGQPCPILEPVCPEAIVCRTRPQAAPGEAAVLVVFGHAQRTLLASPFRYTANPQLVAAEPSASFRGGGRLIRVRGTGLDVVQRPLLSVWLEADAEVQASRAQPQDPQPRRSCGAPAADPQACIQLGGGLLQCSTVCSVNSSSLLLCRSPAVPDRAHPQRVFFTLDNVQVDFASASGGQGFLYQPNPRLAPLSREGPARPYRLKPGHVLDVEGEGLNLGISKEEVRVHIGRGECLVKTLTRTHLYCEPPAHAPQPANGSGLPQFVVQMGNVQLALGPVQYEAEPPLSAFPVEAQAGVGMGAAVLIAAVLLLTLMYRHKSKQALRDYQKVLVQLESLETGVGDQCRKEFTDLMTEMTDLSSDLEGSGIPFLDYRTYAERAFFPGHGGCPLQPKPEGPGEDGHCATVRQGLTQLSNLLNSKLFLLTLIHTLEEQPSFSQRDRCHVASLLSLALHGKLEYLTDIMRTLLGDLAAHYVHRNPKLMLRRTETMVEKLLTNWLSICLYAFLREVAGEPLYMLFRAIQYQVDKGPVDAVTGKAKRTLNDSRLLREDVEFQPLTLMVLVGPGAGGAAGSSEMQRVPARVLDTDTITQVKEKVLDQVYKGTPFSQRPSVHALDLEWRSGLAGHLTLSDEDLTSVTQNHWKRLNTLQHYKVPDGATVGLVPQLHRGSTISQSLAQRCPLGENIPTLEDGEEGGVCLWHLVKATEEPEGAKVRCSSLREREPARAKAIPEIYLTRLLSMKGTLQKFVDDTFQAILSVNRPIPIAVKYLFDLLDELAEKHGIEDPGTLHIWKTNSLLLRFWVNALKNPQLIFDVRVSDNVDAILAVIAQTFIDSCTTSEHKVGRDSPVNKLLYAREIPRYKQMVERYYADIRQSSPASYQEMNSALAELSGNYTSAPHCLEALQELYNHIHRYYDQIISALEEDPVGQKLQLACRLQQVAALVENKVTDL

SEQ ID NO: 58260 - protein, 258 aa, Homo sapiens
  VARIANT 1: note = MOD_RES - Any amino acid
XSLETGVGDQCRKEFTDLMTEMTDLSSDLEGSGIPFLDYRTYAERAFFPGHGGCPLQPKPEGPGEDGHCATVRQGLTQLSNLLNSKLFLLTLIHTLEEQPSFSQRDRCHVASLLSLALHGKLEYLTDIMRTLLGDLAAHYVHRNPKLMLRRTETMVEKLLTNWLSICLYAFLREVAGEPLYMLFRAIQYQVDKGPVDAVTEWRSGLAGHLTLSDEDLTSVTQNHWKRLNTLQHYKVPDGATVGLVPQLHRGSTISQSL

SEQ ID NO: 58261 - protein, 176 aa, Homo sapiens
  VARIANT 1: note = MOD_RES - Any amino acid
XASQGTLQKFVDDTFQAILSVNRPIPIAVKYLFDLLDELAEKHGIEDPGTLHIWKTNSLLLRFWVNALKNPQLIFDVRVSDNVDAILAVIAQTFIDSCTTSEHKVGRVRAVPAAAAGRGLRRKGLWGKPRGLCTELWVGSGSIMGAPSPPSSCLAPPLPPEQDSPVNKLLYAREIP

SEQ ID NO: 58262 - protein, 163 aa, Homo sapiens
  VARIANT 1: note = MOD_RES - Any amino acid
XKRTLNDSRLLREDVEFQPLTLMVLVGPGAGGAAGSSEMQRVPARVLDTDTITQVKEKVLDQVYKGTPFSQRPSVHALDLEWRSGLAGHLTLSDEDLTSVTQNHWKRLNTLQHYKVPDGATVGLVPQLHRGSTISQSLAQRCPLGESESLGPDLGPLESRLGR

SEQ ID NO: 58263 - protein, 988 aa, Homo sapiens
MCHAAQETPLLHHFMDSPESYPCGDEHTPSPIAGRQPLEVQPLLKLGQPVSAVAALQADGHMIAFLGDTQGQLYKVDRIPVAACPQFPDCASCLQAQDPLCGWCVLQGRCTRKGQCGRAGQLNQWLWSYEEDSHCLHIQSLLPGHHPRQEQGQVTLSVPRLPILDADEYFHCAFGDYDSLAHVEGPHVACVTPPQDQVPLNPPGTDHVTVPLALMFEDVTVAATNFSFYDCSAVQALEAAAPCRACVGSIWRCHWCPQSSHCVYGEHCPEGERTIYSAQEVDIQVRGPGACPQVEGLAGPHLVPVGWESHLALRVRNLQHFRGLPASFHCWLELPGELRGLPATLEETAGDSGLIHCQAHQFYPSMSQRELPVPIYVTQGEAQRLDNTHALYVILYDCAMGHPDCSHCQAANRSLGCLWCADGQPACRYGPLCPPGAVELLCPAPSIDAVEPLTGPPEGGLALTILGSNLGRAFADVQYAVSVASRPCNPEPSLYRTSARIVCVTSPAPNGTTGPVRVAIKSQPPGISSQHFTYQDPVLLSLSPRWGPQAGGTQLTIRGQHLQTGGNTSAFVGGQPCPILEPVCPEAIVCRTRPQAAPGEAAVLVVFGHAQRTLLASPFRYTANPQLVAAEPSASFRGGGRLIRVRGTGLDVVQRPLLSVWLEADAEVQASRAQPQDPQPRRSCGAPAADPQACIQLGGGLLQCSTVCSVNSSSLLLCRSPAVPDRAHPQRVFFTLDNVQVDFASASGGQGFLYQPNPRLAPLSREGPARPYRLKPGHVLDVEGEGLNLGISKEEVRVHIGRGECLVKTLTRTHLYCEPPAHAPQPANGSGLPQFVVQMGNVQLALGPVQYEAEPPLSAFPVEAQAGVGMGAAVLIAAVLLLTLMYRHKSKQALRDYQKVLVQLESLETGVGDQCRKEFTGGCGGGGTGYPRGLNSHLGASWPRRPHDGDDRPQQRPGGQRDPLPGLPHLRRARLLPWPWRLPAAAQA

SEQ ID NO: 58264 - protein, 224 aa, Homo sapiens
MCHAAQETPLLHHFMVDRIPVAACPQFPDCASCLQAQDPLCGWCVLQGRCTRKGQCGRAGQLNQWLWSYEEDSHCLHIQSLLPGHHPRQEQGQVTLSVPRLPILDADEYFHCAFGDYDSLAHVEGPHVACVTPPQDQVPLNPPGTDHVTVPLALMFEDVTVAATNFSFYDCSAVQALEAAAPACLPPSTAGWSCLENFGDCRPPWRRQQGIQASSTARPTRSSP

SEQ ID NO: 58265 - protein, 1562 aa, Homo sapiens
MCHAAQETPLLHHFMDSPESYPCGDEHTPSPIAGRQPLEVQPLLKLGQPVSAVAALQADGHMIAFLGDTQGQLYKVFLHGSQGQVYHSQQVGPPGSAISPDLLLDSSGSHLYVLTAHQVDRIPVAACPQFPDCASCLQAQDPLCGWCVLQGRCTRKGQCGRAGQLNQWLWSYEEDSHCLHIQSLLPGHHPRQEQGQVTLSVPRLPILDADEYFHCAFGDYDSLAHVEGPHVACVTPPQDQVPLNPPGTDHVTVPLALMFEDVTVAATNFSFYDCSAVQALEAAAPCRACVGSIWRCHWCPQSSHCVYGEHCPEGERTIYSAQEVDIQVRGPGACPQVEGLAGPHLVPVGWESHLALRVRNLQHFRGLPASFHCWLELPGELRGLPATLEETAGDSGLIHCQAHQFYPSMSQRELPVPIYVTQGEAQRLDNTHALYVILYDCAMGHPDCSHCQAANRSLGCLWCADGQPACRYGPLCPPGAVELLCPAPSIDAVEPLTGPPEGGLALTILGSNLGRAFADVQYAVSVASRPCNPEPSLYRTSARIVCVTSPAPNGTTGPVRVAIKSQPPGISSQHFTYQDPVLLSLSPRWGPQAGGTQLTIRGQHLQTGGNTSAFVGGQPCPILEPVCPEAIVCRTRPQAAPGEAAVLVVFGHAQRTLLASPFRYTANPQLVAAEPSASFRGGGRLIRVRGTGLDVVQRPLLSVWLEADAEVQASRAQPQDPQPRRSCGAPAADPQACIQLGGGLLQCSTVCSVNSSSLLLCRSPAVPDRAHPQRVFFTLDNVQVDFASASGGQGFLYQPNPRLAPLSREGPARPYRLKPGHVLDVEGEGLNLGISKEEVRVHIGRGECLVKTLTRTHLYCEPPAHAPQPANGSGLPQFVVQMGNVQLALGPVQYEAEPPLSAFPVEAQAGVGMGAAVLIAAVLLLTLMYRHKSKQALRDYQKVLVQLESLETGVGDQCRKEFTDLMTEMTDLSSDLEGSGIPFLDYRTYAERAFFPGHGGCPLQPKPEGPGEDGHCATVRQGLTQLSNLLNSKLFLLTLIHTLEEQPSFSQRDRCHVASLLSLALHGKLEYLTDIMRTLLGDLAAHYVHRNPKLMLRRTETMVEKLLTNWLSICLYAFLREVAGEPLYMLFRAIQYQVDKGPVDAVTGKAKRTLNDSRLLREDVEFQPLTLMVLVGPGAGGAAGSSEMQRVPARVLDTDTITQVKEKVLDQVYKGTPFSQRPSVHALDLEWRSGLAGHLTLSDEDLTSVTQNHWKRLNTLQHYKVPDGATVGLVPQLHRGSTISQSLAQRCPLGENIPTLEDGEEGGVCLWHLVKATEEPEGAKVRCSSLREREPARAKAIPEIYLTRLLSMKGTLQKFVDDTFQAILSVNRPIPIAVKYLFDLLDELAEKHGIEDPGTLHIWKTNSLLLRFWVNALKNPQLIFDVRVSDNVDAILAVIAQTFIDSCTTSEHKVGRDSPVNKLLYAREIPRYKQMVERYYADIRQSSPASYQEMNSALAELSGNYTSAPHCLEALQELYNHIHRYYDQIISALEEDPVGQKLQLACRLQQVAALVENKVTDL

SEQ ID NO: 58266 - protein, 1932 aa, Homo sapiens
MELTPASSLTCSLLSPRLPGSFPQLRRVPPCSRPWLPKAPVMARWPPFGLCLLLLLLSPPPLPLTGAHRFSAPNTTLNHLALAPGRGTLYVGAVNRLFQLSPELQLEAVAVTGPVIDSPDCVPFRDPAECPQAQLTDNANQLLLVSSRAQELVACGQVRQGVCETRRLGDVAEVLYQAEDPGDGQFVAANTPGVATVGLVVPLPGRDLLLVARGLAGKLSAGVPPLAIRQLAGSQPFSSEGLGRLVVGDFSDYNNSYVGAFADARSAYFVFRRRGARAQAEYRSYVARVCLGDTNLYSYVEVPLACQGQGLIQAAFLAPGTLLGVFAAGPRGTQAALCAFPMVELGASMEQARRLCYTAGGRGPSGAEEATVEYGVTSRCVTLPLDSPESYPCGDEHTPSPIAGRQPLEVQPLLKLGQPVSAVAALQADGHMIAFLGDTQGQLYKVFLHGSQGQVYHSQQVGPPGSAISPDLLLDSSGSHLYVLTAHQVDRIPVAACPQFPDCASCLQAQDPLCGWCVLQGRCTRKGQCGRAGQLNQWLWSYEEDSHCLHIQSLLPGHHPRQEQGQVTLSVPRLPILDADEYFHCAFGDYDSLAHVEGPHVACVTPPQDQVPLNPPGTDHVTVPLALMFEDVTVAATNFSFYDCSAVQALEAAAPCRACVGSIWRCHWCPQSSHCVYGEHCPEGERTIYSAQEVDIQVRGPGACPQVEGLAGPHLVPVGWESHLALRVRNLQHFRGLPASFHCWLELPGELRGLPATLEETAGDSGLIHCQAHQFYPSMSQRELPVPIYVTQGEAQRLDNTHALYVILYDCAMGHPDCSHCQAANRSLGCLWCADGQPACRYGPLCPPGAVELLCPAPSIDAVEPLTGPPEGGLALTILGSNLGRAFADVQYAVSVASRPCNPEPSLYRTSARIVCVTSPAPNGTTGPVRVAIKSQPPGISSQHFTYQDPVLLSLSPRWGPQAGGTQLTIRGQHLQTGGNTSAFVGGQPCPILEPVCPEAIVCRTRPQAAPGEAAVLVVFGHAQRTLLASPFRYTANPQLVAAEPSASFRGGGRLIRVRGTGLDVVQRPLLSVWLEADAEVQASRAQPQDPQPRRSCGAPAADPQACIQLGGGLLQCSTVCSVNSSSLLLCRSPAVPDRAHPQRVFFTLDNVQVDFASASGGQGFLYQPNPRLAPLSREGPARPYRLKPGHVLDVEGEGLNLGISKEEVRVHIGRGECLVKTLTRTHLYCEPPAHAPQPANGSGLPQFVVQMGNVQLALGPVQYEAEPPLSAFPVEAQAGVGMGAAVLIAAVLLLTLMYRHKSKQALRDYQKVLVQLESLETGVGDQCRKEFTDLMTEMTDLSSDLEGSGIPFLDYRTYAERAFFPGHGGCPLQPKPEGPGEDGHCATVRQGLTQLSNLLNSKLFLLTLIHTLEEQPSFSQRDRCHVASLLSLALHGKLEYLTDIMRTLLGDLAAHYVHRNPKLMLRRTETMVEKLLTNWLSICLYAFLREVAGEPLYMLFRAIQYQVDKGPVDAVTGKAKRTLNDSRLLREDVEFQPLTLMVLVGPGAGGAAGSSEMQRVPARVLDTDTITQVKEKVLDQVYKGTPFSQRPSVHALDLEWRSGLAGHLTLSDEDLTSVTQNHWKRLNTLQHYKVPDGATVGLVPQLHRGSTISQSLAQRCPLGENIPTLEDGEEGGVCLWHLVKATEEPEGAKVRCSSLREREPARAKAIPEIYLTRLLSMKGTLQKFVDDTFQAILSVNRPIPIAVKYLFDLLDELAEKHGIEDPGTLHIWKTNSLLLRFWVNALKNPQLIFDVRVSDNVDAILAVIAQTFIDSCTTSEHKVGRDSPVNKLLYAREIPRYKQMVERYYADIRQSSPASYQEMNSALAELSGNYTSAPHCLEALQELYNHIHRYYDQIISALEEDPVGQKLQLACRLQQVAALVENKVTDL

SEQ ID NO: 58267 - protein, 1925 aa, Homo sapiens
MAPRAAGGAPLSARAAAASPPPFQTPPRCPVPLLLLLLLGAARAGALEIQRRFPSPTPTNNFALDGAAGTVYLAAVNRLYQLSGANLSLEAEAAVGPVPDSPLCHAPQLPQASCEHPRRLTDNYNKILQLDPGQGLVVVCGSIYQGFCQLRRRGNISAVAVRFPPAAPPAEPVTVFPSMLNVAANHPNASTVGLVLPPAAGAGGSRLLVGATYTGYGSSFFPRNRSLEDHRFENTPEIAIRSLDTRGDLAKLFTFDLNPSDDNILKIKQGAKEQHKLGFVSAFLHPSDPPPGAQSYAYLALNSEARAGDKESQARSLLARICLPHGAGGDAKKLTESYIQLGLQCAGGAGRGDLYSRLVSVFPARERLFAVFERPQGSPAARAAPAALCAFRFADVRAAIRAARTACFVEPAPDVVAVLDSVVQGTGPACERKLNIQLQPEQLDCGAAHLQHPLSILQPLKATPVFRAPGLTSVAVASVNNYTAVFLGTVNGRLLKINLNESMQVVSRRVVTVAYGEPVHHVMQFDPADSGYLYLMTSHQMARVKVAACNVHSTCGDCVGAADAYCGWCALETRCTLQQDCTNSSQQHFWTSASEGPSRCPAMTVLPSEIDVRQEYPGMILQISGSLPSLSGMEMACDYGNNIRTVARVPGPAFGHQIAYCNLLPRDQFPPFPPNQDHVTVEMSVRVNGRNIVKANFTIYDCSRTAQVYPHTACTSCLSAQWPCFWCSQQHSCVSNQSRCEASPNPTSPQDCPRTLLSPLAPVPTGGSQNILVPLANTAFFQGAALECSFGLEEIFEAVWVNESVVRCDQVVLHTTRKSQVFPLSLQLKGRPARFLDSPEPMTVMVYNCAMGSPDCSQCLGREDLGHLCMWSDGCRLRGPLQPMAGTCPAPEIHAIEPLSGPLDGGTLLTIRGRNLGRRLSDVAHGVWIGGVACEPLPDRYTVSEEIVCVTGPAPGPLSGVVTVNASKEGKSRDRFSYVLPLVHSLEPTMGPKAGGTRITIHGNDLHVGSELQVLVNDTDPCTELMRTDTSIACTMPEGALPAPVPVCVRFERRGCVHGNLTFWYMQNPVITAISPRRSPVSGGRTITVAGERFHMVQNVSMAVHHIGREPTLCKVLNSTLITCPSPGALSNASAPVDFFINGRAYADEVAVAEELLDPEEAQRGSRFRLDYLPNPQFSTAKREKWIKHHPGEPLTLVIHKEQDSLGLQSHEYRVKIGQVSCDIQIVSDRIIHCSVNESLGAAVGQLPITIQVGNFNQTIATLQLGGSETAIIVSIVICSVLLLLSVVALFVFCTKSRRAERYWQKTLLQMEEMESQIREEIRKGFAELQTDMTDLTKELNRSQGIPFLEYKHFVTRTFFPKCSSLYEERYVLPSQTLNSQGSSQAQETHPLLGEWKIPESCRPNMEEGISLFSSLLNNKHFLIVFVHALEQQKDFAVRDRCSLASLLTIALHGKLEYYTSIMKELLVDLIDASAAKNPKLMLRRTESVVEKMLTNWMSICMYSCLRETVGEPFFLLLCAIKQQINKGSIDAITGKARYTLSEEWLLRENIEAKPRNLNVSFQGCGMDSLSVRAMDTDTLTQVKEKILEAFCKNVPYSQWPRAEDVDLEWFASSTQSYILRDLDDTSVVEDGRKKLNTLAHYKIPEGASLAMSLIDKKDNTLGRVKDLDTEKYFHLVLPTDELAEPKKSHRQSHRKKVLPEIYLTRLLSTKGTLQKFLDDLFKAILSIREDKPPLAVKYFFDFLEEQAEKRGISDPDTLHIWKTNSLPLRFWVNILKNPQFVFDIDKTDHIDACLSVIAQAFIDACSISDLQLGKDSPTNKLLYAKEIPEYRKIVQRYYKQIQDMTPLSEQEMNAHLAEESRKYQNEFNTNVAMAEIYKYAKRYRPQIMAALEANPTARRTQLQHKFEQVVALMEDNIYECYSEA

SEQ ID NO: 58268 - protein, 1785 aa, Homo sapiens
MAPRAAGGAPLSARAAAASPPPFQTPPRCPVPLLLLLLLGAARAGALEIQRRFPSPTPTNNFALDGAAGTVYLAAVNRLYQLSGANLSLEAEAAVGPVPDSPLCHAPQLPQASCEHPRRLTDNYNKILQLDPGQGLVVVCGSIYQGFCQLRRRGNISAVAVRFPPAAPPAEPVTVFPSMLNVAANHPNASTVGLVLPPAAGAGGSRLLVGATYTGYGSSFFPRNRSLEDHRFENTPEIAIRSLDTRGDLAKLFTFDLNPSDDNILKIKQGAKEQHKLGFVSAFLHPSDPPPGAQSYAYLALNSEARAGDKESQARSLLARICLPHGAGGDAKKLTESYIQLGLQCAGGAGRGDLYSRLVSVFPARERLFAVFERPQGSPAARAAPAALCAFRFADVRAAIRAARTACFVEPAPDVVAVLDSVVQGTGPACERKLNIQLQPEQLDCGAAHLQHPLSILQPLKATPVFRAPGLTSVAVASVNNYTAVFLGTVNGRLLKINLNESMQVVSRRVVTVAYGEPVHHVMQFDPADSGYLYLMTSHQMARVKVAACNVHSTCGDCVGAADAYCGWCALETRCTLQQDCTNSSQQHFWTSASEGPSRCPAMTVLPSEIDVRQEYPGMILQISGSLPSLSGMEMACDYGNNIRTVARVPGPAFGHQIAYCNLLPRDQFPPFPPNQDHVTVEMSVRVNGRNIVKANFTIYDCSRTAQVYPHTACTSCLSAQWPCFWCSQQHSCVSNQSRCEASPNPTSPQDCPRTLLSPLAPVPTGGSQNILVPLANTAFFQGAALECSFGLEEIFEAVWVNESVVRCDQVVLHTTRKSQVFPLSLQLKGRPARFLDSPEPMTVMVYNCAMGSPDCSQCLGREDLGHLCMWSDGCRLRGPLQPMAGTCPAPEIHAIEPLSGPLDGGTLLTIRGRNLGRRLSDVAHGVWIGGVACEPLPDRYTVSEEIVCVTGPAPGPLSGVVTVNASKEGKSRDRFSYVLPLVHSLEPTMGPKAGGTRITIHGNDLHVGSELQVLVNDTDPCTELMRTDTSIACTMPEGALPAPVPVCVRFERRGCVHGNLTFWYMQNPVITAISPRRSPVSGGRTITVAGERFHMVQNVSMAVHHIGREPTLCKVLNSTLITCPSPGALSNASAPVDFFINGRAYADEVAVAEELLDPEEAQRGSRFRLDYLPNPQFSTAKREKWIKHHPGEPLTLVIHKEQDSLGLQSHEYRVKIGQVSCDIQIVSDRIIHCSVNESLGAAVGQLPITIQVGNFNQTIATLQLGGSETAIIVSIVICSVLLLLSVVALFVFCTKSRRAERYWQKTLLQMEEMESQIREEIRKGFAELQTDMTDLTKELNRSQGIPFLEYKHFVTRTFFPKCSSLYEERYVLPSQTLNSQGSSQAQETHPLLGEWKIPESCRPNMEEGISLFSSLLNNKHFLIVFVHALEQQKDFAVRDRCSLASLLTIALHGKLEYYTSIMKELLVDLIDASAAKNPKLMLRRTESVVEKMLTNWMSICMYSCLRETVGEPFFLLLCAIKQQINKGSIDAITGKARYTLSEEWLLRENIEAKPRNLNVSFQGCGMDSLSVRAMDTDTLTQVKEKILEAFCKNVPYSQWPRAEDVDLEWFASSTQSYILRDLDDTSVVEDGRKKLNTLAHYKIPEGASLAMSLIDKKDNTLGRVKDLDTEKYFHLVLPTDELAEPKKSHRQSHRKKVLPEIYLTRLLSTKGTLQKFLDDLFKAILSIREDKPPLAVKYFFDFLEEQAEKRGISDPDTLHIWKTNRWRPSSPVLGEHPEEPPVCL

SEQ ID NO: 58269 - protein, 500 aa, Homo sapiens
MRGELWLLVLVLREAARALSPQPGAGHDEGPGSGWAAKGTVRGWNRRARESPGHVSEPDRTQLSQDLGGGTLAMDTLPDNRTRVVEDNHSYYVSRLYGPSEPHSRELWVDVAEANRSQVKIHTILSNTHRQASRVVLSFDFPFYGHPLRQITIATGGFIFMGDVIHRMLTATQYVAPLMANFNPGYSDNSTVVYFDNGTVFVVQWDHVYLQGWEDKGSFTFQAALHHDGRIVFAYKEIPMSVPEISSSQHPVKTGLSDAFMILNPSPDVPESRRRSIFEYHRIELDPSKVTSMSAVEFTPLPTCLQHRSCDACMSSDLTFNCSWCHVLQRCSSGFDRYRQEWMDYGCAQEAEGRMCEDFQDEDHDSASPDTSFSPYDGDLTTTSSSLFIDSLTTEDDTKLNPYAGGDGLQNNLSPKTKGTPVHLGTIVGIVLAVLLVAAIILAGIYINGHPTSNAALFFIERRPHHWPAMKFRSHPDHSTYAEVEPSGHEKEGFMEAEQC

SEQ ID NO: 58270 - protein, 337 aa, Homo sapiens
MRGELWLLVLVLREAARALSPQPGAGHDEGPGSGWAAKGTVRGWNRRARESPGHVSEPDRTQLSQDLGGGTLAMDTLPDNRTRVVEDNHSYYVSRLYGPSEPHSRELWVDVAEANRSQVKIHTILSNTHRQASRVVLSFDFPFYGHPLRQITIATGGFIFMGDVIHRMLTATQYVAPLMANFNPGYSDNSTVVYFDNGTVFVVQWDHVYLQGWEDKGSFTFQAALHHDGRIVFAYKEIPMSVPEISSSQHPVKTGLSDAFMILNPSPDVPESRRRSIFEYHRIELDPSKVTSMSAVEFTPLPTCLQHRSCDACMSSDLTFNCSWCHVLQSRDEVSPC

SEQ ID NO: 58271 - protein, 427 aa, Homo sapiens
MDTLPDNRTRVVEDNHSYYVSRLYGPSEPHSRELWVDVAEANRSQVKIHTILSNTHRQASRVVLSFDFPFYGHPLRQITIATGGFIFMGDVIHRMLTATQYVAPLMANFNPGYSDNSTVVYFDNGTVFVVQWDHVYLQGWEDKGSFTFQAALHHDGRIVFAYKEIPMSVPEISSSQHPVKTGLSDAFMILNPSPDVPESRRRSIFEYHRIELDPSKVTSMSAVEFTPLPTCLQHRSCDACMSSDLTFNCSWCHVLQRSLNNQDENTYVNCLDSQQCHGSSESRRPFQDEDHDSASPDTSFSPYDGDLTTTSSSLFIDSLTTEDDTKLNPYAGGDGLQNNLSPKTKGTPVHLGTIVGIVLAVLLVAAIILAGIYINGHPTSNAALFFIERRPHHWPAMKFRSHPDHSTYAEVEPSGHEKEGFMEAEQC

SEQ ID NO: 58272 - protein, 124 aa, Homo sapiens
MDTLPDNRTRVVEDNHSYYVSRLYGPSEPHSRELWVDVAEANRSQVKIHTILSNTHRQASRVVLSFDFPFYGHPLRQITIATGGFIFMGDVIHRMLTATQYVAPLMANFNPGYSDNSTVVYFDN

SEQ ID NO: 58273 - protein, 222 aa, Homo sapiens
MDTLPDNRTRVVEDNHSYYVSRLYGPSEPHSRELWVDVAEANRSQVKIHTILSNTHRQASRVVLSFDFPFYGHPLRQITIATGGFIFMGDVIHRMLTATQYVAPLMANFNPGYSDNSTVVYFDNGTVFVVQWDHVYLQGWEDKGSFTFQAALHHDGRIVFAYKEIPMSVPEISSSQHPVKTGLSDAFMILNPSPDVPESRRRSIFEYHRIELDPSKVTSMSA

SEQ ID NO: 58274 - protein, 65 aa, Homo sapiens
  VARIANT 1: note = MOD_RES - Any amino acid
XSFTFQAALHHDGRIVFAYKEIPMSVPEISSSQHPVKTGLSDAFMILNPSPDVPGFSAESAKHLW

SEQ ID NO: 58275 - protein, 460 aa, Homo sapiens
MALSVRTLPLRGFLVPRPQPTRSQDAPSPRLPLSSAPAPCRHKNEEDNHSYYVSRLYGPSEPHSRELWVDVAEANRSQVKIHTILSNTHRQASRVVLSFDFPFYGHPLRQITIATGGFIFMGDVIHRMLTATQYVAPLMANFNPGYSDNSTVVYFDNGTVFVVQWDHVYLQGWEDKGSFTFQAALHHDGRIVFAYKEIPMSVPEISSSQHPVKTGLSDAFMILNPSPDVPESRRRSIFEYHRIELDPSKVTSMSAVEFTPLPTCLQHRSCDACMSSDLTFNCSWCHVLQRCSSGFDRYRQEWMDYGCAQEAEGRMCEDFQDEDHDSASPDTSFSPYDGDLTTTSSSLFIDSLTTEDDTKLNPYAGGDGLQNNLSPKTKGTPVHLGTIVGIVLAVLLVAAIILAGIYINGHPTSNAALFFIERRPHHWPAMKFRSHPDHSTYAEVEPSGHEKEGFMEAEQC

SEQ ID NO: 58276 - protein, 240 aa, Homo sapiens
MDTLPDNRTRVVEDNHSYYVSRLYGPSEPHSRELWVDVAEANRSQVKIHTILSNTHRQASRVVLSFDFPFYGHPLRQITIATGGFIFMGDVIHRMLTATQYVAPLMANFNPGYSDNSTVVYFDNGTVFVVQWDHVYLQGWEDKGSFTFQAALHHDGRIVFAYKEIPMSVPEISSSQHPVKTGLSDAFMILNPSPDVPESRRRSIFEYHRIELDPSKVTSMSAVEFTPLPSPSTTRMKTRM

SEQ ID NO: 58277 - protein, 392 aa, Homo sapiens
MEKDKVKIHGILSNTHRQAARVNLSFDFPFYGHFLREITVATGGFIYTGEVVHRMLTATQYIAPLMANFDPSVSRNSTVRYFDNGTALVVQWDHVHLQDNYNLGSFTFQATLLMDGRIIFGYKEIPVLVTQISSTNHPVKVGLSDAFVVVHRIQQIPNVRRRTIYEYHRVELQMSKITNISAVEMTPLPTCLQFNRCGPCVSSQIGFNCSWCSKLQRCSSGFDRHRQDWVDSGCPEESKEKMCENTEPVETSSRTTTTVGATTTQFRVLTTTRRAVTSQFPTSLPTEDDTKIALHLKDNGASTDDSAAEKKGGTLHAGLIIGILILVLIVATAILVTVYMYHHPTSAASIFFIERRPSRWPAMKFRRGSGHPAYAEVEPVGEKEGFIVSEQC

SEQ ID NO: 58278 - protein, 480 aa, Homo sapiens
MARFPKADLAAAGVMLLCHFFTDQFQFADGKPGDQILDWQYGVTQAFPHTEEEVEVDSHAYSHRWKRNLDFLKAVDTNRASVGQDSPEPRSFTDLLLDDGQDNNTQIERVNLSFDFPFYGHFLREITVATGGFIYTGEVVHRMLTATQYIAPLMANFDPSVSRNSTVRYFDNGTALVVQWDHVHLQDNYNLGSFTFQATLLMDGRIIFGYKEIPVLVTQISSTNHPVKVGLSDAFVVVHRIQQIPNVRRRTIYEYHRVELQMSKITNISAVEMTPLPTCLQFNRCGPCVSSQIGFNCSWCSKLQRCSSGFDRHRQDWVDSGCPEESKEKMCENTEPVETSSRTTTTVGATTTQFRVLTTTRRAVTSQFPTSLPTEDDTKIALHLKDNGASTDDSAAEKKGGTLHAGLIIGILILVLIVATAILVTVYMYHHPTSAASIFFIERRPSRWPAMKFRRGSGHPAYAEVEPVGEKEGFIVSEQC

SEQ ID NO: 58279 - protein, 529 aa, Homo sapiens
MARFPKADLAAAGVMLLCHFFTDQFQFADGKPGDQILDWQYGVTQAFPHTEEEVEVDSHAYSHRWKRNLDFLKAVDTNRASVGQDSPEPRSFTDLLLDDGQDNNTQIEEDTDHNYYISRIYGPSDSASRDLWVNIDQMEKDKVKIHGILSNTHRQAARVNLSFDFPFYGHFLREITVATGGFIYTGEVVHRMLTATQYIAPLMANFDPSVSRNSTVRYFDNGTALVVQWDHVHLQDNYNLGSFTFQATLLMDGRIIFGYKEIPVLVTQISSTNHPVKVGLSDAFVVVHRIQQIPNVRRRTIYEYHRVELQMSKITNISAVEMTPLPTCLQFNRCGPCVSSQIGFNCSWCSKLQRCSSGFDRHRQDWVDSGCPEESKEKMCENTEPVETSSRTTTTVGATTTQFRVLTTTRRAVTSQFPTSLPTEDDTKIALHLKDNGASTDDSAAEKKGGTLHAGLIIGILILVLIVATAILVTVYMYHHPTSAASIFFIERRPSRWPAMKFRRGSGHPAYAEVEPVGEKEGFIVSEQC

SEQ ID NO: 58280 - protein, 515 aa, Homo sapiens
MLLCHFFTDQFQFADGKPGDQILDWQYGVTQAFPHTEEEVEVDSHAYSHRWKRNLDFLKAVDTNRASVGQDSPEPRSFTDLLLDDGQDNNTQIEEDTDHNYYISRIYGPSDSASRDLWVNIDQMEKDKVKIHGILSNTHRQAARVNLSFDFPFYGHFLREITVATGGFIYTGEVVHRMLTATQYIAPLMANFDPSVSRNSTVRYFDNGTALVVQWDHVHLQDNYNLGSFTFQATLLMDGRIIFGYKEIPVLVTQISSTNHPVKVGLSDAFVVVHRIQQIPNVRRRTIYEYHRVELQMSKITNISAVEMTPLPTCLQFNRCGPCVSSQIGFNCSWCSKLQRCSSGFDRHRQDWVDSGCPEESKEKMCENTEPVETSSRTTTTVGATTTQFRVLTTTRRAVTSQFPTSLPTEDDTKIALHLKDNGASTDDSAAEKKGGTLHAGLIIGILILVLIVATAILVTVYMYHHPTSAASIFFIERRPSRWPAMKFRRGSGHPAYAEVEPVGEKEGFIVSEQC

SEQ ID NO: 58281 - protein, 526 aa, Homo sapiens
MRCALALSALLLLLSTPPLLPSSPSPSPSPSQNATQTTTDSSNKTAPTPASSVTIMATDTAQQSTVPTSKANEILASVKATTLGVSSDSPGTTTLAQQVSGPVNTTVARGGGSGNPTTTIESPKSTKSADTTTVATSTATAKPNTTSSQNGAEDTTNSGGKSSHSVTTDLTSTKAEHLTTPHPTSPLSPRQPTSTHPVATPTSSGHDHLMKISSSSSTVAIPGYTFTSPGMTTTLPSSVISQRTQQTSSQMPASSTAPSSQETVQPTSPATALRTPTLPETMSSSPTAASTTHRYPKTPSPTVAHESNWAKCEDLETQTQSEKQLVLNLTGNTLCAGGASDEKLISLICRAVKATFNPAQDKCGIRLASVPGSQTVVVKEITIHTKLPAKDVYERLKDKWDELKEAGVSDMKLGDQGPPEEAEDRFSMPLIITIVCMASFLLLVAALYGCCHQRLSQRKDQQRLTEELQTVENGYHDNPTLEVMETSSEMQEKKVVSLNGELGDSWIVPLDNLTKDDLDEEEDTHL

SEQ ID NO: 58282 - protein, 558 aa, Homo sapiens
MRCALALSALLLLLSTPPLLPSSPSPSPSPSQNATQTTTDSSNKTAPTPASSVTIMATDTAQQSTVPTSKANEILASVKATTLGVSSDSPGTTTLAQQVSGPVNTTVARGGGSGNPTTTIESPKSTKSADTTTVATSTATAKPNTTSSQNGAEDTTNSGGKSSHSVTTDLTSTKAEHLTTPHPTSPLSPRQPTSTHPVATPTSSGHDHLMKISSSSSTVAIPGYTFTSPGMTTTLLETVFHHVSQAGLELLTSGDLPTLASQSAGITASSVISQRTQQTSSQMPASSTAPSSQETVQPTSPATALRTPTLPETMSSSPTAASTTHRYPKTPSPTVAHESNWAKCEDLETQTQSEKQLVLNLTGNTLCAGGASDEKLISLICRAVKATFNPAQDKCGIRLASVPGSQTVVVKEITIHTKLPAKDVYERLKDKWDELKEAGVSDMKLGDQGPPEEAEDRFSMPLIITIVCMASFLLLVAALYGCCHQRLSQRKDQQRLTEELQTVENGYHDNPTLEVMETSSEMQEKKVVSLNGELGDSWIVPLDNLTKDDLDEEEDTHL

SEQ ID NO: 58283 - protein, 526 aa, Homo sapiens
MRCALALSALLLLLSTPPLLPSSPSPSPSPSQNATQTTTDSSNKTAPTPASSVTIMATDTAQQSTVPTSKANEILASVKATTLGVSSDSPGTTTLAQQVSGPVNTTVARGGGSGNPTTTIESPKSTKSADTTTVATSTATAKPNTTSSQNGAEDTTNSGGKSSHSVTTDLTSTKAEHLTTPHPTSPLSPRQPTSTHPVATPTSSGHDHLMKISSSSSTVAIPGYTFTSPGMTTTLPSSVISQRTQQTSSQMPASSTAPSSQETVQPTSPATALRTPTLPETMSSSPTAASTTHRYPKTPSPTVAHESNWVTPAGVGTQTRVEEALRQALTHSLLPAGGASDEKLISLICRAVKATFNPAQDKCGIRLASVPGSQTVVVKEITIHTKLPAKDVYERLKDKWDELKEAGVSDMKLGDQGPPEEAEDRFSMPLIITIVCMASFLLLVAALYGCCHQRLSQRKDQQRLTEELQTVENGYHDNPTLEVMETSSEMQEKKVVSLNGELGDSWIVPLDNLTKDDLDEEEDTHL

SEQ ID NO: 58284 - protein, 560 aa, Homo sapiens
MRCALALSALLLLLSTPPLLPSSPSPSPSPSQNETATQTTTDSSNKTAPTPASSVTIMATDTAQQSTVPTSKANEILASVKATTLGVSSDSPGTTTLAQQVSGPVNTTVARGGGSGNPTTTIESPKSTKSADTTTVATSTATAKPNTTSSQNGAEDTTNSGGKSSHSVTTDLTSTKAEHLTTPHPTSPLSPRQPTSTHPVATPTSSGHDHLMKISSSSSTVAIPGYTFTSPGMTTTLLETVFHHVSQAGLELLTSGDLPTLASQSAGITASSVISQRTQQTSSQMPASSTAPSSQETVQPTSPATALRTPTLPETMSSSPTAASTTHRYPKTPSPTVAHESNWAKCEDLETQTQSEKQLVLNLTGNTLCAGGASDEKLISLICRAVKATFNPAQDKCGIRLASVPGSQTVVVKEITIHTKLPAKDVYERLKDKWDELKEAGVSDMKLGDQGPPEEAEDRFSMPLIITIVCMASFLLLVAALYGCCHQRLSQRKDQQRLTEELQTVENGYHDNPTLEVMETSSEMQEKKVVSLNGELGDSWIVPLDNLTKDDLDEEEDTHL

SEQ ID NO: 58285 - protein, 516 aa, Homo sapiens
MRCALALSALLLLLSTSPSPSQNATQTTTDSSNKTAPTPASSVTIMATDTAQQSTVPTSKANEILASVKATTLGVSSDSPGTTTLAQQVSGPVNTTVARGGGSGNPTTTIESPKSTKSADTTTVATSTATAKPNTTSSQNGAEDTTNSGGKSSHSVTTDLTSTKAEHLTTPHPTSPLSPRQPTSTHPVATPTSSGHDHLMKISSSSSTVAIPGYTFTSPGMTTTLPSSVISQRTQQTSSQMPASSTAPSSQETVQPTSPATALRTPTLPETMSSSPTAASTTHRYPKTPSPTVAHESNWAKCEDLETQTQSEKQLVLNLTGNTLCAGGASDEKLISLICRAVKATFNPAQDKCGIRLASVPGSQTVVVKEITIHTKLPAKDVYERLKDKWDELKEAGVSDMKLGDQGPPEEAEDRFSMPLIITIVCMASFLLLVAALYGCCHQRLSQRKDQQRLTEELQTVENGYHDNPTLEVMETSSEMQEKKVVSLNGELGDSWIVPLDNLTKDDLDEEEDTHL

SEQ ID NO: 58286 - protein, 661 aa, Homo sapiens
MEGARARGAQLRLGERVRPVGRRSAPGRSRFRQPWRPGASDSAPPAGTMAQSRVLLLLLLLPPQLHLGPVLAVRAPGFGRSGGHSLSPEENEFAEEEPVLVLSPEEPGPGPAAVSCPRDCACSQEGVVDCGGIDLREFPGDLPEHTNHLSLQNNQLEKIYPEELSRLHRLETLNLQNNRLTSRGLPEKAFEHLTNLNYLYLANNKLTLAPRFLPNALISVDFAANYLTKIYGLTFGQKPNLRSVYLHNNKLADAGLPDNMFNGSSNVEVLILSSNFLRHVPKHLPPALYKLHLKNNKLEKIPPGAFSELSSLRELYLQNNYLTDEGLDNETFWKLSSLEYLDLSSNNLSRVPAGLPRSLVLLHLEKNAIRSVDANVLTPIRSLEYLLLHSNQLREQGIHPLAFQGLKRLHTVHLYNNALERVPSGLPRRVRTLMILHNQITGIGREDFATTYFLEELNLSYNRITSPQVHRDAFRKLRLLRSLDLSGNRLHTLPPGLPRNVHVLKVKRNELAALARGALVGMAQLRELYLTSNRLRSRALGPRAWVDLAHLQLLDIAGNQLTEIPEGLPESLEYLYLQNNKISAVPANAFDSTPNLKGIFLRFNKLAVGSVVDSAFRRLKHLQVLDIEGNLEFGDISKDRGRLGKEKEEEEEEEEEEEETR

SEQ ID NO: 58287 - protein, 642 aa, Homo sapiens
MEGEEAEQPAWFRQPWRPGASDSAPPAGTMAQSRVLLLLLLLPPQLHLGPVLAVRAPGFGRSGGHSLSPEENEFAEEEPVLVLSPEEPGPGPAAVSCPRDCACSQEGVVDCGGIDLREFPGDLPEHTNHLSLQNNQLEKIYPEELSRLHRLETLNLQNNRLTSRGLPEKAFEHLTNLNYLYLANNKLTLAPRFLPNALISVDFAANYLTKIYGLTFGQKPNLRSVYLHNNKLADAGLPDNMFNGSSNVEVLILSSNFLRHVPKHLPPALYKLHLKNNKLEKIPPGAFSELSSLRELYLQNNYLTDEGLDNETFWKLSSLEYLDLSSNNLSRVPAGLPRSLVLLHLEKNAIRSVDANVLTPIRSLEYLLLHSNQLREQGIHPLAFQGLKRLHTVHLYNNALERVPSGLPRRVRTLMILHNQITGIGREDFATTYFLEELNLSYNRITSPQVHRDAFRKLRLLRSLDLSGNRLHTLPPGLPRNVHVLKVKRNELAALARGALVGMAQLRELYLTSNRLRSRALGPRAWVDLAHLQLLDIAGNQLTEIPEGLPESLEYLYLQNNKISAVPANAFDSTPNLKGIFLRFNKLAVGSVVDSAFRRLKHLQVLDIEGNLEFGDISKDRGRLGKEKEEEEEEEEEEEETR

SEQ ID NO: 58288 - protein, 519 aa, Homo sapiens
MEGARARGAQLRLGERVRPVGRRSAPGRSRFRQPWRPGASDSAPPAGTMAQSRVLLLLLLLPPQLHLGPVLAVRAPGFGRSGGHSLSPEENEFAEEEPVLVLSPEEPGPGPAAVSCPRDCACSQEGVVDCGGIDLREFPGDLPEHTNHLSLQNNKLEKIPPGAFSELSSLRELYLQNNYLTDEGLDNETFWKLSSLEYLDLSSNNLSRVPAGLPRSLVLLHLEKNAIRSVDANVLTPIRSLEYLLLHSNQLREQGIHPLAFQGLKRLHTVHLYNNALERVPSGLPRRVRTLMILHNQITGIGREDFATTYFLEELNLSYNRITSPQVHRDAFRKLRLLRSLDLSGNRLHTLPPGLPRNVHVLKVKRNELAALARGALVGMAQLRELYLTSNRLRSRALGPRAWVDLAHLQLLDIAGNQLTEIPEGLPESLEYLYLQNNKISAVPANAFDSTPNLKGIFLRFNKLAVGSVVDSAFRRLKHLQVLDIEGNLEFGDISKDRGRLGKEKEEEEEEEEEEEETR

SEQ ID NO: 58289 - protein, 364 aa, Homo sapiens
MARAMAAAWPLLLVALLVLSWPPPGTGDVVVQAPTQVPGFLGDSVTLPCYLQVPNMEVTHVSQLTWARHGESGSMAVFHQTQGPSYSESKRLEFVAARLGAELRNASLRMFGLRVEDEGNYTCLFVTFPQGSRSVDIWLRVLAKPQNTAEVQKVQLTGEPVPMARCVSTGGRPPAQITWHSDLGGMPNTSQVPGFLSGTVTVTSLWILVPSSQVDGKNVTCKVEHESFEKPQLLTVNLTVYYPPEVSISGYDNNWYLGQNEATLTCDARSNPEPTGYNWSTTMGPLPPFAVAQGAQLLIRPVDKPINTTLICNVTNALGARQAELTVQVKGTEHASASANGHVSYSAVSRENSSSQDPQTEGTR

SEQ ID NO: 58290 - protein, 372 aa, Homo sapiens
MARAMAAAWPLLLVALLVLSWPPPGTGDVVVQAPTQVPGFLGDSVTLPCYLQVPNMEVTHVSQLTWARHGESGSMAVFHQTQGPSYSESKRLEFVAARLGAELRNASLRMFGLRVEDEGNYTCLFVTFPQGSRSVDIWLRVLAKPQNTAEVQKVQLTGEPVPMARCVSTGGRPPAQITWHSDLGGMPNTSQVPGFLSGTVTVTSLWILVPSSQVDGKNVTCKVEHESFEKPQLLTVNLTVYYPPEVSISGYDNNWYLGQNEATLTCDARSNPEPTGYNWSTTMGPLPPFAVAQGAQLLIRPVDKPINTTLICNVTNALGARQAELTVQVKEGPPSEHSGTEHASASANGHVSYSAVSRENSSSQDPQTEGTR

SEQ ID NO: 58291 - protein, 392 aa, Homo sapiens
MARAMAAAWPLLLVALLVLSWPPPGTGDVVVQAPTQVPGFLGDSVTLPCYLQVPNMEVTHVSQLTWARHGESGSMAVFHQTQGPSYSESKRLEFVAARLGAELRNASLRMFGLRVEDEGNYTCLFVTFPQGSRSVDIWLRVLAKPQNTAEVQKVQLTGEPVPMARCVSTGGRPPAQITWHSDLGGMPNTSQVPGFLSGTVTVTSLWILVPSSQVDGKNVTCKVEHESFEKPQLLTVNLTVYYPPEVSISGYDNNWYLGQNEATLTCDARSNPEPTGYNWSTTMGPLPPFAVAQGAQLLIRPVDKPINTTLICNVTNALGARQAELTVQVKEGPPSEHSGISRNAIIFLVLGILVFLILLGIGIYFYWSKCSREVLWHCHLCPSSEHHQSCRN

SEQ ID NO: 58292 - protein, 417 aa, Homo sapiens
MARAMAAAWPLLLVALLVLSWPPPGTGDVVVQAPTQVPGFLGDSVTLPCYLQVPNMEVTHVSQLTWARHGESGSMAVFHQTQGPSYSESKRLEFVAARLGAELRNASLRMFGLRVEDEGNYTCLFVTFPQGSRSVDIWLRVLAKPQNTAEVQKVQLTGEPVPMARCVSTGGRPPAQITWHSDLGGMPNTSQVPGFLSGTVTVTSLWILVPSSQVDGKNVTCKVEHESFEKPQLLTVNLTVYYPPEVSISGYDNNWYLGQNEATLTCDARSNPEPTGYNWSTTMGPLPPFAVAQGAQLLIRPVDKPINTTLICNVTNALGARQAELTVQVKEGPPSEHSGISRNAIIFLVLGILVFLILLGIGIYFYWSKCSREVLWHCHLCPSSTEHASASANGHVSYSAVSRENSSSQDPQTEGTR

SEQ ID NO: 58293 - protein, 517 aa, Homo sapiens
MARMGLAGAAGRWWGLALGLTAFFLPGVHSQVVQVNDSMYGFIGTDVVLHCSFANPLPSVKITQVTWQKSTNGSKQNVAIYNPSMGVSVLAPYRERVEFLRPSFTDGTIRLSRLELEDEGVYICEFATFPTGNRESQLNLTVMAKPTNWIEGTQAVLRAKKGQDDKVLVATCTSANGKPPSVVSWETRLKGEAEYQEIRNPNGTVTVISRYRLVPSREAHQQSLACIVNYHMDRFKESLTLNVQYEPEVTIEGFDGNWYLQRMDVKLTCKADANPPATEYHWTTLNGSLPKGVEAQNRTLFFKGPINYSLAGTYICEATNPIGTRSGQVEVNITEFPYTPSPPEHGRRAGPVPTAIIGGVAGSILLVLIVVGGIVVALRRRRHTFKGDYSTKKHVYGNGYSKAGIPQHHPPMAQNLQYPDDSDDEKKAGPLGGSSYEEEEEEEEGGGGGERKVGGPHPKYDEDAKRPYFTVDEAEARQDGYGDRTLGYQYDPEQLDLAENMVSQNDGSFISKKEWYV

SEQ ID NO: 58294 - protein, 352 aa, Homo sapiens
MARMGLAGAAGRWWGLALGLTAFFLPGVHSQVVQVNDSMYGFIGTDVVLHCSFANPLPSVKITQVTWQKSTNGSKQNVAIYNPSMGVSVLAPYRERVEFLRPSFTDGTIRLSRLELEDEGVYICEFATFPTGNRESQLNLTVMAKPTNWIEGTQAVLRAKKGQDDKVLVATCTSANGKPPSVVSWETRLKGEAEYQEIRNPNGTVTVISRYRLVPSREAHQQSLACIVNYHMDRFKESLTLNVQYEPEVTIEGFDGNWYLQRMDVKLTCKADANPPATEYHWTTLNGSLPKGVEAQNRTLFFKGPINYSLAGTYICEATNPIGTRSGQVEVNITAFCQLIYPGKGRTRARMF

SEQ ID NO: 58295 - protein, 458 aa, Homo sapiens
MARMGLAGAAGRWWGLALGLTAFFLPGVHSQVVQVNDSMYGFIGTDVVLHCSFANPLPSVKITQVTWQKSTNGSKQNVAIYNPSMGVSVLAPYRERVEFLRPSFTDGTIRLSRLELEDEGVYICEFATFPTGNRESQLNLTVMAKPTNWIEGTQAVLRAKKGQDDKVLVATCTSANGKPPSVVSWETRLKGEAEYQEIRNPNGTVTVISRYRLVPSREAHQQSLACIVNYHMDRFKESLTLNVQYEPEVTIEGFDGNWYLQRMDVKLTCKADANPPATEYHWTTLNGSLPKGVEAQNRTLFFKGPINYSLAGTYICEATNPIGTRSGQVEVNITEKPRPQRGLGSAARLLAGTVAVFLILVAVLTVFFLYNRQQKSPPETDGAGTDQPLSQKPEPSPSRQSSLVPEDIQVVHLDPGRQQQQEEEDLQKLSLQPPYYDLGVSPSYHPSVRTTEPRGECP

SEQ ID NO: 58296 - protein, 538 aa, Homo sapiens
MARAAALLPSRSPPTPLLWPLLLLLLLETGAQDVRVQVLPEVRGQLGGTVELPCHLLPPVPGLYISLVTWQRPDAPANHQNVAAFHPKMGPSFPSPKPGSERLSFVSAKQSTGQDTEAELQDATLALHGLTVEDEGNYTCEFATFPKGSVRGMTWLRVIAKPKNQAEAQKVTFSQDPTTVALCISKEGRPPARISWLSSLDWEAKETQVSGTLAGTVTVTSRFTLVPSGRADGVTVTCKVEHESFEEPALIPVTLSVRYPPEVSISGYDDNWYLGRTDATLSCDVRSNPEPTGYDWSTTSGTFPTSAVAQGSQLVIHAVDSLFNTTFVCTVTNAVGMGRAEQVIFVRETPNTAGAGATGGIIGGIIAAIIATAVAATGILICRQQRKEQTLQGAEEDEDLEGPPSYKPPTPKAKLEAQEMPSQLFTLGASEHSPLKTPYFDAGASCTEQEMPRYHELPTLEERSGPLHPGATSLGSPIPVPPGPPAVEDVSLDLEDEEGEEEEEYLDKINPIYDALSYSSPSDSYQGKGFVMSRAMYV

SEQ ID NO: 58297 - protein, 479 aa, Homo sapiens
MARAAALLPSRSPPTPLLWPLLLLLLLETGAQDVRVQVLPEVRGQLGGTVELPCHLLPPVPGLYISLVTWQRPDAPANHQNVAAFHPKMGPSFPSPKPGSERLSFVSAKQSTGQDTEAELQDATLALHGLTVEDEGNYTCEFATFPKGSVRGMTWLRVIAKPKNQAEAQKVTFSQDPTTVALCISKEGRPPARISWLSSLDWEAKETQVSGTLAGTVTVTSRFTLVPSGRADGVTVTCKVEHESFEEPALIPVTLSVRYPPEVSISGYDDNWYLGRTDATLSCDVRSNPEPTGYDWSTTSGTFPTSAVAQGSQLVIHAVDSLFNTTFVCTVTNAVGMGRAEQVIFVRETPRASPRDVGPLVWGAVGGTLLVLLLLAGGSLAFILLRVRRRRKSPGGAGGGASGDGGFYDPKAQVLGNGDPVFWTPVVPGPMEPDGKDEEEEEEEEKAEKGLMLPPPPALEDDMESQLDGSLISRRAVYV

SEQ ID NO: 58298 - protein, 366 aa, Homo sapiens
MARTLRPSPLCPGGGKAQLSSASLLGAGLLLQPPTPPPLLLLLFPLLLFSRLCGALAGPIIVEPHVTAVWGKNVSLKCLIEVNETITQISWEKIHGKSSQTVAVHHPQYGFSVQGEYQGRVLFKNYSLNDATITLHNIGFSDSGKYICKAVTFPLGNAQSSTTVTVLVEPTVSLIKGPDSLIDGGNETVAAICIAATGKPVAHIDWEGDLGEMESTTTSFPNETATIISQYKLFPTRFARGRRITCVVKHPALEKDIRYSFILDIQYAPEVSVTGYDGNWFVGRKGVNLKCNADANPPPFKSVWSRLDGQWPDGLLASDNTLHFVHPLTFNYSGVYICKVTNSLGQRSDQKVIYISAYNSVASLNC

SEQ ID NO: 58299 - protein, 549 aa, Homo sapiens
MARTLRPSPLCPGGGKAQLSSASLLGAGLLLQPPTPPPLLLLLFPLLLFSRLCGALAGPIIVEPHVTAVWGKNVSLKCLIEVNETITQISWEKIHGKSSQTVAVHHPQYGFSVQGEYQGRVLFKNYSLNDATITLHNIGFSDSGKYICKAVTFPLGNAQSSTTVTVLVEPTVSLIKGPDSLIDGGNETVAAICIAATGKPVAHIDWEGDLGEMESTTTSFPNETATIISQYKLFPTRFARGRRITCVVKHPALEKDIRYSFILDIQYAPEVSVTGYDGNWFVGRKGVNLKCNADANPPPFKSVWSRLDGQWPDGLLASDNTLHFVHPLTFNYSGVYICKVTNSLGQRSDQKVIYISDPPTTTTLQPTIQWHPSTADIEDLATEPKKLPFPLSTLATIKDDTIATIIASVVGGALFIVLVSVLAGIFCYRRRRTFRGDYFAKNYIPPSDMQKESQIDVLQQDELDSYPDSVKKENKNPVNNLIRKDYLEEPEKTQWNNVENLNRFERPMDYYEDLKMGMKFVSDEHYDENEDDLVSHVDGSVISRREWYV

SEQ ID NO: 58300 - protein, 487 aa, Homo sapiens
MAEGWRWCFVRRTPGLLRGPLLPRSFSGNPRALAGPIIVEPHVTAVWGKNVSLKCLIEVNETITQISWEKIHGKSSQTVAVHHPQYGFSVQGEYQGRVLFKNYSLNDATITLHNIGFSDSGKYICKAVTFPLGNAQSSTTVTVLVEPTVSLIKGPDSLIDGGNETVAAICIAATGKPVAHIDWEGDLGEMESTTTSFPNETATIISQYKLFPTRFARGRRITCVVKHPALEKDIRYSFILDIQYAPEVSVTGYDGNWFVGRKGVNLKCNADANPPPFKSVWSRLDGQWPDGLLASDNTLHFVHPLTFNYSGVYICKVTNSLGQRSDQKVIYISDVPFKQTSSIAVAGAVIGAVLALFIIAIFVTVLLTPRKKRPSYLDKVIDLPPTHKPPPLYEERSPPLPQKDLFQPEHLPLQTQFKEREVGNLQHSNGLNSRSFDYEDENPVGEDGIQQMYPLYNQMCYQDRSPGKHHQNNDPKRVYIDPREHYV

SEQ ID NO: 58301 - protein, 510 aa, Homo sapiens
MPLSLGAEMWGPEAWLLLLLLLASFTGRCPAGELETSDVVTVVLGQDAKLPCFYRGDSGEQVGQVAWARVDAGEGAQELALLHSKYGLHVSPAYEGRVEQPPPPRNPLDGSVLLRNAVQADEGEYECRVSTFPAGSFQARLRLRVLVPPLPSLNPGPALEEGQGLTLAASCTAEGSPAPSVTWDTEVKGTTSSRSFKHSRSAAVTSEFHLVPSRSMNGQPLTCVVSHPGLLQDQRITHILHVSFLAEASVRGLEDQNLWHIGREGAMLKCLSEGQPPPSYNWTRLDGPLPSGVRVDGDTLGFPPLTTEHSGIYVCHVSNEFSSRDSQVTVDVLDPQEDSGKQVDLVSASVVVVGVIAALLFCLLVVVVVLMSRYHRRKAQQMTQKYEEELTLTRENSIRRLHSHHTDPRSQPEESVGLRAEGHPDSLKDNSSCSVMSEEPEGRSYSTLTTVREIETQTELLSPGSGRAEEEEDQDEGIKQAMNHFVQENGTLRAKPTGNGIYINGRGHLV

SEQ ID NO: 58302 - protein, 219 aa, Homo sapiens
MLKCLSEGQPPPSYNWTRLDGPLPSGVRVDGDTLGFPPLTTEHSGIYVCHVSNEFSSRDSQVTVDVLDPQEDSGKQVDLVSASVVVVGVIAALLFCLLVVVVVLMSRYHRRKAQQMTQKYEEELTLTRENSIRRLHSHHTDPRSQSEEPEGRSYSTLTTVREIETQTELLSPGSGRAEEEEDQDEGIKQAMNHFVQENGTLRAKPTGNGIYINGRGHLV

SEQ ID NO: 58303 - protein, 685 aa, Homo sapiens
MELLRTITYQPAASTKMCEQALGKGCGADSKKKRPPQPPEESQPPQSQAQVPPAAPHHHHHHSHSGPEISRIIVDPTTGKRYCRGKVLGKGGFAKCYEMTDLTNNKVYAAKIIPHSRVAKPHQREKIDKEIELHRILHHKHVVQFYHYFEDKENIYILLEYCSRRSMAHILKARKVLTEPEVRYYLRQIVSGLKYLHEQEILHRDLKLGNFFINEAMELKVGDFGLAARLEPLEHRRRTICGTPNYLSPEVLNKQGHGCESDIWALGCVMYTMLLGRPPFETTNLKETYRCIREARYTMPSSLLAPAKHLIASMLSKNPEDRPSLDDIIRHDFFLQGFTPDRLSSSCCHTVPDFHLSSPAKNFFKKAAAALFGGKKDKARYIDTHNRVSKEDEDIYKLRHDLKKTSITQQPSKHRTDEELQPPTTTVARSGTPAVENKQQIGDAIRMIVRGTLGSCSSSSECLEDSTMGSVADTVARVLRGCLENMPEADCIPKEQLSTSFQWVTKWVDYSNKYGFGYQLSDHTVGVLFNNGAHMSLLPDKKTVHYYAELGQCSVFPATDAPEQFISQVTVLKYFSHYMEENLMDGGDLPSVTDIRRPRLYLLQWLKSDKALMMLFNDGTFQVNFYHDHTKIIICSQNEEYLLTYINEDRISTTFRLTTLLMSGCSSELKNRMEYALNMLLQRCN

SEQ ID NO: 58304 - protein, 387 aa, Homo sapiens
MELLRTITYQPAASTKMCEQALGKGCGADSKKKRPPQPPEESQPPQSQAQVPPEISRIIVDPTTGKRYCRGKVLGKGGFAKCYEMTDLTNNKVYAAKIIPHSRVAKPHQREKIDKEIELHRILHHKHVVQFYHYFEDKENIYILLEYCSRRSMAHILKARKVLTEPEVRYYLRQIVSGLKYLHEQEILHRDLKLGNFFINEAMELKVGDFGLAARLEPLEHRRRTICGTPNYLSPEVLNKQGHGCESDIWALGCVMYTMLLGRPPFETTNLKETYRCIREARYTMPSSLLAPAKHLIASMLSKNPEDRPSLDDIIRHDFFCRASLRTDCLLAVVIQFQISTYQAQLRISLRKQLLLFLVAKKTKQDILTHIIECLKKMKTSTSLGMI

SEQ ID NO: 58305 - protein, 379 aa, Homo sapiens
MELLRTITYQPAASTKMCEQALGKGCGADSKKKRPPQPPEESQPPQSQAQVPPAAPHHHHHHSHSGPEISRIIVDPTTGKRYCRGKVLGKGGFAKCYEMTDLTNNKVYAAKIIPHSRVAKPHQREKIDKEIELHRILHHKHVVQFYHYFEDKENIYILLEYCSRRSMAHILKARKVLTEPEVRYYLRQIVSGLKYLHEQEILHRDLKLGNFFINEAMELKVGDFGLAARLEPLEHRRRTICGTPNYLSPEVLNKQGHGCESDIWALGCVMYTMLLGRPPFETTNLKETYRCIREARYTMPSSLLAPAKHLIASMLSKNPEDRPSLDDIIRHDFFLQGFTPDRLSSSCCHTVPDFHLSSPAKNFFKRAAEHIISVGHQMG

SEQ ID NO: 58306 - protein, 491 aa, Homo sapiens
VDLLRAGEVPKPFPTHYKDLWDNKHVKMPCSEQNLYPVEDENGERTAGSRWELIQTALLNKFTRPQNLKDAILKYNVAYSKKWDFTALIDFWDKVLEEAEAQHLYQSILPDMVKIALCLPNICTQPIPLLKQKMNHSITMSQEQIASLLANAFFCTFPRRNAKMKSEYSSYPDINFNRLFEGRSSRKPEKLKTLFCYFRRVTEKKPTGLVTFTRQSLEDFPEWERCEKPLTRLHVTYEGTIEENGQGMLQVDFANRFVGGGVTSAGLVQEEIRFLINPELIISRLFTEVLDHNECLIITGTEQYSEYTGYAETYRWSRSHEDGSERDDWQRRCTEIVAIDALHFRRYLDQFVPEKMRRELNKAYCGFLRPGVSSENLSAVATGNWGCGAFGGDARLKALIQILAAAAAERDVVYFTFGDSELMRDIYSMHIFLTERKLTVGDVYKLLLRYYNEECRNCSTPGPDIKLYPFIYHAVESCAETADHSGQRTGT

SEQ ID NO: 58307 - protein, 192 aa, Homo sapiens
  VARIANT 1: note = MOD_RES - Any amino acid
XTEQYSEYTGYAETYRWSRSHEDGSERDDWQRRCTEIVAIDALHFRRYLDQFVPEKMRRELNKAYCGFLRPGVSSENLSAVATGNWGCGAFGGDARLKALIQILAAAAAERDVVYFTFGDSELMRDIYSMHIFLTERKLTVGDVYKLLLRYYNEECRNCSTPGPDIKLYPFIYHAVESCAETADHSGQRTGT

SEQ ID NO: 58308 - protein, 155 aa, Homo sapiens
MAESSDKLYRVEYAKSGRASCKKCSESIPKDSLRMAIMVQSPMFDGKVPHWYHFSCFWKVGHSIRHPDVEVDGFSELRWDDQQKVKKTAEAGGVTGVYILGQHGHSAPTLKLPGGPRLREQSKPPPACPLPHVQIKRMVPMLFQQHLLDSASSVA

SEQ ID NO: 58309 - protein, 108 aa, Homo sapiens
MAESSDKLYRVEYAKSGRASCKKCSESIPKDSLRMAIMVQSPMFDGKVPHWYHFSCFWKVGHSIRHPDVEVDGFSELRWDDQQKVKKTAEAGGVTEPPIPCGIEVMGR

SEQ ID NO: 58310 - protein, 108 aa, Homo sapiens; identical to SEQ ID NO: 58309

SEQ ID NO: 58311 - protein, 1014 aa, Homo sapiens
MAESSDKLYRVEYAKSGRASCKKCSESIPKDSLRMAIMVQSPMFDGKVPHWYHFSCFWKVGHSIRHPDVEVDGFSELRWDDQQKVKKTAEAGGVTGKGQDGIGSKAEKTLGDFAAEYAKSNRSTCKGCMEKIEKGQVRLSKKMVDPEKPQLGMIDRWYHPGCFVKNREELGFRPEYSASQLKGFSLLATEDKEALKKQLPGVKSEGKRKGDEVDGVDEVAKKKSKKEKDKDSKLEKALKAQNDLIWNIKDELKKVCSTNDLKELLIFNKQQVPSGESAILDRVADGMVFGALLPCEECSGQLVFKSDAYYCTGDVTAWTKCMVKTQTPNRKEWVTPKEFREISYLKKLKVKKQDRIFPPETSASVAATPPPSTASAPAAVNSSASADKPLSNMKILTLGKLSRNKDEVKAMIEKLGGKLTGTANKASLCISTKKEVEKMNKKMEEVKEANIRVVSEDFLQDVSASTKSLQELFLAHILSPWGAEVKAEPVEVVAPRGKSGAALSKKSKGQVKEEGINKSEKRMKLTLKGGAAVDPDSGLEHSAHVLEKGGKVFSATLGLVDIVKGTNSYYKLQLLEDDKENRYWIFRSWGRVGTVIGSNKLEQMPSKEDAIEHFMKLYEEKTGNAWHSKNFTKYPKKFYPLEIDYGQDEEAVKKLTVNPGTKSKLPKPVQDLIKMIFDVESMKKAMVEYEIDLQKMPLGKLSKRQIQAAYSILSEVQQAVSQGSSDSQILDLSNRFYTLIPHDFGMKKPPLLNNADSVQAKVEMLDNLLDIEVAYSLLRGGSDDSSKDPIDVNYEKLKTDIKVVDRDSEEAEIIRKYVKNTHATTHNAYDLEVIDIFKIEREGECQRYKPFKQLHNRRLLWHGSRTTNFAGILSQGLRIAPPEAPVTGYMFGKGIYFADMVSKSANYCHTSQGDPIGLILLGEVALGNMYELKHASHISKLPKGKHSVKGLGKTTPDPSANISLDGVDVPLGTGISSGVNDTSLLYNEYIVYDIAQVNLKYLLKLKFNFKTSLW

SEQ ID NO: 58312 - protein, 250 aa, Homo sapiens
MAESSDKLYRVEYAKSGRASCKKCSESIPKDSLRMAIMVQSPMFDGKVPHWYHFSCFWKVGHSIRHPDVEVDGFSELRWDDQQKVKKTAEAGGVTGKGQDGIGSKAEKTLGDFAAEYAKSNRSTCKGCMEKIEKGQVRLSKKMVDPEKPQLGMIDRWYHPGCFVKNREELGFRPEYSASQLKGFSLLATEDKEALKKQLPGVKSEGKRKGDEVDGVDEVAKKKSKKEKDKKKKKKKKKERKKKKKKRKKK

SEQ ID NO: 58313 - protein, 710 aa, Homo sapiens
MDFSMVAGAAAYNEKSETGALGENYSWQIPINHNDFKILKNNERQLCEVLQNKFGCISTLVSPVQEGNSKSLQVFRKMLTPRIELSVWKDDLTTHAVDAVVNAANEDLLHGGGLALALVKAGGFEIQEESKQFVARYGKVSAGEIAVTGAGRLPCKQIIHAVGPRWMEWDKQGCTGKLQRAIVSILNYVIYKNTHIKTVAIPALSSGIFQFPLNLCTKTIVETIRVSLQGKPMMSNLKEIHLVSNEDPTVAAFKAASEFILGKSELGQETTPSFNAMVVNNLTLQIVQGHIEWQTADVIVNSVNPHDITVGPVAKSILQQAGVEMKSEFLATKAKQFQRSQLVLVTKGFNLFCKYIYHVLWHSEFPKPQILKHAMKECLEKCIEQNITSISFPALGTGNMEIKKETAAEILFDEVLTFAKDHVKHQLTVKFVIFPTDLEIYKAFSSEMAKRSKMLSLNNYSVPQSTREEKRENGLEARSPAINLMGFNVEEMYEAHAWIQRILSLQNHHIIENNHILYLGRKEHDILSQLQKTSSVSITEIISPGRTELEIEGARADLIEVVMNIEDMLCKVQEEMARKKERGLWRSLGQWTIQQQKTQDEMKENIIFLKCPVPPTQELLDQKKQFEKCGLQVLKVEKIDNEVLMAAFQRKKKMMEEKLHRQPVSHRLFQQVPYQFCNVVCRVGFQRMYSTPCGRCQCLIIGATLWNLVS

SEQ ID NO: 58314 - protein, 819 aa, Homo sapiens
MDFSMVAGAAAYNEKSETGALGENYSWQIPINHNDFKILKNNERQLCEVLQNKFGCISTLVSPVQEGNSKSLQVFRKMLTPRIELSVWKDDLTTHAVDAVVNAANEDLLHGGGLALALVKAGGFEIQEESKQFVARYGKVSAGEIAVTGAGRLPCKQIIHAVGPRWMEWDKQGCTGKLQRAIVSILNYVIYKNTHIKTVAIPALSSGIFQFPLNLCTKTIVETIRVSLQGKPMMSNLKEIHLVSNEDPTVAAFKAASEFILGKSELGQETTPSFNAMVVNNLTLQIVQGHIEWQTADVIVNSVNPHDITVGPVAKSILQQAGVEMKSEFLATKAKQFQRSQLVLVTKGFNLFCKYIYHVLWHSEFPKPQILKHAMKECLEKCIEQNITSISFPALGTGNMEIKKETAAEILFDEVLTFAKDHVKHQLTVKFVIFPTDLEIYKAFSSEMAKRSKMLSLNNYSVPQSTREEKRENGLEARSPAINLMGFNVEEMYEAHAWIQRILSLQNHHIIENNHILYLGRKEHDILSQLQKTSSVSITEIISPGRTELEIEGARADLIEVVMNIEDMLCKVQEEMARKKERGLWRSLGQWTIQQQKTQDEMKENIIFLKCPVPPTQELLDQKKQFEKCGLQVLKVEKIDNEVLMAAFQRKKKMMEEKLHRQPVSHRLFQQVPYQFCNVVCRVGFQRMYSTPCDPKYGAGIYFTKNLKNLAEKAKKISAADKLIYVFEAEVLTGFFCQGHPLNIVPPPLSPGAIDGHDSVVDNVSSPETFVIFSGMQAIPQYLWTCTQEYVQSQDYSSGPMRPFAQHPWRGFASGSPVD

SEQ ID NO: 58315 - protein, 701 aa, Homo sapiens
MAQAGVVGEVTQVLCAAGGALELPELRRRLRMGLSADALERLLRQRGRFVVAVRAGGAAAAPERVVLAASPLRLCRAHQGSKPGCVGLCAQLHLCRFMVYGACKFLRAGKNCRNSHSLTTEHNLSVLRTHGVDHLSYNELCQLLFQNDPWLLPEICQHYNKGDGPHGSCAFQKQCIKLHICQYFLQGECKFGTSCKRSHDFSNSENLEKLEKLGMSSDLVSRLPTIYRNAHDIKNKSSAPSRVPPLFVPQGTSERKDSSGSVSPNTLSQEEGDQICLYHIRKSCSFQDKCHRVHFHLPYRWQFLDRGKWEDLDNMELIEEAYCNPKIERILCSESASTFHSHCLNFNAMTYGATQARRLSTASSVTKPPHFILTTDWIWYWSDEFGSWQEYGRQGTVHPVTTVSSSDVEKAYLAYCTPGSDGQAATLKFQAGKHNYELDFKAFVQKNLVYGTTKKVCRRPKYVSPQDVTTMQTCNTKFPGPKSIPDYWDSSALPDPGFQKITLSSSSEEYQKVWNLFNRTLPFYFVQKIERVQNLALWEVYQWQKGQMQKQNGGKAVDERQLFHGTSAIFVDAICQQNFDWRVCGVHGTSYGKGSYFARDAAYSHHYSKSDTQTHTMFLARVLVGEFVRGNASFVRPPAKEGWSNAFYDSCVNSVSDPSIFVIFEKHQVYPEYVIQYTTSSKPSVTPSILLALGSLFSSRQ

SEQ ID NO: 58316 - protein, 130 aa, Homo sapiens
MFLARVLVGEFVRGNASFVRPPAKEGWSNAFYDSCVNSVSDPSIFVIFEKTRSTQSMSSSTPPPPSPRSHPPSCWPWAPCSAADSERTGVFQAFHLLCLEMAIWAFPFLFKQKLLMNCSLNIDLSMKLCS

SEQ ID NO: 58317 - protein, 282 aa, Homo sapiens
MSKLASFLGFSKQSPQKKNHLVLEKKTESATFRVCGENVTCVEYAISWLQDLIEKEQCPYTSEDECIKDFDEKEYQELNELQKKLNINISLDHKRPLIKVLGISRDVMQARDEIEAMIKRVRLAKEQESRADCISEFIEWQYNDNNTSHCFNKMTNLKLEDARREKKKTVDVKINHRHYTVNLNTYTATDTKGHSLSVQRLTKSKVDIPAHWSDMKQQNFCVVELLPSDPEYNTVASKFNQTCSHFRIEKVNVMIRACSPSYWEAEVEGLHEPRSLTPVWVT

SEQ ID NO: 58318 - protein, 797 aa, Homo sapiens
MYLRRLLRPLQMLLVKEGVQNAKTDVVVNSVPLDLVLSRGPLSKSLLEKAGPELQEELDTVGQGVAVSMGTVLKTSSWNLDCRYVLHVVAPEWRNGSTSSLKIMEDIIRECMEITESLSLKSIAFPAIGTGNLGFPKNIFAELIISEVFKFSSKNQLKTLQEVHFLLHPSDHENIQAFSDEFARRANGNLVSDKIPKAKDTQGFYGTVSSPDSGVYEMKIGSIIFQVASGDITKEEADVIVNSTSNSFNLKAGVSKAILECAGQNVERECSQQAQQRKNDYIITGGGFLRCKNIIHVIGGNDVKSSVSSVLQECEKKNYSSICLPAIGTGNAKQHPDKVAEAIIDAIEDFVQKGSAQSVKKVKVVIFLPQVLDVFYANMKKREGTQLSSQQSVMSKLASFLGFSKQSPQKKNHLVLEKKTESATFRVCGENVTCVEYAISWLQDLIEKEQCPYTSEDECIKDFDEKEYQELNELQKKLNINISLDHKRPLIKVLGISRDVMQARDEIEAMIKRVRLAKEQESRADCISEFIEWQYNDNNTSHCFNKMTNLKLEDARREKKKTVDVKINHRHYTVNLNTYTATDTKGHSLSVQRLTKSKVDIPAHWSDMKQQNFCVVELLPSDPEYNTVASKFNQTCSHFRIEKIERIQNPDLWNSYQAKKKTMDAKNGQTMNEKQLFHGTDAGSVPHVNRNGFNRSYAGKNAVAYGKGTYFAVNANYSANDTYSRPDANGRKHVYYVRVLTGIYTHGNHSLIVPPSKNPQNPTDLYDTVTDNVHHPSLFVAFYDYQAYPEYLITFRK

SEQ ID NO: 58319 - protein, 1720 aa, Homo sapiens
MAVPGSFPLLVEGSWGPDPPKNLNTKLQMYFQSPKRSGGGECEVRQDPRSPSRFLVFFYPEDVRQKVLERKNHELVWQGKGTFKLTVQLPATPDEIDHVFEEELLTKESKTKEDVKEPDTIRFVDDCTKHHSIKQLQLSPRLLEVTNTIRVENLPPGADDYSLKLFFENPYNGGGRVANVEYFPEESSALIEFFDRKVLDTIMATKLDFNKMPLSVFPYYASLGTALYGKEKPLIKLPAPFEESLDLPLWKFLQKKNHLIEEINDEMRRCHCELTWSQLSGKVTIRPAATLVNEGRPRIKTWQADTSTTLSSIRSKYKVNPIKVDPTMWDTIKNDVKDDRILIEFDTLKEMVILAGKSEDVQSIEVQVRELIESTTQKIKREEQSLKEKMIISPGRYFLLCHSSLLDHLLTECPEIEICYDRVTQHLCLKGPSADVYKAKCEIQEKVYTMAQKNIQVSPEIFQFLQQVNWKEFSKCLFIAQKILALYELEGTTVLLTSCSSEALLEAEKQMLSALNYKRIEVENKEVLHGKKWKGLTHNLLKKQNSSPNTVIINELTSETTAEVIITGCVKEVNETYKLLFNFVEQNMKIERLVEVKPSLVIDYLKTEKKLFWPKIKKVNVQVSFNPENKQKGILLTGSKTEVLKAVDIVKQVWDSVCVKSVHTDKPGAKQFFQDKARFYQSEIKRLFGCYIELQENEVMKEGGSPAGQKCFSRTVLAPGVVLIVQQGDLARLPVDVVVNASNEDLKHYGGLAAALSKAAGPELQADCDQIVKREGRLLPGNATISKAGKLPYHHVIHAVGPRWSGYEAPRCVYLLRRAVQLSLCLAEKYKYRSIAIPAISSGVFGFPLGRCVETIVSAIKENFQFKKDGHCLKEIYLVDVSEKTVEAFAEAVKTVFKATLPDTAAPPGLPPAAAGPGKTSWEKGSLVSPGGLQMLLVKEGVQNAKTDVVVNSVPLDLVLSRGPLSKSLLEKAGPELQEELDTVGQGVAVSMGTVLKTSSWNLDCRYVLHVVAPEWRNGSTSSLKIMEDIIRECMEITESLSLKSIAFPAIGTGNLGFPKNIFAELIISEVFKFSSKNQLKTLQEVHFLLHPSDHENIQAFSDEFARRANGNLVSDKIPKAKDTQGFYGTVSSPDSGVYEMKIGSIIFQVASGDITKEEADVIVNSTSNSFNLKVGVSKAILECAGQNVERECSQQAQQRKNDYIITGGGFLRCKNIIHVIGGNDVKSSVSSVLQECEKKNYSSICLPAIGTGNAKQHPDKVAEAIIDAIEDFVQKGSAQSVKKVKVVIFLPQVLDVFYANMKKREGTQLSSQQSVMSKLASFLGFSKQSPQKKNHLVLEKKTESATFRVCGENVTCVEYAISWLQDLIEKEQCPYTSEDECIKDFDEKEYQELNELQKKLNINISLDHKRPLIKVLGISRDVMQARDEIEAMIKRVRLAKEQESRADCISEFIEWQYNDNNTSHCFNKMTNLKLEDARREKKKTVDVKINHRHYTVNLNTYTATDTKGHSLSVQRLTKSKVDIPAHWSDMKQQNFCVVELLPSDPEYNTVASKFNQTCSHFRIEKIERIQNPDLWNSYQAKKKTMDAKNGQTMNEKQLFHGTDAGSVPHVNRNGFNRSYAGKNAVAYGKGTYFAVNANYSANDTYSRPDANGRKHVYYVRVLTGIYTHGNHSLIVPPSKNPQNPTDLYDTVTDNVHHPSLFVAFYDYQAYPEYLITFRK

SEQ ID NO: 58320 - protein, 1801 aa, Homo sapiens
MAVPGSFPLLVEGSWGPDPPKNLNTKLQMYFQSPKRSGGGECEVRQDPRSPSRFLVFFYPEDVRQKVLERKNHELVWQGKGTFKLTVQLPATPDEIDHVFEEELLTKESKTKEDVKEPDVSEELDTKLPLDGGLDKMEDIPEECENISSLVAFENLKANVTDIMLILLVENISGLSNDDFQVEIIRDFDVAVVTFQKHIDTIRFVDDCTKHHSIKQLQLSPRLLEVTNTIRVENLPPGADDYSLKLFFENPYNGGGRVANVEYFPEESSALIEFFDRKVLDTIMATKLDFNKMPLSVFPYYASLGTALYGKEKPLIKLPAPFEESLDLPLWKFLQKKNHLIEEINDEMRRCHCELTWSQLSGKVTIRPAATLVNEGRPRIKTWQADTSTTLSSIRSKYKVNPIKVDPTMWDTIKNDVKDDRILIEFDTLKEMVILAGKSEDVQSIEVQVRELIESTTQKIKREEQSLKEKMIISPGRYFLLCHSSLLDHLLTECPEIEICYDRVTQHLCLKGPSADVYKAKCEIQEKVYTMAQKNIQVSPEIFQFLQQVNWKEFSKCLFIAQKILALYELEGTTVLLTSCSSEALLEAEKQMLSALNYKRIEVENKEVLHGKKWKGLTHNLLKKQNSSPNTVIINELTSETTAEVIITGCVKEVNETYKLLFNFVEQNMKIERLVEVKPSLVIDYLKTEKKLFWPKIKKVNVQVSFNPENKQKGILLTGSKTEVLKAVDIVKQVWDSVCVKSVHTDKPGAKQFFQDKARFYQSEIKRLFGCYIELQENEVMKEGGSPAGQKCFSRTVLAPGVVLIVQQGDLARLPVDVVVNASNEDLKHYGGLAAALSKAAGPELQADCDQIVKREGRLLPGNATISKAGKLPYHHVIHAVGPRWSGYEAPRCVYLLRRAVQLSLCLAEKYKYRSIAIPAISSGVFGFPLGRCVETIVSAIKENFQFKKDGHCLKEIYLVDVSEKTVEAFAEAVKTVFKATLPDTAAPPGLPPAAAGPGKTSWEKGSLVSPGGLQMLLVKEGVQNAKTDVVVNSVPLDLVLSRGPLSKSLLEKAGPELQEELDTVGQGVAVSMGTVLKTSSWNLDCRYVLHVVAPEWRNGSTSSLKIMEDIIRECMEITESLSLKSIAFPAIGTGNLGFPKNIFAELIISEVFKFSSKNQLKTLQEVHFLLHPSDHENIQAFSDEFARRANGNLVSDKIPKAKDTQGFYGTVSSPDSGVYEMKIGSIIFQVASGDITKEEADVIVNSTSNSFNLKAGVSKAILECAGQNVERECSQQAQQRKNDYIITGGGFLRCKNIIHVIGGNDVKSSVSSVLQECEKKNYSSICLPAIGTGNAKQHPDKVAEAIIDAIEDFVQKGSAQSVKKVKVVIFLPQVLDVFYANMKKREGTQLSSQQSVMSKLASFLGFSKQSPQKKNHLVLEKKTESATFRVCGENVTCVEYAISWLQDLIEKEQCPYTSEDECIKDFDEKEYQELNELQKKLNINISLDHKRPLIKVLGISRDVMQARDEIEAMIKRVRLAKEQESRADCISEFIEWQYNDNNTSHCFNKMTNLKLEDARREKKKTVDVKINHRHYTVNLNTYTATDTKGHSLSVQRLTKSKVDIPAHWSDMKQQNFCVVELLPSDPEYNTVASKFNQTCSHFRIEKIERIQNPDLWNSYQAKKKTMDAKNGQTMNEKQLFHGTDAGSVPHVNRNGFNRSYAGKNAVAYGKGTYFAVNANYSANDTYSRPDANGRKHVYYVRVLTGIYTHGNHSLIVPPSKNPQNPTDLYDTVTDNVHHPSLFVAFYDYQAYPEYLITFRK

SEQ ID NO: 58321 - protein, 194 aa, Homo sapiens
  VARIANT 1: note = MOD_RES - Any amino acid
XVRRRAELRMAVPGSFPLLVEGSWGPDPPKNLNTKLQMYFQSPKRSGGGECEVRQDPRSPSRFLVFFYPEDVRQKVLERKNHELVWQGKGTFKLTVQLPATPDEIDHVFEEELLTKESKTKEDVKEPDTIRFVDDCTKHHSIKQLQLSPRLLEVTNTIRVENLPPGADDYSLKLFFENPYNGGGRVANVEYFPE

SEQ ID NO: 58322 - protein, 444 aa, Homo sapiens
MLQRIGLIFLHNIVVVSNCFYFQAFLDEFTNWSRINPNKARIPMAGDTQGVVGTVSKPCFTAYEMKIGAITFQVATGDIATEQVDVIVNSTARTFNRKSGVSRAILEGAGQAVESECAVLAAQPHRDFIITPGGCLKCKIIIHVPGGKDVRKTVTSVLEECEQRKYTSVSLPAIGTGNAGKNPITVADNIIDAIVDFSSQHSTPSLKTVKVVIFQPELLNIFYDSMKKRDLSASLNFQSTFSMTTCNLPEHWTDMNHQLFCMVQLEPGQSEYNTIKDKFTRTCSSYAIEKIERIQNAFLWQSYQVKKRQMDIKNDHKNNERLLFHGTDADSVPYVNQHGFNRSCAGKNAVSYGKGTYFAVDASYSAKDTYSKPDSNGRKHMYVVRVLTGVFTKGRAGLVTPPPKNPHNPTDLFDSVTNNTRSPKLFVVFFDNQAYPEYLITFTA

SEQ ID NO: 58323 - protein, 678 aa, Homo sapiens
MAAPGPLPAAALSPGAPTPRELMHGVAGVTSRAGRDREAGSVLPAGNRGARKASRRSSSRSMSRDNKFSKKDCLSIRNVVASIQTKEGLNLKLISGDVLYIWADVIVNSVPMNLQLGGGPLSRAFLQKAGPMLQKELDDRRRETEEKVGNIFMTSGCNLDCKAVLHAVAPYWNNGAETSWQIMANIIKKCLTTVEVLSFSSITFPMIGTGSLQFPKAVFAKLILSEVFEYSSSTRPITSPLQEVHFLVYTNDDEGCQAFLDEFTNWSRINPNKARIPMAGDTQGVVGTVSKPCFTAYEMKIGAITFQVATGDIATEQVDVIVNSTARTFNRKSGVSRAILEGAGQAVESECAVLAAQPHRDFIITPGGCLKCKIIIHVPGGKDVRKTVTSVLEECEQRKYTSVSLPAIGTGNAGKNPITVADNIIDAIVDFSSQHSTPSLKTVKVVIFQPELLNIFYDSMKKRDLSASLNFQSTFSMTTCNLPEHWTDMNHQLFCMVQLEPGQSEYNTIKDKFTRTCSSYAIEKIERIQNAFLWQSYQVKKRQMDIKNDHKNNERLLFHGTDADSVPYVNQHGFNRSCAGKNAVSYGKGTYFAVDASYSAKDTYSKPDSNGRKHMYVVRVLTGVFTKGRAGLVTPPPKNPHNPTDLFDSVTNNTRSPKLFVVFFDNQAYPEYLITFTA

SEQ ID NO: 58324 - protein, 425 aa, Homo sapiens
MKHTAFLDEFTNWSRINPNKARIPMAGDTQGVVGTVSKPCFTAYEMKIGAITFQVATGDIATEQVDVIVNSTARTFNRKSGVSRAILEGAGQAVESECAVLAAQPHRDFIITPGGCLKCKIIIHVPGGKDVRKTVTSVLEECEQRKYTSVSLPAIGTGNAGKNPITVADNIIDAIVDFSSQHSTPSLKTVKVVIFQPELLNIFYDSMKKRDLSASLNFQSTFSMTTCNLPEHWTDMNHQLFCMVQLEPGQSEYNTIKDKFTRTCSSYAIEKIERIQNAFLWQSYQVKKRQMDIKNDHKNNERLLFHGTDADSVPYVNQHGFNRSCAGKNAVSYGKGTYFAVDASYSAKDTYSKPDSNGRKHMYVVRVLTGVFTKGRAGLVTPPPKNPHNPTDLFDSVTNNTRSPKLFVVFFDNQAYPEYLITFTA

SEQ ID NO: 58325 - protein, 854 aa, Homo sapiens
MDFSMVAGAAAYNEKSGRITSLSLLFQKVFAQIFPQWRKGNTEECLPYKCSETGALGENYSWQIPINHNDFKILKNNERQLCEVLQNKFGCISTLVSPVQEGNSKSLQVFRKMLTPRIELSVWKDDLTTHAVDAVVNAANEDLLHGGGLALALVKAGGFEIQEESKQFVARYGKVSAGEIAVTGAGRLPCKQIIHAVGPRWMEWDKQGCTGKLQRAIVSILNYVIYKNTHIKTVAIPALSSGIFQFPLNLCTKTIVETIRVSLQGKPMMSNLKEIHLVSNEDPTVAAFKAASEFILGKSELGQETTPSFNAMVVNNLTLQIVQGHIEWQTADVIVNSVNPHDITVGPVAKSILQQAGVEMKSEFLATKAKQFQRSQLVLVTKGFNLFCKYIYHVLWHSEFPKPQILKHAMKECLEKCIEQNITSISFPALGTGNMEIKKETAAEILFDEVLTFAKDHVKHQLTVKFVIFPTDLEIYKAFSSEMAKRSKMLSLNNYSVPQSTREEKRENGLEARSPAINLMGFNVEEMYEAHAWIQRILSLQNHHIIENNHILYLGRKEHDILSQLQKTSSVSITEIISPGRTELEIEGARADLIEVVMNIEDMLCKVQEEMARKKERGLWRSLGQWTIQQQKTQDEMKENIIFLKCPVPPTQELLDQKKQFEKCGLQVLKVEKIDNEVLMAAFQRKKKMMEEKLHRQPVSHRLFQQVPYQFCNVVCRVGFQRMYSTPCDPKYGAGIYFTKNLKNLAEKAKKISAADKLIYVFEAEVLTGFFCQGHPLNIVPPPLSPGAIDGHDSVVDNVSSPETFVIFSGMQAIPQYLWTCTQEYVQSQDYSSGPMRPFAQHPWRGFASGSPVD

SEQ ID NO: 58326 - protein, 777 aa, Homo sapiens
MSVSCVKSSRISLAVSLPWSLQFRKATANLCVFRKMLTPRIELSVWKDDLTTHAVDAVVNAANEDLLHGGGLALALVKAGGFEIQEESKQFVARYGKVSAGEIAVTGAGRLPCKQIIHAVGPRWMEWDKQGCTGKLQRAIVSILNYVIYKNTHIKTVAIPALSSGIFQFPLNLCTKTIVETIRVSLQGKPMMSNLKEIHLVSNEDPTVAAFKAASEFILGKSELGQETTPSFNAMVVNNLTLQIVQGHIEWQTADVIVNSVNPHDITVGPVAKSILQQAGVEMKSEFLATKAKQFQRSQLVLVTKGFNLFCKYIYHVLWHSEFPKPQILKHAMKECLEKCIEQNITSISFPALGTGNMEIKKETAAEILFDEVLTFAKDHVKHQLTVKFVIFPTDLEIYKAFSSEMAKRSKMLSLNNYSVPQSTREEKRENGLEARSPAINLMGFNVEEMYEAHAWIQRILSLQNHHIIENNHILYLGRKEHDILSQLQKTSSVSITEIISPGRTELEIEGARADLIEVVMNIEDMLCKVQEEMARKKERGLWRSLGQWTIQQQKTQDEMKENIIFLKCPVPPTQELLDQKKQFEKCGLQVLKVEKIDNEVLMAAFQRKKKMMEEKLHRQPVSHRLFQQVPYQFCNVVCRVGFQRMYSTPCDPKYGAGIYFTKNLKNLAEKAKKISAADKLIYVFEAEVLTGFFCQGHPLNIVPPPLSPGAIDGHDSVVDNVSSPETFVIFSGMQAIPQYLWTCTQEYVQSQDYSSGPMRPFAQHPWRGFASGSPVD

SEQ ID NO: 58327 - protein, 819 aa, Homo sapiens; identical to SEQ ID NO: 58314

SEQ ID NO: 58328 - protein, 479 aa, Homo sapiens
MSDGFDRAPGAGRGRSRGLGRGGGGPEGGGFPNGAGPAERARHQPPQPKAPGFLQPPPLRQPRTTPPPGAQCEVPASPQRPSRPGALPEQTRPLRAPPSSQDKIPQQNSESAMAKPQVVVAPVLMSKLSVNAPEFYPSGYSSSYTESYEDGCEDYPTLSEYVQDFLNHLTEQPGSFETEIEQFAETLNGCVTTDDALQELVELIYQQATSIPNFSYMGARLCNYLSHHLTISPQSGNFRQLLLQRCRTEYEVKDQAAKGDEVTRKRFHAFVLFLGELYLNLEIKGTNGQVTRADILQVGLRELLNALFSNPMDDNLICAVKLLKLTGSVLEDAWKEKGKMDMEEIIQRIENVVLDANCSRDVKQMLLKLVELRSSNWGRVHATSTYREATPENDPNYFMNEPTFYTSDGVPFTAADPDYQEKYQELLEREDFFPDYEENGTDLSGAGDPYLDDIDDEMDPEIEEAYEKFCLESERKRKQ

SEQ ID NO: 58329 - protein, 367 aa, Homo sapiens
MAKPQVVVAPVLMSKLSVNAPEFYPSGYSSSYTESYEDGCEDYPTLSEYVQDFLNHLTEQPGSFETEIEQFAETLNGCVTTDDALQELVELIYQQATSIPNFSYMGARLCNYLSHHLTISPQSGNFRQLLLQRCRTEYEVKDQAAKGDEVTRKRFHAFVLFLGELYLNLEIKGTNGQVTRADILQVGLRELLNALFSNPMDDNLICAVKLLKLTGSVLEDAWKEKGKMDMEEIIQRIENVVLDANCSRDVKQMLLKLVELRSSNWGRVHATSTYREATPENDPNYFMNEPTFYTSDGVPFTAADPDYQEKYQELLEREDFFPDYEENGTDLSGAGDPYLDDIDDEMDPEIEEAYEKFCLESERKRKQ

SEQ ID NO: 58330 - protein, 400 aa, Homo sapiens
MSDGFDRAPEQTRPLRAPPSSQDKIPQQNSESAMAKPQVVVAPVLMSKLSVNAPEFYPSGYSSSYTESYEDGCEDYPTLSEYVQDFLNHLTEQPGSFETEIEQFAETLNGCVTTDDALQELVELIYQQATSIPNFSYMGARLCNYLSHHLTISPQSGNFRQLLLQRCRTEYEVKDQAAKGDEVTRKRFHAFVLFLGELYLNLEIKGTNGQVTRADILQVGLRELLNALFSNPMDDNLICAVKLLKLTGSVLEDAWKEKGKMDMEEIIQRIENVVLDANCSRDVKQMLLKLVELRSSNWGRVHATSTYREATPENDPNYFMNEPTFYTSDGVPFTAADPDYQEKYQELLEREDFFPDYEENGTDLSGAGDPYLDDIDDEMDPEIEEAYEKFCLESERKRKQ

SEQ ID NO: 58331 - protein, 168 aa, Homo sapiens
MAKPQVVVAPVLMSKLSVNAPEFYPSGYSSSYTESYEDGCEDYPTLSEYVQDFLNHLTEQPGSFETEIEQFAETLNGCVTTDDALQELVELIYQQATSIPNFSYMGARLCNYLSHHLTISPQSGNFRQLLLQRCRTEYEVKDQAAKGDEVTRKRFHAFVLFLGELYLN

SEQ ID NO: 58332 - protein, 200 aa, Homo sapiens
MAKPQVVVAPVLMSKLSVNAPEFYPSGYSSSYTESYEDGCEDYPTLSEYVQDFLNHLTEQPGSFETEIEQFAETLNGCVTTDDALQELVELIYQQATSIPNFSYMGARLCNYLSHHLTISPQSGNFRQLLLQRCRTEYEVKDQAAKGDEVTRKRFHAFVLFLGELYLNLEIKGTNGQVTRADILQVGLRELLNALFSNPM

SEQ ID NO: 58333 - protein, 351 aa, Homo sapiens
MSDGFDRAPEQTRPLRAPPSSQDKIPQQNSESAMAKPQVVVAPVLMSKLSVNAPEFYPSGYSSSYTESYEDGCEDYPTLSEYVQDFLNHLTEQPGSFETEIEQFAETLNGCVTTDDALQELVELIYQQATSIPNFSYMGARLCNYLSHHLTISPQSGNFRQLLLQRCRTEYEVKDQAAKGDEVTRKRFHAFVLFLGELYLNLEIKGTNGQVTRADILQVGLRELLNALFSNPMDDNLICAVKLLKLTGSVLEDAWKEKGKMDMEEIIQRIENVVLDANCSRDVKQMLLKLVELRSSNWGRVHATSTYREATPENDPNYFMNEPTFYTSDGVPFTAADPDTWMILMMRWTQR

SEQ ID NO: 58334 - protein, 95 aa, Homo sapiens
MAKPQVVVAPVLMSKLSVNAPEFYPSGYSSSYTESYEDGCEDYPTLSEYVQDFLNHLTEQPGSFETEIEQFAETLNGCVTTDDALQELVELIYQQ

SEQ ID NO: 58335 - protein, 127 aa, Homo sapiens
MKDPSRSSTSPSIINEDVIINGHSHEDDNPFAEYMWMENEEEFNRQIEEELWEEEFIERCFQEMLEEEEEHEWFIPARDLPQTMDQIQDQFNDLVISDGSSLEDLVVKSNLNPNAKEFVPGVKYGNI

SEQ ID NO: 58336 - protein, 127 aa, Homo sapiens; identical to SEQ ID NO: 58335

SEQ ID NO: 58337 - protein, 93 aa, Homo sapiens
MKDPSRSSTSPSIINEDVIINGHSHEDDNPFAEYMWMENEEEFNRQIEEELWEEEFIERCFQEMLEEEEEHEWFIPARDLPQTMDQIQDQFND

SEQ ID NO: 58338 - protein, 127 aa, Homo sapiens; identical to SEQ ID NO: 58335

SEQ ID NO: 58339 - protein, 123 aa, Homo sapiens
MNGSNMANTSPSVKSKEDQGLSGHDEKENPFAEYMWMENEEDFNRQVEEELQEQDFLDRCFQEMLDEEDQDWFIPSRDLPQAMGQLQQQLNGLSVSEGHDSEDILSKSNLNPDAKEFIPGEKY

SEQ ID NO: 58340 - protein, 631 aa, Homo sapiens
MNPSTPSYPTASLYVGDLHPDVTEAMLYEKFSPAGPILSIRICRDLITSGSSNYAYVNFQHTKDAEHALDTMNFDVIKGKPVRIMWSQRDPSLRKSGVGNIFVKNLDKSINNKALYDTVSAFGNILSCNVVCDENGSKGYGFVHFETHEAAERAIKKMNGMLLNGRKVFVGQFKSRKEREAELGARAKEFPNVYIKNFGEDMDDERLKDLFGKFGPALSVKVMTDESGKSKGFGFVSFERHEDAQKAVDEMNGKELNGKQIYVGRAQKKVERQTELKRTFEQMKQDRITRYQVVNLYVKNLDDGIDDERLRKAFSPFGTITSAKVMMEGGRSKGFGFVCFSSPEEATKAVTEMNGRIVATKPLYVALAQRKEERQAYLTNEYMQRMASVRAVPNQRAPPSGYFMTAVPQTQNHAAYYPPSQIARLRPSPRWTAQGARPHPFQNKPSAIRPGAPRVPFSTMRPASSQVPRVMSTQRVANTSTQTVGPRPAAAAAAAATPAVRTVPRYKYAAGVRNPQQHRNAQPQVTMQQLAVHVQGQETLTASRLASAPPQKQKQMLGERLFPLIQAMHPTLAGKITGMLLEIDNSELLYMLESPESLRSKVDEAVAVLQAHQAKEATQKAVNSATGVPTV

SEQ ID NO: 58341 - protein, 631 aa, Homo sapiens
MNAAASSYPMASLYVGDLHSDVTEAMLYEKFSPAGPVLSIRVCRDMITRRSLGYAYVNFQQPADAERALDTMNFDVIKGKPIRIMWSQRDPSLRKSGVGNVFIKNLDKSIDNKALYDTFSAFGNILSCKVVCDENGSKGYAFVHFETQEAADKAIEKMNGMLLNDRKVFVGRFKSRKEREAELGAKAKEFTNVYIKNFGEEVDDESLKELFSQFGKTLSVKVMRDPNGKSKGFGFVSYEKHEDANKAVEEMNGKEISGKIIFVGRAQKKVERQAELKRKFEQLKQERISRYQGVNLYIKNLDDTIDDEKLRKEFSPFGSITSAKVMLEDGRSKGFGFVCFSSPEEATKAVTEMNGRIVGSKPLYVALAQRKEERKAHLTNQYMQRVAGMRALPANAILNQFQPAAGGYFVPAVPQAQGRPPYYTPNQLAQMRPNPRWQQGGRPQGFQGMPSAIRQSGPRPTLRHLAPTGNAPASRGLPTTTQRVGVPTAVQNLAPRAAVAAAAPRAVAPYKYASSVRSPHPAIQPLQAPQPAVHVQGQEPLTASMLAAAPPQEQKQMLGERLFPLIQTMHSNLAGKITGMLLEIDNSELLHMLESPESLRSKVDEAVAVLQAHHAKKEAAQKVGAVAAATS

SEQ ID NO: 58342 - protein, 644 aa, Homo sapiens
MNAAASSYPMASLYVGDLHSDVTEAMLYEKFSPAGPVLSIRVCRDMITRRSLGYAYVNFQQPADAERALDTMNFDVIKGKPIRIMWSQRDPSLRKSGVGNVFIKNLDKSIDNKALYDTFSAFGNILSCKVVCDENGSKGYAFVHFETQEAADKAIEKMNGMLLNDRKVFVGRFKSRKEREAELGAKAKEFTNVYIKNFGEEVDDESLKELFSQFGKTLSVKVMRDPNGKSKGFGFVSYEKHEDANKAVEEMNGKEISGKIIFVGRAQKKVERQAELKRKFEQLKQERISRYQGVNLYIKNLDDTIDDEKLRKEFSPFGSITSAKVMLEDGRSKGFGFVCFSSPEEATKAVTEMNGRIVGSKPLYVALAQRKEERKAHLTNQYMQRVAGMRALPANAILNQFQPAAGGYFVPAVPQAQGRPPYYTPNQLAQMRPNPRWQQGGRPQGFQGMPSAIRQSGPRPTLRHLAPTGSECPDRLAMDFGGAGAAQQGLTDSCQSGGVPTAVQNLAPRAAVAAAAPRAVAPYKYASSVRSPHPAIQPLQAPQPAVHVQGQEPLTASMLAAAPPQEQKQMLGERLFPLIQTMHSNLAGKITGMLLEIDNSELLHMLESPESLRSKVDEAVAVLQAHHAKKEAAQKVGAVAAATS

SEQ ID NO: 58343 - protein, 660 aa, Homo sapiens
MNAAASSYPMASLYVGDLHSDVTEAMLYEKFSPAGPVLSIRVCRDMITRRSLGYAYVNFQQPADAERALDTMNFDVIKGKPIRIMWSQRDPSLRKSGVGNVFIKNLDKSIDNKALYDTFSAFGNILSCKVVCDENGSKGYAFVHFETQEAADKAIEKMNGMLLNDRKVFVGRFKSRKEREAELGAKAKEFTNVYIKNFGEEVDDESLKELFSQFGKTLSVKVMRDPNGKSKGFGFVSYEKHEDANKAVEEMNGKEISGKIIFVGRAQKKVERQAELKRKFEQLKQERISRYQGVNLYIKNLDDTIDDEKLRKEFSPFGSITSAKVMLEDGRSKGFGFVCFSSPEEATKAVTEMNGRIVGSKPLYVALAQRKEERKAHLTNQYMQRVAGMRALPANAILNQFQPAAGGYFVPAVPQAQGRPPYYTPNQLAQMRPNPRWQQGGRPQGFQGMPSAIRQSGPRPTLRHLAPTGNAPASRGLPTTTQRVGSECPDRLAMDFGGAGAAQQGLTDSCQSGGVPTAVQNLAPRAAVAAAAPRAVAPYKYASSVRSPHPAIQPLQAPQPAVHVQGQEPLTASMLAAAPPQEQKQMLGERLFPLIQTMHSNLAGKITGMLLEIDNSELLHMLESPESLRSKVDEAVAVLQAHHAKKEAAQKVGAVAAATS

SEQ ID NO: 58344 - protein, 129 aa, Homo sapiens
MNAAASSYPMASLYVGDLHSDVTEAMLYEKFSPAGPVLSIRVCRDMITRRSLGYAYVNFQQPADAERALDTMNFDVIKGKPIRIMWSQRDPSLRKSGVGNVFIKNLDKSIDNKALYDTFSAFGNILSCK

SEQ ID NO: 58345 - protein, 68 aa, Homo sapiens
  VARIANT 1: note = MOD_RES - Any amino acid
XLIQTMHSNLAGKITGMLLEIDNSELLHMLESPESLRSKVDEAVAVLQAHHAKKEAAQKVGAVAAATS

SEQ ID NO: 58346 - protein, 39 aa, Homo sapiens
MNAAASSYPMASLYVGDLHSDVTEAMLYEKFSPAGPVLS

SEQ ID NO: 58347 - protein, 382 aa, Homo sapiens
MGSGEPNPAGKKKKYLKAALYVGDLDPDVTEDMLYKKFRPAGPLRFTRICRDPVTRSPLGYGYVNFRFPADAEWALNTMNFDLINGKPFRLMWSQPDDRLRKSGVGNIFIKNLDKSIDNRALFYLFSAFGNILSCKVVCDDNGSKGYAYVHFDSLAAANRAIWHMNGVRLNNRQVYVGRFKFPEERAAEVRTRDRATFTNVFVKNIGDDIDDEKLKELFCEYGPTESVKVIRDASGKSKGFGFVRYETHEAAQKAVLDLHGKSIDGKVLYVGRAQKKIERLAELRRRFERLRLKEKSRPPGVPIYIKNLDETINDEKLKEEFSSFGSISRAKVMMEVGQGKGFGVVCFSSFEEATKAVDEMNGRIVGSKPLHVTLGQARRRC

SEQ ID NO: 58348 - protein, 218 aa, Homo sapiens
MNGVRLNNRQVYVGRFKFPEERAAEVRTRDRATFTNVFVKNIGDDIDDEKLKELFCEYGPTESVKVIRDASGKSKGFGFVRYETHEAAQKAVLDLHGKSIDGKVLYVGRAQKKIERLAELRRRFERLRLKEKSRPPGVPIYIKNLDETINDEKLKEEFSSFGSISRAKVMMEVGQGKGFGVVCFSSFEEATKAVDEMNGRIVGSKPLHVTLGQARRRC

SEQ ID NO: 58349 - protein, 350 aa, Homo sapiens
MLYKKFRPAGPLRFTRICRDPVTRSPLGYGYVNFRFPADAEWALNTMNFDLINGKPFRLMWSQPDDRLRKSGVGNIFIKNLDKSIDNRALFYLFSAFGNILSCKVVCDDNGSKGYAYVHFDSLAAANRAIWHMNGVRLNNRQVYVGRFKFPEERAAEVRTRDRATFTNVFVKNIGDDIDDEKLKELFCEYGPTESVKVIRDASGKSKGFGFVRYETHEAAQKAVLDLHGKSIDGKVLYVGRAQKKIERLAELRRRFERLRLKEKSRPPGVPIYIKNLDETINDEKLKEEFSSFGSISRAKVMMEVGQGKGFGVVCFSSFEEATKAVDEMNGRIVGSKPLHVTLGQARRRC

SEQ ID NO: 58350 - protein, 306 aa, Homo sapiens
MAAAAAAAAAAGAAGGRGSGPGRRRHLVPGAGGEAGEGAPGGAGDYGNGLESEELEPEELLLEPEPEPEPEEEPPRPRAPPGAPGPGPGSGAPGSQEEEEEPGLVEGDPGDGAIEDPELEAIKARVREMEEEAEKLKELQNEVEKQMNMSPPPGNAGPVIMSIEEKMEADARSIYVGNVDYGATAEELEAHFHGCGSVNRVTILCDKFSGHPKGFAYIEFSDKESVRTSLALDESLFRGRQIKVIPKRTNRPGISTTDRGFPRARYRARTTNYNSSRSRFYSGFNSRPRGRVYRGRARATSWYSPY

SEQ ID NO: 58351 - protein, 296 aa, Homo sapiens
MAAAAAAAAAAGAAGGRGSGPGRRRHLVPGAGGEAGEGAPGGAGDYGNGLESEELEPEELLLEPEPEPEPEEEPPRPRAPPGAPGPGPGSGAPGSQEEEEEPGLVEGDPGDGAIEDPELEAIKARVREMEEEAEKLKELQNEVEKQMNMSPPPGNAGPVIMSIEEKMEADARSIYVGNVDYGATAEELEAHFHGCGSVNRVTILCDKFSGHPKGFAYIEFSDKESVRTSLALDESLFRGRQIKVIPKRTNRPGISTTDRGFPRARYRARTTNYNSSRSRFYSGFNSRPRGRVYRSG

SEQ ID NO: 58352 - protein, 745 aa, Homo sapiens
MPFPVTTQGSQQTQPPQKHYGITSPISLAAPKETDCVLTQKLIETLKPFGVFEEEEELQRRILILGKLNNLVKEWIREISESKNLPQSVIENVGGKIFTFGSYRLGVHTKGADIDALCVAPRHVDRSDFFTSFYDKLKLQEEVKDLRAVEEAFVPVIKLCFDGIEIDILFARLALQTIPEDLDLRDDSLLKNLDIRCIRSLNGCRVTDEILHLVPNIDNFRLTLRAIKLWAKRHNIYSNILGFLGGVSWAMLVARTCQLYPNAIASTLVHKFFLVFSKWEWPNPVLLKQPEECNLNLPVWDPRVNPSDRYHLMPIITPAYPQQNSTYNVSVSTRMVMVEEFKQGLAITDEILLSKAEWSKLFEAPNFFQKYKHYIVLLASAPTEKQRLEWVGLVESKIRILVGSLEKNEFITLAHVNPQSFPAPKENPDKEEFRTMWVIGLVFKKTENSENLSVDLTYDIQSFTDTVYRQAINSKMFEVDMKIAAMHVKRKQLHQLLPNHVLQKKKKHSTEGVKLTALNDSSLDLSMDSDNSMSVPSPTSATKTSPLNSSGSSQGRNSPAPAVTAASVTNIQATEVSVPQVNSSESSGGTSSESIPQTATQPAISPPPKPTVSRVVSSTRLVNPPPRSSGNAATSGNAATKIPTPIVGVKRTSSPHKEESPKKTKTEEDETSEDANCLALSGHDKTEAKEQLDTETSTTQSETIQTAASLLASQKTSSTDLSDIPALPANPIPVIKNSIKLRLNR

SEQ ID NO: 58353 - protein, 740 aa, Homo sapiens
MLGRRGSDWAVPAPETMPFPVTTQGSQQTQPPQKHYGITSPISLAAPKETDCVLTQKLIETLKPFGVFEEEEELQRRILILGKLNNLVKEWIREISESKNLPQSVIENVGGKIFTFGSYRLGVHTKGADIDALCVAPRHVDRSDFFTSFYDKLKLQEEVKDLRAVEEAFVPVIKLCFDGIEIDILFARLALQTIPEDLDLRDDSLLKNLDIRCIRSLNGCRVTDEILHLVPNIDNFRLTLRAIKLWAKRHNIYSNILGFLGGVSWAMLVARTCQLYPNAIASTLVHKFFLVFSKWEWPNPVLLKQPEECNLNLPVWDPRVNPSDRYHLMPIITPAYPQQNSTYNVSVSTRMVMVEEFKQGLAITDEILLSKAEWSKLFEAPNFFQKYKHYIVLLASAPTEKQRLEWVGLVESKIRILVGSLEKNEFITLAHVNPQSFPAPKENPDKEEFRTMWVIGLVFKKTENSENLSVDLTYDIQSFTDTVYRQAINSKMFEVDMKIAAMHVKRKQLHQLLPNHVLQKKKKHSTEGVKLTALNDSSLDLSMDSDNSMSVPSPTSATKTSPLNSSGSSQGRNSPAPAVTAASVTNIQATEVSVPQVNSSESSGGTSSESIPQTATQPAISPPPKPTVSRVVSSTRLVNPPPRSSGNAATSGNAATKIPTPIVGVKRTSSPHKEESPKKTKTEEEQLDTETSTTQSETIQTAASLLASQKTSSTDLSDIPALPANPIPVIKNSIKLRLNR

SEQ ID NO: 58354 - protein, 285 aa, Homo sapiens
MPFPVTTQGSQQTQPPQKHYGITSPISLAAPKETDCVLTQKLIETLKPFGVFEEEEELQRRILILGKLNNLVKEWIREISESKNLPQSVIENVGGKIFTFGSYRLGVHTKGADIDALCVAPRHVDRSDFFTSFYDKLKLQEEVKDLRAVEEAFVPVIKLCFDGIEIDILFARLALQTIPEDLDLRDDSLLKNLDIRCIRSLNGCRVTDEILHLVPNIDNFRLTLRAIKLWAKRHNIYSNILGFLGGVSWAMLVARTCQLYPNAIASTLVHKFFLVFSKWYVFRLY

SEQ ID NO: 58355 - protein, 636 aa, Homo sapiens
MPFPVTTQGPPQPAPPPNRYGVSSPISLAVPKETDCLLTQRLIETLRPFGVFEEEEELQRRILVLEKLNNLVKEWIREISESKSLPQSVIENVGGKIFTFGSYRLGVHTKGADIDALCVAPSHVDRSDFFTSFYAKLKLQEEVKDLRAVEEAFVPVIKLCFDGIEIDILFARLALQTIPEDLDLRDDSLLKNLDIRCIRSLNGCRVTDEILHLVPNIDNFRLTLRAIKLWAKCHNIYSNILGFLGGVSWAMLVARTCQLYPNAVASTLVRKFFLVFSEWEWPNPVLLKEPEERNLNLPVWDPRVNPSDRYHLMPIITPAYPQQNSTYNVSISTRMVMIEEFKQGLAITHEILLSKAEWSKLFEAPSFFQKYKHYIVLLASASTEKQHLEWVGLVESKIRILVGSLEKNEFITLAHVNPQSFPAPKENPDMEEFRTMWVIGLGLKKPDNSEILSIDLTYDIQSFTDTVYRQAVNSKMFEMGMKITAMHLRRKELHQLLPHHVLQDKKAHSTEGRRLTDLNDSSFDLSAGCENSMSVPSSTSTMKTGPLISSSQGRNSPALAVMTASVANIQATEFSLQQVNTNESSGVALNESIPHAVSQPAISPSPKAMVARVVSSTCLISHPDLQETQQQTYLIL

SEQ ID NO: 58356 - protein, 578 aa, Homo sapiens
MDFLLFQFGLCTFKYDYTDSKYITKSFNFYVFPKPFNRSSPDVKFVCQSSSIDFLASQGFDFNKVFRNGIPYLNQEEERQLREQYDEKRSQANGAGALSYVSPNTSKCPVTIPEDQKKFIDQVVEKIEDLLQSEENKNLDLEPCTGFQRKLIYQTLSWKYPKGIHVETLETEKKERYIVISKVDEEERKRREQQKHAKEQEELNDAVGFSRVIHAIANSGKLVIGHNMLLDVMHTVHQFYCPLPADLSEFKEMTTCVFPRLLDTKLMASTQPFKDIINNTSLAELEKRLKETPFNPPKVESAEGFPSYDTASEQLHEAGYDAYITGLCFISMANYLGSFLSPPKIHVSARSKLIEPFFNKLFLMRVMDIPYLNLEGPDLQPKRDHVLHVTFPKEWKTSDLYQLFSAFGNIQISWIDDTSAFVSLSQPEQVKIAVNTSKYAESYRIQTYAEYMGRKQEEKQIKRKWTEDSWKEADSKRLNPQCIPYTLQNHYYRNNSFTAPSTVGKRNLSPSQEEAGLEDGVSGEISDTELEQTDSCAEPLSEGRKKAKKLKRMKKELSPAGSISKNSPATLFEVPDTW

SEQ ID NO: 58357 - protein, 593 aa, Homo sapiens
MEIIRSNFKSNLHKVYQAIEEADFFAIDGEFSGISDGPSVSALTNGFDTPEERSSPDVKFVCQSSSIDFLASQGFDFNKVFRNGIPYLNQEEERQLREQYDEKRSQANGAGALSYVSPNTSKCPVTIPEDQKKFIDQVVEKIEDLLQSEENKNLDLEPCTGFQRKLIYQTLSWKYPKGIHVETLETEKKERYIVISKVDEEERKRREQQKHAKEQEELNDAVGFSRVIHAIANSGKLVIGHNMLLDVMHTVHQFYCPLPADLSEFKEMTTCVFPRLLDTKLMASTQPFKDIINNTSLAELEKRLKETPFNPPKVESAEGFPSYDTASEQLHEAGYDAYITGLCFISMANYLGSFLSPPKIHVSARSKLIEPFFNKLFLMRVMDIPYLNLEGPDLQPKRDHVLHVTFPKEWKTSDLYQLFSAFGNIQISWIDDTSAFVSLSQPEQVKIAVNTSKYAESYRIQTYAEYMGRKQEEKQIKRKWTEDSWKEADSKRLNPQCIPYTLQNHYYRNNSFTAPSTVGKRNLSPSQEEAGLEDGVSGEISDTELEQTDSCAEPLSEGRKKAKKLKRMKKELSPAGSISKNSPATLFEVPDTW

SEQ ID NO: 58358 - protein, 639 aa, Homo sapiens
MEIIRSNFKSNLHKVYQAIEEADFFAIDGEFSGISDGPSVSALTNGFDTPEERYQKLKKHSMDFLLFQFGLCTFKYDYTDSKYITKSFNFYVFPKPFNRSSPDVKFVCQSSSIDFLASQGFDFNKVFRNGIPYLNQEEERQLREQYDEKRSQANGAGALSYVSPNTSKCPVTIPEDQKKFIDQVVEKIEDLLQSEENKNLDLEPCTGFQRKLIYQTLSWKYPKGIHVETLETEKKERYIVISKVDEEERKRREQQKHAKEQEELNDAVGFSRVIHAIANSGKLVIGHNMLLDVMHTVHQFYCPLPADLSEFKEMTTCVFPRLLDTKLMASTQPFKDIINNTSLAELEKRLKETPFNPPKVESAEGFPSYDTASEQLHEAGYDAYITGLCFISMANYLGSFLSPPKIHVSARSKLIEPFFNKLFLMRVMDIPYLNLEGPDLQPKRDHVLHVTFPKEWKTSDLYQLFSAFGNIQISWIDDTSAFVSLSQPEQVKIAVNTSKYAESYRIQTYAEYMGRKQEEKQIKRKWTEDSWKEADSKRLNPQCIPYTLQNHYYRNNSFTAPSTVGKRNLSPSQEEAGLEDGVSGEISDTELEQTDSCAEPLSEGRKKAKKLKRMKKELSPAGSISKNSPATLFEVPDTW

SEQ ID NO: 58359 - protein, 207 aa, Homo sapiens
MEIIRSNFKSNLHKVYQAIEEADFFAIDGEFSGISDGPSVSALTNGFDTPEERYQKLKKHSMDFLLFQFGLCTFKYDYTDSKSSPDVKFVCQSSSIDFLASQGFDFNKVFRNGIPYLNQEEERQLREQYDEKRSQANGAGALSYVSPNTSKCPVTIPEDQKKFIDQVVEKIEDLLQSEENKNLDLEPCTGFQRKLIYQTLSWKRSDI

SEQ ID NO: 58360 - protein, 464 aa, Homo sapiens
MEIIRSNFKSNLHKVYQAIEEADFFAIDGEFSGISDGPSVSALTNGFDTPEERYQKLKKKERYIVISKVDEEERKRREQQKHAKEQEELNDAVGFSRVIHAIANSGKLVIGHNMLLDVMHTVHQFYCPLPADLSEFKEMTTCVFPRLLDTKLMASTQPFKDIINNTSLAELEKRLKETPFNPPKVESAEGFPSYDTASEQLHEAGYDAYITGLCFISMANYLGSFLSPPKIHVSARSKLIEPFFNKLFLMRVMDIPYLNLEGPDLQPKRDHVLHVTFPKEWKTSDLYQLFSAFGNIQISWIDDTSAFVSLSQPEQVKIAVNTSKYAESYRIQTYAEYMGRKQEEKQIKRKWTEDSWKEADSKRLNPQCIPYTLQNHYYRNNSFTAPSTVGKRNLSPSQEEAGLEDGVSGEISDTELEQTDSCAEPLSEGRKKAKKLKRMKKELSPAGSISKNSPATLFEVPDTW

SEQ ID NO: 58361 - protein, 356 aa, Homo sapiens
MDAGVTESGLNVTLTIRLLMHGKEVGSIIGKKGESVKRIREESGARINISEGNCPERIITLTGPTNAIFKAFAMIIDKLEEDINSSMTNSTAASRPPVTLRLVVPATQCGSLIGKGGCKIKEIRESTGAQVQVAGDMLPNSTERAITIAGVPQSVTECVKQICLVMLETLSQSPQGRVMTIPYQPMPASSPVICAGGQDRCSDAAGYPHATHDLEGPPLDAYSIQGQHTISPLDLAKLNQVARQQSHFAMMHGGTGFAGIDSSSPEVKGYWASLDASTQTTHELTIPNNLIGCIIGRQGANINEIRQMSGAQIKIANPVEGSSGRQVTITGSAASISLAQYLINARLSSEKGMGCS

SEQ ID NO: 58362 - protein, 318 aa, Homo sapiens
MDTGVIEGGLNVTLTIRLLMHGKEVGSIIGKKGESVKKMREESGARINISEGNCPERIITLAGPTNAIFKAFAMIIDKLEEDISSSMTNSTAASRPPVTLRLVVPASQCGSLIGKGGCKIKEIRESTGAQVQVAGDMLPNSTERAITIAGIPQSIIECVKQICVVMLESPPKGVTIPYRPKPSSSPVIFAGGQAYTIQGQYAIPQPDLTKLHQLAMQQSHFPMTHGNTGFSAGLDASAQTTSHELTIPNDLIGCIIGRQGAKINEIRQMSGAQIKIANPVEGSTDRQVTITGSAASISLAQYLINVRLSSETGGMGSS

SEQ ID NO: 58363 - protein, 365 aa, Homo sapiens
MDTGVIEGGLNVTLTIRLLMHGKEVGSIIGKKGESVKKMREESGARINISEGNCPERIITLAGPTNAIFKAFAMIIDKLEEDISSSMTNSTAASRPPVTLRLVVPASQCGSLIGKGGCKIKEIRESTGAQVQVAGDMLPNSTERAITIAGIPQSIIECVKQICVVMLETLSQSPPKGVTIPYRPKPSSSPVIFAGGQDRYSTGSDSASFPHTTPSMCLNPDLEGPPLEAYTIQGQYAIPQPDLTKLHQLAMQQSHFPMTHGNTGFSGIESSSPEVKGYWGLDASAQTTSHELTIPNDLIGCIIGRQGAKINEIRQMSGAQIKIANPVEGSTDRQVTITGSAASISLAQYLINVRLSSETGGMGSS

SEQ ID NO: 58364 - protein, 335 aa, Homo sapiens
MDTGVIEGGLNVTLTIRLLMHGKEVGSIIGKKGESVKKMREESGARINISEGNCPERIITLAGPTNAIFKAFAMIIDKLEEDISSSMTNSTAASRPPVTLRLVVPASQCGSLIGKGGCKIKEIRESTGAQVQVAGDMLPNSTERAITIAGIPQSIIECVKQICVVMLETLSQSPPKGVTIPYRPKPSSSPVIFAGGQAYTIQGQYAIPQPDLTKLHQLAMQQSHFPMTHGNTGFSGIESSSPEVKGYWAGLDASAQTTSHELTIPNDLIGCIIGRQGAKINEIRQMSGAQIKIANPVEGSTDRQVTITGSAASISLAQYLINVRLSSETGGMGSS

SEQ ID NO: 58365 - protein, 301 aa, Homo sapiens
MDTGVIEGGLNVTLTIRLLMHGKEVGSIIGKKGESVKKMREESGARINISEGNCPERIITLAGPTNAIFKAFAMIIDKLEEDISSSMTNSTAASRPPVTLRLVVPASQCGSLIGKGGCKIKEIRESTGAQVQVAGDMLPNSTERAITIAGIPQSIIECVKQICVVMLESPPKGVTIPYRPKPSSSPVIFAGGQDRYSTGSDSASFPHTTPSMCLNPDLEGPPLEAYTIQGQYAIPQPDLTKLHQLAMQQSHFPMTHGNTGFSGMDTSVFISVRCSARERPVPRSQLDICLKQTSLSSILLV

SEQ ID NO: 58366 - protein, 362 aa, Homo sapiens
MDTGVIEGGLNVTLTIRLLMHGKEVGSIIGKKGESVKKMREESGARINISEGNCPERIITLAGPTNAIFKAFAMIIDKLEEDISSSMTNSTAASRPPVTLRLVVPASQCGSLIGKGGCKIKEIRESTGAQVQVAGDMLPNSTERAITIAGIPQSIIECVKQICVVMLESPPKGVTIPYRPKPSSSPVIFAGGQDRYSTGSDSASFPHTTPSMCLNPDLEGPPLEAYTIQGQYAIPQPDLTKLHQLAMQQSHFPMTHGNTGFSGIESSSPEVKGYWAGLDASAQTTSHELTIPNDLIGCIIGRQGAKINEIRQMSGAQIKIANPVEGSTDRQVTITGSAASISLAQYLINVRLSSETGGMGSS

SEQ ID NO: 58367 - protein, 331 aa, Homo sapiens
MDTGVIEGGLNVTLTIRLLMHGKEVGSIIGKKGESVKKMREESGARINISEGNCPERIITLAGPTNAIFKAFAMIIDKLEEDISSSMTNSTAASRPPVTLRLVVPASQCGSLIGKGGCKIKEIRESTGAQVQVAGDMLPNSTERAITIAGIPQSIIECVKQICVVMLESPPKGVTIPYRPKPSSSPVIFAGGQAYTIQGQYAIPQPDLTKLHQLAMQQSHFPMTHGNTGFSGIESSSPEVKGYWAGLDASAQTTSHELTIPNDLIGCIIGRQGAKINEIRQMSGAQIKIANPVEGSTDRQVTITGSAASISLAQYLINVRLSSETGGMGSS

SEQ ID NO: 58368 - protein, 366 aa, Homo sapiens
MDTGVIEGGLNVTLTIRLLMHGKEVGSIIGKKGESVKKMREESGARINISEGNCPERIITLAGPTNAIFKAFAMIIDKLEEDISSSMTNSTAASRPPVTLRLVVPASQCGSLIGKGGCKIKEIRESTGAQVQVAGDMLPNSTERAITIAGIPQSIIECVKQICVVMLETLSQSPPKGVTIPYRPKPSSSPVIFAGGQDRYSTGSDSASFPHTTPSMCLNPDLEGPPLEAYTIQGQYAIPQPDLTKLHQLAMQQSHFPMTHGNTGFSGIESSSPEVKGYWAGLDASAQTTSHELTIPNDLIGCIIGRQGAKINEIRQMSGAQIKIANPVEGSTDRQVTITGSAASISLAQYLINVRLSSETGGMGSS

SEQ ID NO: 58369 - protein, 361 aa, Homo sapiens
MDTGVIEGGLNVTLTIRLLMHGKEVGSIIGKKGESVKKMREESGARINISEGNCPERIITLAGPTNAIFKAFAMIIDKLEEDISSSMTNSTAASRPPVTLRLVVPASQCGSLIGKGGCKIKEIRESTGAQVQVAGDMLPNSTERAITIAGIPQSIIECVKQICVVMLESPPKGVTIPYRPKPSSSPVIFAGGQDRYSTGSDSASFPHTTPSMCLNPDLEGPPLEAYTIQGQYAIPQPDLTKLHQLAMQQSHFPMTHGNTGFSGIESSSPEVKGYWGLDASAQTTSHELTIPNDLIGCIIGRQGAKINEIRQMSGAQIKIANPVEGSTDRQVTITGSAASISLAQYLINVRLSSETGGMGSS

SEQ ID NO: 58370 - protein, 351 aa, Homo sapiens
LSPGDAFWAPSVLPHSTLSTLSHHPQPQFGRRMESKVSEGGLNVTLTIRLLMHGKVRGAAIVSKGETVKKMREESGARINISEGNCPERIVTITGPTDAIFKAFAMIAYKFEEDIINSMSNSPATSKPPVTLRLVVPASQCGSLIGKGGSKIKEIRESTGAQVQVAGDMLPNSTERAVTISGTPDAIIQCVKQICVVMLESPPKGATIPYRPKPASTPVIFAGGQAYTIQGQYAIPHPDQLTKLHQLAMQQTPFPPLGQTNPAFPGLDASPPASTHELTIPNDLIGCIIGRQGTKINEIRQMSGAQIKIANATEGSSERQITITGTPANISLAQYLINARLTSEVTGMGTL

SEQ ID NO: 58371 - protein, 322 aa, Homo sapiens
PQPQFGRRMESKVSEGGLNVTLTIRLLMHGKEVGSIIGKKGETVKKMREESGARINISEGNCPERIVTITGPTDAIFKAFAMIAYKFEEDIINSMSNSPATSKPPVTLRLVVPASQCGSLIGKGGSKIKEIRESTGAQVQVAGDMLPNSTERAVTISGTPDAIIQCVKQICVVMLEAYTIQGQYAIPHPDQLTKLHQLAMQQTPFPPLGQTNPAFPGEKLPLHSSEEAQNLMGQSSGLDASPPASTHELTIPNDLIGCIIGRQGTKINEIRQMSGAQIKIANATEGSSERQITITGTPANISLAQYLINARLTSEVTGMGTL

SEQ ID NO: 58372 - protein, 345 aa, Homo sapiens
MGEGDAFWAPSVLPHSTLSTLSHHPQPQFGRRMESKVSEGGLNVTLTIRLLMHGKEVGSIIGKKGETVKKMREESGARINISEGNCPERIVTITGPTDAIFKAFAMIAYKFEEDIINSMSNSPATSKPPVTLRLVVPASQCGSLIGKGGSKIKEIRESTGAQVQVAGDMLPNSTERAVTISGTPDAIIQCVKQICVVMLEAYTIQGQYAIPHPDLTKLHQLAMQQTPFPPLGQTNPAFPGEKLPLHSSEEAQNLMGQSSGLDASPPASTHELTIPNDLIGCIIGRQGTKINEIRQMSGAQIKIANATEGSSERQITITGTPANISLAQYLINARLTSEVTGMGTL

SEQ ID NO: 58373 - protein, 370 aa, Homo sapiens
MGEGDAFWAPSVLPHSTLSTLSHHPQPQFGRRMESKVSEGGLNVTLTIRLLMHGKEVGSIIGKKGETVKKMREESGARINISEGNCPERIVTITGPTDAIFKAFAMIAYKFEEDIINSMSNSPATSKPPVTLRLVVPASQCGSLIGKGGSKIKEIRESTGAQVQVAGDMLPNSTERAVTISGTPDAIIQCVKQICVVMLESPPKGATIPYRPKPASTPVIFAGGQAYTIQGQYAIPHPDLTKLHQLAMQQTPFPPLGQTNPAFPGEKLPLHSSEEAQNLMGQSSGLDASPPASTHELTIPNDLIGCIIGRQGTKINEIRQMSGAQIKIANATEGSSERQITITGTPANISLAQYLINARLTSEVTGMGTL

SEQ ID NO: 58374 - protein, 351 aa, Homo sapiens
MGEGDAFWAPSVLPHSTLSTLSHHPQPQFGRRMESKVSEGGLNVTLTIRLLMHGKEVGSIIGKKGETVKKMREESGARINISEGNCPERIVTITGPTDAIFKAFAMIAYKFEEDIINSMSNSPATSKPPVTLRLVVPASQCGSLIGKGGSKIKEIRESTGAQVQVAGDMLPNSTERAVTISGTPDAIIQCVKQICVVMLESPPKGATIPYRPKPASTPVIFAGGQAYTIQGQYAIPHPDQLTKLHQLAMQQTPFPPLGQTNPAFPGLDASPPASTHELTIPNDLIGCIIGRQGTKINEIRQMSGAQIKIANATEGSSERQITITGTPANISLAQYLINARLTSEVTGMGTL

SEQ ID NO: 58375 - protein, 371 aa, Homo sapiens
MGEGDAFWAPSVLPHSTLSTLSHHPQPQFGRRMESKVSEGGLNVTLTIRLLMHGKEVGSIIGKKGETVKKMREESGARINISEGNCPERIVTITGPTDAIFKAFAMIAYKFEEDIINSMSNSPATSKPPVTLRLVVPASQCGSLIGKGGSKIKEIRESTGAQVQVAGDMLPNSTERAVTISGTPDAIIQCVKQICVVMLESPPKGATIPYRPKPASTPVIFAGGQAYTIQGQYAIPHPDQLTKLHQLAMQQTPFPPLGQTNPAFPGEKLPLHSSEEAQNLMGQSSGLDASPPASTHELTIPNDLIGCIIGRQGTKINEIRQMSGAQIKIANATEGSSERQITITGTPANISLAQYLINARLTSEVTGMGTL

SEQ ID NO: 58376 - protein, 371 aa, Homo sapiens; identical to SEQ ID NO: 58375

SEQ ID NO: 58377 - protein, 5 aa, Homo sapiens
MESKV

SEQ ID NO: 58378 - protein, 1689 aa, Homo sapiens
MGSKRRRATSPSSSVSGDFDDGHHSVSTPGPSRKRRRLSNLPTVDPIAVCHELYNTIRDYKDEQGRLLCELFIRAPKRRNQPDYYEVVSQPIDLMKIQQKLKMEEYDDVNLLTADFQLLFNNAKSYYKPDSPEYKAACKLWDLYLRTRNEFVQKGEADDEDDDEDGQDNQGTVTEGSSPAYLKEILEQLLEAIVVATNPSGRLISELFQKLPSKVQYPDYYAIIKEPIDLKTIAQRIQNGSYKSIHAMAKDIDLLAKNAKTYNEPGSQVFKDANSIKKIFYMKKAEIEHHEMAKSSLRMRTPSNLAAARLTGPSHSKGSLGEERNPTSKYYRNKRAVQGGRLSAITMALQYGSESEEDAALAAARYEEGESEAESITSFMDVSNPFYQLYDTVRSCRNNQGQLIAEPFYHLPSKKKYPDYYQQIKMPISLQQIRTKLKNQEYETLDHLECDLNLMFENAKRYNVPNSAIYKRVLKLQQVMQAKKKELARRDDIEDGDSMISSATSDTGSAKRKSKKNIRKQRMKILFNVVLEAREPGSGRRLCDLFMVKPSKKDYPDYYKIILEPMDLKIIEHNIRNDKYAGEEGMIEDMKLMFRNARHYNEEGSQVYNDAHILEKLLKEKRKELGPLPDDDDMASPKLKLSRKSGISPKKSKYMTPMQQKLNEVYEAVKNYTDKRGRRLSAIFLRLPSRSELPDYYLTIKKPMDMEKIRSHMMANKYQDIDSMVEDFVMMFNNACTYNEPESLIYKDALVLHKVLLETRRDLEGDEDSHVPNVTLLIQELIHNLFVSVMSHQDDEGRCYSDSLAEIPAVDPNFPNKPPLTFDIIRKNVENNRYRRLDLFQEHMFEVLERARRMNRTDSEIYEDAVELQQFFIKIRDELCKNGEILLSPALSYTTKHLHNDVEKERKEKLPKEIEEDKLKREEEKREAEKSEDSSGAAGLSGLHRTYSQDCSFKNSMYHVGDYVYVEPAEANLQPHIVCIERLWEDSAGEKWLYGCWFYRPNETFHLATRKFLEKEVFKSDYYNKVPVSKILGKCVVMFVKEYFKLCPENFRDEDVFVCESRYSAKTKSFKKIKLWTMPISSVRFVPRDVPLPVVRVASVFANADKGDDEKNTDNSEDSRAEDNFNLEKEKEDVPVEMSNGEPGCHYFEQLHYNDMWLKVGDCVFIKSHGLVRPRVGRIEKVWVRDGAAYFYGPIFIHPEETEHEPTKMFYKKEVFLSNLEETCPMTCILGKCAVLSFKDFLSCRPTEIPENDILLCESRYNESDKQMKKFKGLKRFSLSAKVVDDEIYYFRKPIVPQKEPSPLLEKKIQLLEAKFAELEGGDDDIEEMGEEDSEVIEPPSLPQLQTPLASELDLMPYTPPQSTPKSAKGSAKKEGSKRKINMSGYILFSSEMRAVIKAQHPDYSFGELSRLVGTEWRNLETAKKAEYEERAAKVAEQQERERAAQQQQPSASPRAGTPVGALMGVVPPPTPMGMLNQQLTPVAGMMGGYPPGLPPLQGPVDGLVSMGSMQPLHPGGPPPHHLPPGVPGLPGIPPPGVMNQGVAPMVGTPAPGGSPYGQQVGVLGPPGQQAPPPYPGPHPAGPPVIQQPTTPMFVAPPPKTQRLLHSEAYLKYIEGLSAESNSISKWDQTLAARRRDVHLSKEQESRLPSHWLKSKGAHTTMADALWRLRDLMLRDTLNIRQAYNLENV

SEQ ID NO: 58379 - protein, 1582 aa, Homo sapiens
MGSKRRRATSPSSSVSGDFDDGHHSVSTPGPSRKRRRLSNLPTVDPIAVCHELYNTIRDYKDEQGRLLCELFIRAPKRRNQPDYYEVVSQPIDLMKIQQKLKMEEYDDVNLLTADFQLLFNNAKSYYKPDSPEYKAACKLWDLYLRTRNEFVQKGEADDEDDDEDGQDNQGTVTEGSSPAYLKEILEQLLEAIVVATNPSGRLISELFQKLPSKVQYPDYYAIIKEPIDLKTIAQRIQNGSYKSIHAMAKDIDLLAKNAKTYNEPGSQVFKDANSIKKIFYMKKAEIEHHEMAKSSLRMRTPSNLAAARLTGPSHSKGSLGEERNPTSKYYRNKRAVQGGRLSAITMALQYGSESEEDAALAAARYEEGESEAESITSFMDVSNPFYQLYDTVRSCRNNQGQLIAEPFYHLPSKKKYPDYYQQIKMPISLQQIRTKLKNQEYETLDHLECDLNLMFENAKRYNVPNSAIYKRVLKLQQVMQAKKKELARRDDIEDGDSMISSATSDTGSAKRKSKKNIRKQRMKILFNVVLEAREPGSGRRLCDLFMVKPSKKDYPDYYKIILEPMDLKIIEHNIRNDKYAGEEGMIEDMKLMFRNARHYNEEGSQVYNDAHILEKLLKEKRKELGPLPDDDDMASPKLKLSRKSGISPKKSKYMTPMQQKLNEVYEAVKNYTDKRGRRLSAIFLRLPSRSELPDYYLTIKKPMDMEKIRSHMMANKYQDIDSMVEDFVMMFNNACTYNEPESLIYKDALVLHKVLLETRRDLEGDEDSHVPNVTLLIQELIHNLFVSVMSHQDDEGRCYSDSLAEIPAVDPNFPNKPPLTFDIIRKNVENNRYRRLDLFQEHMFEVLERARRMNRTDSEIYEDAVELQQFFIKIRDELCKNGEILLSPALSYTTKHLHNDVEKERKEKLPKEIEEDKLKREEEKREAEKSEDSSGAAGLSGLHRTYSQDCSFKNSMYHVGDYVYVEPAEANLQPHIVCIERLWEDSAGEKWLYGCWFYRPNETFHLATRKFLEKEVFKSDYYNKVPVSKILGKCVVMFVKEYFKLCPENFRDEDVFVCESRYSAKTKSFKKIKLWTMPISSVRFVPRDVPLPVVRVASVFANADKGDDEKNTDNSEDSRAEDNFNLEKEKEDVPVEMSNGEPGCHYFEQLHYNDMWLKVGDCVFIKSHGLVRPRVGRIEKVWVRDGAAYFYGPIFIHPEETEHEPTKMFYKKEVFLSNLEETCPMTCILGKCAVLSFKDFLSCRPTEIPENDILLCESRYNESDKQMKKFKGLKRFSLSAKVVDDEIYYFRKPIVPQKEPSPLLEKKIQLLEAKFAELEGGDDDIEEMGEEDSEVIEPPSLPQLQTPLASELDLMPYTPPQSTPKSAKGSAKKEGSKRKINMSGYILFSSEMRAVIKAQHPDYSFGELSRLVGTEWRNLETAKKAEYEGVMNQGVAPMVGTPAPGGSPYGQQVGVLGPPGQQAPPPYPGPHPAGPPVIQQPTTPMFVAPPPKTQRLLHSEAYLKYIEGLSAESNSISKWDQTLAARRRDVHLSKEQESRLPSHWLKSKGAHTTMADALWRLRDLMLRDTLNIRQAYNLENV

SEQ ID NO: 58380 - protein, 1602 aa, Homo sapiens
MGSKRRRATSPSSSVSGDFDDGHHSVSTPGPSRKRRRLSNLPTVDPIAVCHELYNTIRDYKDEQGRLLCELFIRAPKRRNQPDYYEVVSQPIDLMKIQQKLKMEEYDDVNLLTADFQLLFNNAKSYYKPDSPEYKAACKLWDLYLRTRNEFVQKGEADDEDDDEDGQDNQGTVTEGSSPAYLKEILEQLLEAIVVATNPSGRLISELFQKLPSKVQYPDYYAIIKEPIDLKTIAQRIQNGSYKSIHAMAKDIDLLAKNAKTYNEPGSQVFKDANSIKKIFYMKKAEIEHHEMAKSSLRMSNKRAVQGGRLSAITMALQYGSESEEDAALAAARYEEGESEAESITSFMDVSNPFYQLYDTVRSCRNNQGQLIAEPFYHLPSKKKYPDYYQQIKMPISLQQIRTKLKNQEYETLDHLECDLNLMFENAKRYNVPNSAIYKRVLKLQQVMQAKKKELARRDDIEDGDSMISSATSDTGSAKRKSKKNIRKQRMKILFNVVLEAREPGSGRRLCDLFMVKPSKKDYPDYYKIILEPMDLKIIEHNIRNDKYAGEEGMIEDMKLMFRNARHYNEEGSQVYNDAHILEKLLKEKRKELGPLPDDDDMASPKLKLSRKSGISPKKSKYMTPMQQKLNEVYEAVKNYTDKRGRRLSAIFLRLPSRSELPDYYLTIKKPMDMEKIRSHMMANKYQDIDSMVEDFVMMFNNACTYNEPESLIYKDALVLHKVLLETRRDLEGDEDSHVPNVTLLIQELIHNLFVSVMSHQDDEGRCYSDSLAEIPAVDPNFPNKPPLTFDIIRKNVENNRYRRLDLFQEHMFEVLERARRMNRTDSEIYEDAVELQQFFIKIRDELCKNGEILLSPALSYTTKHLHNDVEKERKEKLPKEIEEDKLKREEEKREAEKSEDSSGAAGLSGLHRTYSQDCSFKNSMYHVGDYVYVEPAEANLQPHIVCIERLWEDSAGEKWLYGCWFYRPNETFHLATRKFLEKEVFKSDYYNKVPVSKILGKCVVMFVKEYFKLCPENFRDEDVFVCESRYSAKTKSFKKIKLWTMPISSVRFVPRDVPLPVVRVASVFANADKGDDEKNTDNSEDSRAEDNFNLEKEKEDVPVEMSNGEPGCHYFEQLHYNDMWLKVGDCVFIKSHGLVRPRVGRIEKVWVRDGAAYFYGPIFIHPEETEHEPTKMFYKKEVFLSNLEETCPMTCILGKCAVLSFKDFLSCRPTEIPENDILLCESRYNESDKQMKKFKGLKRFSLSAKVVDDEIYYFRKPIVPQKEPSPLLEKKIQLLEAKFAELEGGDDDIEEMGEEDSEVIEPPSLPQLQTPLASELDLMPYTPPQSTPKSAKGSAKKEGSKRKINMSGYILFSSEMRAVIKAQHPDYSFGELSRLVGTEWRNLETAKKAEYEGMMGGYPPGLPPLQGPVDGLVSMGSMQPLHPGGPPPHHLPPGVPGLPGIPPPGVMNQGVAPMVGTPAPGGSPYGQQVGVLGPPGQQAPPPYPGPHPAGPPVIQQPTTPMFVAPPPKTQRLLHSEAYLKYIEGLSAESNSISKWDQTLAARRRDVHLSKEQESRLPSHWLKSKGAHTTMADALWRLRDLMLRDTLNIRQAYNLENV

SEQ ID NO: 58381 - protein, 1582 aa, Homo sapiens
MGSKRRRATSPSSSVSGDFDDGHHSVSTPGPSRKRRRLSNLPTVDPIAVCHELYNTIRDYKDEQGRLLCELFIRAPKRRNQPDYYEVVSQPIDLMKIQQKLKMEEYDDVNLLTADFQLLFNNAKSYYKPDSPEYKAACKLWDLYLRTRNEFVQKGEADDEDDDEDGQDNQGTVTEGSSPAYLKEILEQLLEAIVVATNPSGRLISELFQKLPSKVQYPDYYAIIKEPIDLKTIAQRIQNGSYKSIHAMAKDIDLLAKNAKTYNEPGSQVFKDANSIKKIFYMKKAEIEHHEMAKSSLRMRTPSNLAAARLTGPSHSKGSLGEERNPTSKYYRNKRAVQGGRLSAITMALQYGSESEEDAALAAARYEEGESEAESITSFMDVSNPFYQLYDTVRSCRNNQGQLIAEPFYHLPSKKKYPDYYQQIKMPISLQQIRTKLKNQEYETLDHLECDLNLMFENAKRYNVPNSAIYKRVLKLQQVMQAKKKELARRDDIEDGDSMISSATSDTGSAKRKSKKNIRKQRMKILFNVVLEAREPGSGRRLCDLFMVKPSKKDYPDYYKIILEPMDLKIIEHNIRNDKYAGEEGMIEDMKLMFRNARHYNEEGSQVYNDAHILEKLLKEKRKELGPLPDDDDMASPKLKLSRKSGISPKKSKYMTPMQQKLNEVYEAVKNYTDKRGRRLSAIFLRLPSRSELPDYYLTIKKPMDMEKIRSHMMANKYQDIDSMVEDFVMMFNNACTYNEPESLIYKDALVLHKVLLETRRDLEGDEDSHVPNVTLLIQELIHNLFVSVMSHQDDEGRCYSDSLAEIPAVDPNFPNKPPLTFDIIRKNVENNRYRRLDLFQEHMFEVLERARRMNRTDSEIYEDAVELQQFFIKIRDELCKNGEILLSPALSYTTKHLHNDVEKERKEKLPKEIEEDKLKREEEKREAEKSEDSSGAAGLSGLHRTYSQDCSFKNSMYHVGDYVYVEPAEANLQPHIVCIERLWEDSAEKEVFKSDYYNKVPVSKILGKCVVMFVKEYFKLCPENFRDEDVFVCESRYSAKTKSFKKIKLWTMPISSVRFVPRDVPLPVVRVASVFANADKGDDEKNTDNSEDSRAEDNFNLEKEKEDVPVEMSNGEPGCHYFEQLHYNDMWLKVGDCVFIKSHGLVRPRVGRIEKVWVRDGAAYFYGPIFIHPEETEHEPTKMFYKKEVFLSNLEETCPMTCILGKCAVLSFKDFLSCRPTEIPENDILLCESRYNESDKQMKKFKGLKRFSLSAKVVDDEIYYFRKPIVPQKEPSPLLEKKIQLLEAKFAELEGGDDDIEEMGEEDSESTPKSAKGSAKKEGSKRKINMSGYILFSSEMRAVIKAQHPDYSFGELSRLVGTEWRNLETAKKAEYEGMMGGYPPGLPPLQGPVDGLVSMGSMQPLHPGGPPPHHLPPGVPGLPGIPPPGVMNQGVAPMVGTPAPGGSPYGQQVGVLGPPGQQAPPPYPGPHPAGPPVIQQPTTPMFVAPPPKTQRLLHSEAYLKYIEGLSAESNSISKWDQTLAARRRDVHLSKEQESRLPSHWLKSKGAHTTMADALWRLRDLMLRDTLNIRQAYNLENV

SEQ ID NO: 58382 - protein, 1634 aa, Homo sapiens
MGSKRRRATSPSSSVSGDFDDGHHSVSTPGPSRKRRRLSNLPTVDPIAVCHELYNTIRDYKDEQGRLLCELFIRAPKRRNQPDYYEVVSQPIDLMKIQQKLKMEEYDDVNLLTADFQLLFNNAKSYYKPDSPEYKAACKLWDLYLRTRNEFVQKGEADDEDDDEDGQDNQGTVTEGSSPAYLKEILEQLLEAIVVATNPSGRLISELFQKLPSKVQYPDYYAIIKEPIDLKTIAQRIQNGSYKSIHAMAKDIDLLAKNAKTYNEPGSQVFKDANSIKKIFYMKKAEIEHHEMAKSSLRMRTPSNLAAARLTGPSHSKGSLGEERNPTSKYYRNKRAVQGGRLSAITMALQYGSESEEDAALAAARYEEGESEAESITSFMDVSNPFYQLYDTVRSCRNNQGQLIAEPFYHLPSKKKYPDYYQQIKMPISLQQIRTKLKNQEYETLDHLECDLNLMFENAKRYNVPNSAIYKRVLKLQQVMQAKKKELARRDDIEDGDSMISSATSDTGSAKRKSKKNIRKQRMKILFNVVLEAREPGSGRRLCDLFMVKPSKKDYPDYYKIILEPMDLKIIEHNIRNDKYAGEEGMIEDMKLMFRNARHYNEEGSQVYNDAHILEKLLKEKRKELGPLPDDDDMASPKLKLSRKSGISPKKSKYMTPMQQKLNEVYEAVKNYTDKRGRRLSAIFLRLPSRSELPDYYLTIKKPMDMEKIRSHMMANKYQDIDSMVEDFVMMFNNACTYNEPESLIYKDALVLHKVLLETRRDLEGDEDSHVPNVTLLIQELIHNLFVSVMSHQDDEGRCYSDSLAEIPAVDPNFPNKPPLTFDIIRKNVENNRYRRLDLFQEHMFEVLERARRMNRTDSEIYEDAVELQQFFIKIRDELCKNGEILLSPALSYTTKHLHNDVEKERKEKLPKEIEEDKLKREEEKREAEKSEDSSGAAGLSGLHRTYSQDCSFKNSMYHVGDYVYVEPAEANLQPHIVCIERLWEDSAGEKWLYGCWFYRPNETFHLATRKFLEKEVFKSDYYNKVPVSKILGKCVVMFVKEYFKLCPENFRDEDVFVCESRYSAKTKSFKKIKLWTMPISSVRFVPRDVPLPVVRVASVFANADKGDDEKNTDNSEDSRAEDNFNLEKEKEDVPVEMSNGEPGCHYFEQLHYNDMWLKVGDCVFIKSHGLVRPRVGRIEKVWVRDGAAYFYGPIFIHPEETEHEPTKMFYKKEVFLSNLEETCPMTCILGKCAVLSFKDFLSCRPTEIPENDILLCESRYNESDKQMKKFKGLKRFSLSAKVVDDEIYYFRKPIVPQKEPSPLLEKKIQLLEAKFAELEGGDDDIEEMGEEDSEVIEPPSLPQLQTPLASELDLMPYTPPQSTPKSAKGSAKKEGSKRKINMSGYILFSSEMRAVIKAQHPDYSFGELSRLVGTEWRNLETAKKAEYEGMMGGYPPGLPPLQGPVDGLVSMGSMQPLHPGGPPPHHLPPGVPGLPGIPPPGVMNQGVAPMVGTPAPGGSPYGQQVGVLGPPGQQAPPPYPGPHPAGPPVIQQPTTPMFVAPPPKTQRLLHSEAYLKYIEGLSAESNSISKWDQTLAARRRDVHLSKEQESRLPSHWLKSKGAHTTMADALWRLRDLMLRDTLNIRQAYNLENV

SEQ ID NO: 58383 - protein, 152 aa, Homo sapiens
MGSKRRRATSPSSSVSGDFDDGHHSVSTPGPSRKRRRLSNLPTVDPIAVCHELYNTIRDYKDEQGRLLCELFIRAPKRRNQPDYYEVVSQPIDLMKIQQKLKMEEYDDVNLLTADFQLLFNNAKSYYKPDSPEYKAACKLWDLYLRTRNEFV

SEQ ID NO: 58384 - protein, 26 aa, Homo sapiens
MGSKRRRATSPSSSVSGDFDDGHHSV

SEQ ID NO: 58385 - protein, 230 aa, Homo sapiens
MGSKRRRATSPSSSVSGDFDDGHHSVSTPGPSRKRRRLSNLPTVDPIAVCHELYNTIRDYKDEQGRLLCELFIRAPKRRNQPDYYEVVSQPIDLMKIQQKLKMEEYDDVNLLTADFQLLFNNAKSYYKPDSPEYKAACKLWDLYLRTRNEFVQKGEADDEDDDEDGQDNQGTVTEGSSPAYLKEILEQLLEAIVVATNPSGRLISELFQKLPSKVQYPDYYAIIKEPIDL

SEQ ID NO: 58386 - protein, 43 aa, Homo sapiens
MGSKRRRATSPSSSVSGDFDDGHHSVSTPGPSRKRRRLSNLPT

SEQ ID NO: 58387 - protein, 118 aa, Homo sapiens
MGSKRRRATSPSSSVSGDFDDGHHSVSTPGPSRKRRRLSNLPTVDPIAVCHELYNTIRDYKDEQGRLLCELFIRAPKRRNQPDYYEVVSQPIDLMKIQQKLKMEEYDDVNLLTADFQL

SEQ ID NO: 58388 - protein, 87 aa, Homo sapiens
MGSKRRRATSPSSSVSGDFDDGHHSVSTPGPSRKRRRLSNLPTVDPIAVCHELYNTIRDYKDEQGRLLCELFIRAPKRRNQPDYYEV

SEQ ID NO: 58389 - protein, 43 aa, Homo sapiens; identical to SEQ ID NO: 58386

SEQ ID NO: 58390 - protein, 275 aa, Homo sapiens
MEGVAVVTAGSVGAAKTEGAAALPPPPPVSPPALTPAPAAGEEGPAPLSETGAPGCSGSRPPELEPERSLGRFRGRFEDEDEELEEEEELEEEEEEEEEDMSHFSLRLEGGRQDSEDEEERLINLSELTPYILCSICKGYLIDATTITECLHTFCKSCIVRHFYYSNRCPKCNIVVHQTQPLYNISANEGTGHFKPLEKKFVRVSGEATIGHVEKFLRRKMGLDPACQVDIICGDHLLEQYQTLREIRRAIGDAAMQDGLLVLHYGLVVSPLKIT

SEQ ID NO: 58391 - protein, 350 aa, Homo sapiens
MEGVAVVTAGSVGAAKTEGAAALPPPPPVSPPALTPAPAAGEEGPAPLSETGAPGCSGSRPPELEPERSLGRFRGRFEDEDEELEEEEELEEEEEEEEEDMSHFSLRLEGGRQDSEDEEERLINLSELTPYILCSICKGYLIDATTITECLHTFCKSCIVRHFYYSNRCPKCNIVVHQTQPLYNIRLDRQLQDIVYKLVINLEEREKKQMHDFYKERGLEVPKPAVPQPVPSSKGRSKKVLESVFRIPPELDMSLLLEFIGANEGTGHFKPLEKKFVRVSGEATIGHVEKFLRRKMGLDPACQVDIICGDHLLEQYQTLREIRRAIGDAAMQDGLLVLHYGLVVSPLKIT

SEQ ID NO: 58392 - protein, 3396 aa, Homo sapiens
MTAWLISLMSIEVLLLAVRHLSLHIEPEEGSLAGGTWITVIFDGLELGVLYPNNGSQLEIHLVNVNMVVPALRSVPCDVFPVFLDLPVVTCRTRSVLSEAHEGLYFLEAYFGGQLVSSPNPGPRDSCTFKFSKAQTPIVHQVYPPSGVPGKLIHVYGWIITGRLETFDFDAEYIDSPVILEAQGDKWVTPCSLINRQMGSCYPIQEDHGLGTLQCHVEGDYIGSQNVSFSVFNKGKSMVHKKAWLISAKQDLFLYQTHSEILSVFPETGSLGGRTNITITGDFFDNSAQVTIAGIPCDIRHVSPRKIECTTRAPGKDVRLTTPQPGNRGLLFEVGDAVEGLELTEATPGYRWQIVPNASSPFGFWSQEGQPFRARLSGFFVAPETNNYTFWIQADSQASLHFSWSEEPRTKVKVASISVGTADWFDSWEQNRDEGTWQQKTPKLELLGGAMYYLEAEHHGIAPSRGMRIGVQIHNTWLNPDVVTTYLREKHQIRVRAQRLPEVQVLNVSGRGNFFLTWDNVSSQPIPANATAHLIQTTIEELLAVKCKLEPLWSNILLRLGFERGPEVSNSDGDLTSGTEPFCGRFSLRQPRHLVLTPPAAQKGYRLDQYTHLCLAYKGHMNKILKMIVSFTIGFQNMVKNTTCDWSLTRTSPESWQFDCTDLWETCVRCFGDLQPPPANSPVLVHQINLLPLAQETGLFYVDEIIIADTNVTVSQADSGTARPGGNLVESVSVVGSPPVYSVTSWLAGCGTELPLITARSVPTEGTEEGSGLVLVTTQRRQRTSPPLGGHFRIQLPNTVISDVPVQISAHHLHQLLQNNADDFTSRYLNASDFTVKEDLYTCYEHVWTLSWSTQIGDLPNFIRVSDENLTGVNPAAATRVVYDGGVFLGPIFGDMLATANQHTQVVVRVNDVPAHCPGSCSFQYLQGSTPCVHSVWYSIDGDINLMIYITGTGFSGDSQFLQVTVNKTSCKVIFSNQTNVVCQTDLLPVGMHRILMLVRPSGLAISATGEDLFLNVKPRLDMVEPSRAADIGGLWATIRGSSLEGVSLILFGSYSCAINVATSNSSRIQCKVPPRGKDGRIVNVTVIRGDYSAVLPRAFTYVSSLNPVIVTLSRNISNIAGGETLVIGVARLMNYTDLDVEVHVQDALAPVHTQSAWGLEVALPPLPAGLHRISVSINGVSIHSQGVDLHIQYLTEVFSIEPCCGSLLGGTILSISGIGFSRDPALVWVLVGNRSCDIVNLTEASIWCETLPAPQIPDAGAPTVPAAVEVWAGNRFFARGPSPSLVGKGFTFMYEAAATPVVTAMQGEITNSSLSLHVGGSNLSNSVILLGNLNCDVETQSFQGNVSLSGCSIPLHSLEAGIYPLQVRQKQMGFANMSVVLQQFAVMPRIMAIFPSQGSACGGTILTVRGLLLNSRRRSVRVDLSGPFTCVILSLGDHTILCQVSLEGDPLPGASFSLNVTVLVNGLTSECQGNCTLFIREEASPVMDALSTNTSGSLTTVLIRGQRLATTADEPMVFVDDQLPCNVTFFNASHVVCQTRDLAPGPHYLSVFYTRNGYACSGNVSRHFYIMPQVFHYFPKNFSLHGGSLLTIEGTGLRGQNTTSVYIDQQTCLTVNIGAELIRCIVPTGNGSVALEIEVDGLWYHIGVIGYNKAFTPELISISQSDDILTFAVAQISGAANIDIFIGMSPCVGVSGNHTVLQCVVPSLPAGEYHVRGYDCIRGWASSALVFTSRVIITAVTENFGCLGGRLVHVFGAGFSPGNVSAAVCGAPCRVLANATVSAFSCLVLPLDVSLAFLCGLKREEDSCEAARHTYVQCDLTVAMATEQLLESWPYLYICEESSQCLFVPDHWAESMFPSFSGLFISPKLERDEVLIYNSSCNITMETEAEMECETPNQPITVKITEIRKRWGQNTQGNFSLQFCRRWSRTHSWFPERLPQDGDNVTVENGQLLLLDTNTSILNLLHIKGGKLIFMAPGPIELRAHAILVSDGGELRIGSEDKPFQGRAQITLYGSSYSTPFFPYGVKFLAVRNGTLSLHGSLPEVIVTCLRATAHALDTVLALEDAVDWNPGDEVVIISGTGVKGAKPMEEIVTVETVQDTDLYLKSPLRYSHNFTENWVAGEHHILKATVALLSRSITIQGNLTNEREKLLVSCQEANAPEGNLQHCLYSMSEKMLGSRDMGARVIVQSFPEEPSQVQLKGVQFQVLGQAFHKHLSSLTLVGAMRESFIQGCTVRNSFSRGLSMCGTLGLKVDSNVFYNILGHALLVGTCTEMRYISWEAIHGRKDDWSGHGNIIRNNVIIQVSGAEGLSNPEMLTPSGIYICSPTNVIEGNRVCGAGYGYFFHLMTNQTSQAPLLSFTQNIAHSCTRYGLFVYPKFQPPWDNVTGTTLFQSFTVWESAGGAQIFRSSNLRLKNFKVYSCRDFGIDVLESDANTSVTDSLLLGHFAHKGSLCMSSGIKTPKRWELMVSNTTFVNFDLINCVAIRTCSDCSQGQGGFTVKTSQLKFTNSSNLVAFPFPHAAILEDLDGSLSGKNRSHILASMETLSASCLVNSSFGRVVHGSACGGGVLFHRMSIGLANTPEVSYDLTMTDSRNKTTTVNYVRDTLSNPRGWMALLLDQETYSLQSENLWINRSLQYSATFDNFAPGNYLLLVHTDLPPYPDILLRCGSRVGLSFPFLPSPGQNQGCDWFFNSQLRQLTYLVSGEGQVQVILRVKEGMPPTISASTSAPESALKWSLPETWQGVEEGWGGYNNTIPGPGDDVLILPNRTVLVDTDLPFFKGLYVMGTLDFPVDRSNVLSVACMVIAGGELKVGTLENPLEKEQKLLILLRASEGVFCDRMNGIHIDPGTIGVYGKVHLYSAYPKNSWTHLGADIASGNERIIVEDAVDWRPHDKIVLSSSSYEPHEAEVLTVKEVKGHHVRIYERLKHRHIGSVHVTEDGRHIRLAAEVGLLTRNIQIQPDVSCRGRLFVGSFRKSSREEFSGVLQLLNVEIQNFGSPLYSSVEFSNVSAGSWIISSTLHQSCGGGIHAAASHGVLLNDNIVFGTAGHGIDLEGQAYTVTNNLVVLMTQPAWSTIWVAGIKVNQVKDINLHGNVVAGSERLGFHIRGHKCSSCELLWSDNVAHSSLHGLHLYKESGLDNCTRISGFLAFKNFDYGAMLHVENSVEIENITLVDNTIGLLAVVYVFSAPQNSVKKVQIVLRNSVIVATSSSFDCIQDKVKPHSANLTSTDRAPSNPRGGRIGILWPVFTSEPNQWPQEPWHKVRNDHSISGIMKLQDVTFSSFVKSCYSDDLDVCILPNAENSGIMHPITAERTRMLKIKDKNKFYFPSLQPRKDLGKVVCPELDCASPRKYLFKDLDGRALGLPPPVSVFPKTEAEWTASFFNAVTTEQALKISE

SEQ ID NO: 58393 - protein, 4074 aa, Homo sapiens
MTAWLISLMSIEVLLLAVRHLSLHIEPEEGSLAGGTWITVIFDGLELGVLYPNNGSQLEIHLVNVNMVVPALRSVPCDVFPVFLDLPVVTCRTRSVLSEAHEGLYFLEAYFGGQLVSSPNPGPRDSCTFKFSKAQTPIVHQVYPPSGVPGKLIHVYGWIITGRLETFDFDAEYIDSPVILEAQGDKWVTPCSLINRQMGSCYPIQEDHGLGTLQCHVEGDYIGSQNVSFSVFNKGKSMVHKKAWLISAKQDLFLYQTHSEILSVFPETGSLGGRTNITITGDFFDNSAQVTIAGIPCDIRHVSPRKIECTTRAPGKDVRLTTPQPGNRGLLFEVGDAVEGLELTEATPGYRWQIVPNASSPFGFWSQEGQPFRARLSGFFVAPETNNYTFWIQADSQASLHFSWSEEPRTKVKVASISVGTADWFDSWEQNRDEGTWQQKTPKLELLGGAMYYLEAEHHGIAPSRGMRIGVQIHNTWLNPDVVTTYLREKHQIRVRAQRLPEVQVLNVSGRGNFFLTWDNVSSQPIPANATAHLIQTTIEELLAVKCKLEPLWSNILLRLGFERGPEVSNSDGDLTSGTEPFCGRFSLRQPRHLVLTPPAAQKGYRLDQYTHLCLAYKGHMNKILKMIVSFTIGFQNMVKNTTCDWSLTRTSPESWQFDCTDLWETCVRCFGDLQPPPANSPVLVHQINLLPLAQETGLFYVDEIIIADTNVTVSQADSGTARPGGNLVESVSVVGSPPVYSVTSWLAGCGTELPLITARSVPTEGTEEGSGLVLVTTQRRQRTSPPLGGHFRIQLPNTVISDVPVQISAHHLHQLLQNNADDFTSRYLNASDFTVKEDLYTCYEHVWTLSWSTQIGDLPNFIRVSDENLTGVNPAAATRVVYDGGVFLGPIFGDMLATANQHTQVVVRVNDVPAHCPGSCSFQYLQGSTPCVHSVWYSIDGDINLMIYITGTGFSGDSQFLQVTVNKTSCKVIFSNQTNVVCQTDLLPVGMHRILMLVRPSGLAISATGEDLFLNVKPRLDMVEPSRAADIGGLWATIRGSSLEGVSLILFGSYSCAINVATSNSSRIQCKVPPRGKDGRIVNVTVIRGDYSAVLPRAFTYVSSLNPVIVTLSRNISNIAGGETLVIGVARLMNYTDLDVEVHVQDALAPVHTQSAWGLEVALPPLPAGLHRISVSINGVSIHSQGVDLHIQYLTEVFSIEPCCGSLLGGTILSISGIGFSRDPALVWVLVGNRSCDIVNLTEASIWCETLPAPQIPDAGAPTVPAAVEVWAGNRFFARGPSPSLVGKGFTFMYEAAATPVVTAMQGEITNSSLSLHVGGSNLSNSVILLGNLNCDVETQSFQGNVSLSGCSIPLHSLEAGIYPLQVRQKQMGFANMSVVLQQFAVMPRIMAIFPSQGSACGGTILTVRGLLLNSRRRSVRVDLSGPFTCVILSLGDHTILCQVSLEGDPLPGASFSLNVTVLVNGLTSECQGNCTLFIREEASPVMDALSTNTSGSLTTVLIRGQRLATTADEPMVFVDDQLPCNVTFFNASHVVCQTRDLAPGPHYLSVFYTRNGYACSGNVSRHFYIMPQVFHYFPKNFSLHGGSLLTIEGTGLRGQNTTSVYIDQQTCLTVNIGAELIRCIVPTGNGSVALEIEVDGLWYHIGVIGYNKAFTPELISISQSDDILTFAVAQISGAANIDIFIGMSPCVGVSGNHTVLQCVVPSLPAGEYHVRGYDCIRGWASSALVFTSRVIITAVTENFGCLGGRLVHVFGAGFSPGNVSAAVCGAPCRVLANATVSAFSCLVLPLDVSLAFLCGLKREEDSCEAARHTYVQCDLTVAMATEQLLESWPYLYICEESSQCLFVPDHWAESMFPSFSGLFISPKLERDEVLIYNSSCNITMETEAEMECETPNQPITVKITEIRKRWGQNTQGNFSLQFCRRWSRTHSWFPERLPQDGDNVTVENGQLLLLDTNTSILNLLHIKGGKLIFMAPGPIELRAHAILVSDGGELRIGSEDKPFQGRAQITLYGSSYSTPFFPYGVKFLAVRNGTLSLHGSLPEVIVTCLRATAHALDTVLALEDAVDWNPGDEVVIISGTGVKGAKPMEEIVTVETVQDTDLYLKSPLRYSHNFTENWVAGEHHILKATVALLSRSITIQGNLTNEREKLLVSCQEANAPEGNLQHCLYSMSEKMLGSRDMGARVIVQSFPEEPSQVQLKGVQFQVLGQAFHKHLSSLTLVGAMRESFIQGCTVRNSFSRGLSMCGTLGLKVDSNVFYNILGHALLVGTCTEMRYISWEAIHGRKDDWSGHGNIIRNNVIIQVSGAEGLSNPEMLTPSGIYICSPTNVIEGNRVCGAGYGYFFHLMTNQTSQAPLLSFTQNIAHSCTRYGLFVYPKFQPPWDNVTGTTLFQSFTVWESAGGAQIFRSSNLRLKNFKVYSCRDFGIDVLESDANTSVTDSLLLGHFAHKGSLCMSSGIKTPKRWELMVSNTTFVNFDLINCVAIRTCSDCSQGQGGFTVKTSQLKFTNSSNLVAFPFPHAAILEDLDGSLSGKNRSHILASMETLSASCLVNSSFGRVVHGSACGGGVLFHRMSIGLANTPEVSYDLTMTDSRNKTTTVNYVRDTLSNPRGWMALLLDQETYSLQSENLWINRSLQYSATFDNFAPGNYLLLVHTDLPPYPDILLRCGSRVGLSFPFLPSPGQNQGCDWFFNSQLRQLTYLVSGEGQVQVILRVKEGMPPTISASTSAPESALKWSLPETWQGVEEGWGGYNNTIPGPGDDVLILPNRTVLVDTDLPFFKGLYVMGTLDFPVDRSNVLSVACMVIAGGELKVGTLENPLEKEQKLLILLRASEGVFCDRMNGIHIDPGTIGVYGKVHLYSAYPKNSWTHLGADIASGNERIIVEDAVDWRPHDKIVLSSSSYEPHEAEVLTVKEVKGHHVRIYERLKHRHIGSVHVTEDGRHIRLAAEVGLLTRNIQIQPDVSCRGRLFVGSFRKSSREEFSGVLQLLNVEIQNFGSPLYSSVEFSNVSAGSWIISSTLHQSCGGGIHAAASHGVLLNDNIVFGTAGHGIDLEGQAYTVTNNLVVLMTQPAWSTIWVAGIKVNQVKDINLHGNVVAGSERLGFHIRGHKCSSCELLWSDNVAHSSLHGLHLYKESGLDNCTRISGFLAFKNFDYGAMLHVENSVEIENITLVDNTIGLLAVVYVFSAPQNSVKKVQIVLRNSVIVATSSSFDCIQDKVKPHSANLTSTDRAPSNPRGGRIGILWPVFTSEPNQWPQEPWHKVRNDHSISGIMKLQDVTFSSFVKSCYSDDLDVCILPNAENSGIMHPITAERTRMLKIKDKNKFYFPSLQPRKDLGKVVCPELDCASPRKYLFKDLDGRALGLPPPVSVFPKTEAEWTASFFNAGTFREEQKCTYQFLMQGFICKQTDQVVLILDSADAIWAIQKLYPVVSVTSGFVDVFSSVNANIPCSTSGSVSTFYSILPIRQITKVCFMDQTPQVLRFFLLGNKSTSKLLLAVFYHELQSPHVFLGESFIPPTLVQSASLLLNESIGANYFNIMDNLLYVVLQGEEPIEIRSGVSIHLALTVMVSVLEKGWEIVILERLTNFLQIGQNQIRFIHEMPGHEETLKAIADSRAKRKRNCPTVTCTSHYRRVGQRRPLMMEMNSHRASPPMTVETISKVIVIEIGDSPTVRSTGMISSLSSNKLQNLAHRVITAQQTGVLENVLNMTIGALLVTQSKGVIGYGNTSSFKTGNLIYIRPYALSILVQPSDGEVGNELPVQPQLVFLDEQNRRVESLGPPSEPWTISASLEGASDSVLKGCTQAETQDGYVSFYNLAVLISGSNWHFIFTVTSPPGVNFTARSKPFAVLPVTRKEKSTIILAASLSSVASWLALSCLVCCWLKRSKSRKTKPEEIPESQTNNQNIHIHISSKRRESQGPKKEDTVVGEDMRMKVMLGKVNQCPHQLMNGVSRRKVSRHIVREEEAAVPAPGTTGITSHGHICAPGAPAQQVYLQETGNWKEGQEQLLRYQLAGQNQLLLLCPDFRQERQQLPGQSRLSKQSGSLGLSQEKKASCGATEAFCLHSVHPETIQEQL

SEQ ID NO: 58394 - protein, 3396 aa, Homo sapiens
MTAWLISLMSIEVLLLAVRHLSLHIEPEEGSLAGGTWITVIFDGLELGVLYPNNGSQLEIHLVNVNMVVPALRSVPCDVFPVFLDLPVVTCRTRSVLSEAHEGLYFLEAYFGGQLVSSPNPGPRDSCTFKFSKAQTPIVHQVYPPSGVPGKLIHVYGWIITGRLETFDFDAEYIDSPVILEAQGDKWVTPCSLINRQMGSCYPIQEDHGLGTLQCHVEGDYIGSQNVSFSVFNKGKSMVHKKAWLISAKQDLFLYQTHSEILSVFPETGSLGGRTNITITGDFFDNSAQVTIAGIPCDIRHVSPRKIECTTRAPGKDVRLTTPQPGNRGLLFEVGDAVEGLELTEATPGYRWQIVPNASSPFGFWSQEGQPFRARLSGFFVAPETNNYTFWIQADSQASLHFSWSEEPRTKVKVASISVGTADWFDSWEQNRDEGTWQQKTPKLELLGGAMYYLEAEHHGIAPSRGMRIGVQIHNTWLNPDVVTTYLREKHQIRVRAQRLPEVQVLNVSGRGNFFLTWDNVSSQPIPANATAHLIQTTIEELLAVKCKLEPLWSNILLRLGFERGPEVSNSDGDLTSGTEPFCGRFSLRQPRHLVLTPPAAQKGYRLDQYTHLCLAYKGHMNKILKMIVSFTIGFQNMVKNTTCDWSLTRTSPESWQFDCTDLWETCVRCFGDLQPPPANSPVLVHQINLLPLAQETGLFYVDEIIIADTNVTVSQADSGTARPGGNLVESVSVVGSPPVYSVTSWLAGCGTELPLITARSVPTEGTEEGSGLVLVTTQRRQRTSPPLGGHFRIQLPNTVISDVPVQISAHHLHQLLQNNADDFTSRYLNASDFTVKEDLYTCYEHVWTLSWSTQIGDLPNFIRVSDENLTGVNPAAATRVVYDGGVFLGPIFGDMLATANQHTQVVVRVNDVPAHCPGSCSFQYLQGSTPCVHSVWYSIDGDINLMIYITGTGFSGDSQFLQVTVNKTSCKVIFSNQTNVVCQTDLLPVGMHRILMLVRPSGLAISATGEDLFLNVKPRLDMVEPSRAADIGGLWATIRGSSLEGVSLILFGSYSCAINVATSNSSRIQCKVPPRGKDGRIVNVTVIRGDYSAVLPRAFTYVSSLNPVIVTLSRNISNIAGGETLVIGVARLMNYTDLDVEVHVQDALAPVHTQSAWGLEVALPPLPAGLHRISVSINGVSIHSQGVDLHIQYLTEVFSIEPCCGSLLGGTILSISGIGFSRDPALVWVLVGNRSCDIVNLTEASIWCETLPAPQIPDAGAPTVPAAVEVWAGNRFFARGPSPSLVGKGFTFMYEAAATPVVTAMQGEITNSSLSLHVGGSNLSNSVILLGNLNCDVETQSFQGNVSLSGCSIPLHSLEAGIYPLQVRQKQMGFANMSVVLQQFAVMPRIMAIFPSQGSACGGTILTVRGLLLNSRRRSVRVDLSGPFTCVILSLGDHTILCQVSLEGDPLPGASFSLNVTVLVNGLTSECQGNCTLFIREEASPVMDALSTNTSGSLTTVLIRGQRLATTADEPMVFVDDQLPCNVTFFNASHVVCQTRDLAPGPHYLSVFYTRNGYACSGNVSRHFYIMPQVFHYFPKNFSLHGGSLLTIEGTGLRGQNTTSVYIDQQTCLTVNIGAELIRCIVPTGNGSVALEIEVDGLWYHIGVIGYNKAFTPELISISQSDDILTFAVAQISGAANIDIFIGMSPCVGVSGNHTVLQCVVPSLPAGEYHVRGYDCIRGWASSALVFTSRVIITAVTENFGCLGGRLVHVFGAGFSPGNVSAAVCGAPCRVLANATVSAFSCLVLPLDVSLAFLCGLKREEDSCEAARHTYVQCDLTVAMATEQLLESWPYLYICEESSQCLFVPDHWAESMFPSFSGLFISPKLERDEVLIYNSSCNITMETEAEMECETPNQPITVKITEIRKRWGQNTQGNFSLQFCRRWSRTHSWFPERLPQDGDNVTVENGQLLLLDTNTSILNLLHIKGGKLIFMAPGPIELRAHAILVSDGGELRIGSEDKPFQGRAQITLYGSSYSTPFFPYGVKFLAVRNGTLSLHGSLPEVIVTCLRATAHALDTVLALEDAVDWNPGDEVVIISGTGVKGAKPMEEIVTVETVQDTDLYLKSPLRYSHNFTENWVAGEHHILKATVALLSRSITIQGNLTNEREKLLVSCQEANAPEGNLQHCLYSMSEKMLGSRDMGARVIVQSFPEEPSQVQLKGVQFQVLGQAFHKHLSSLTLVGAMRESFIQGCTVRNSFSRGLSMCGTLGLKVDSNVFYNILGHALLVGTCTEMRYISWEAIHGRKDDWSGHGNIIRNNVIIQVSGAEGLSNPEMLTPSGIYICSPTNVIEGNRVCGAGYGYFFHLMTNQTSQAPLLSFTQNIAHSCTRYGLFVYPKFQPPWDNVTGTTLFQSFTVWESAGGAQIFRSSNLRLKNFKVYSCRDFGIDVLESDANTSVTDSLLLGHFAHKGSLCMSSGIKTPKRWELMVSNTTFVNFDLINCVAIRTCSDCSQGQGGFTVKTSQLKFTNSSNLVAFPFPHAAILEDLDGSLSGKNRSHILASMETLSASCLVNSSFGRVVHGSACGGGVLFHRMSIGLANTPEVSYDLTMTDSRNKTTTVNYVRDTLSNPRGWMALLLDQETYSLQSENLWINRSLQYSATFDNFAPGNYLLLVHTDLPPYPDILLRCGSRVGLSFPFLPSPGQNQGCDWFFNSQLRQLTYLVSGEGQVQVILRVKEGMPPTISASTSAPESALKWSLPETWQGVEEGWGGYNNTIPGPGDDVLILPNRTVLVDTDLPFFKGLYVMGTLDFPVDRSNVLSVACMVIAGGELKVGTLENPLEKEQKLLILLRASEGVFCDRMNGIHIDPGTIGVYGKVHLYSAYPKNSWTHLGADIASGNERIIVEDAVDWRPHDKIVLSSSSYEPHEAEVLTVKEVKGHHVRIYERLKHRHIGSVHVTEDGRHIRLAAEVGLLTRNIQIQPDVSCRGRLFVGSFRKSSREEFSGVLQLLNVEIQNFGSPLYSSVEFSNVSAGSWIISSTLHQSCGGGIHAAASHGVLLNDNIVFGTAGHGIDLEGQAYTVTNNLVVLMTQPAWSTIWVAGIKVNQVKDINLHGNVVAGSERLGFHIRGHKCSSCELLWSDNVAHSSLHGLHLYKESGLDNCTRISGFLAFKNFDYGAMLHVENSVEIENITLVDNTIGLLAVVYVFSAPQNSVKKVQIVLRNSVIVATSSSFDCIQDKVKPHSANLTSTDRAPSNPRGGRIGILWPVFTSEPNQWPQEPWHKVRNDHSISGIMKLQDVTFSSFVKSCYSDDLDVCILPNAENSGIMHPITAERTRMLKIKDKNKFYFPSLQPRKDLGKVVCPELDCASPRKYLFKDLDGRALGLPPPVSVFPKTEAEWTASFFNAGTKEQSIEINV

SEQ ID NO: 58395 - protein, 4243 aa, Homo sapiens
MGHLWLLGIWGLCGLLLCAADPSTDGSQIIPKVTEIIPKYGSINGATRLTIRGEGFSQANQFNYGVDNAELGNSVQLISSFQSITCDVEKDASHSTQITCYTRAMPEDSYTVRVSVDGVPVTENNTCKGHINSWECTFNAKSFRTPTIRSITPLSGTPGTLITIQGRIFTDVYGSNIALSSNGKNVRILRVYIGGMPCELLIPQSDNLYGLKLDHPNGDMGSMVCKTTGTFIGHHNVSFILDNDYGRSFPQKMAYFVSSLNKIAMFQTYAEVTMIFPSQGSIRGGTTLTISGRFFDQTDFPVRVLVGGEPCDILNVTENSICCKTPPKPHILKTVYPGGRGLKLEVWNNSRPIRLEEILEYNEKTPGYMGASWVDSASYIWLMEQDTFVARFSGFLVAPDSDVYRFYIKGDDRYAIYFSQTGLPEDKVRIAYHSANANSYFSSPTQRSDDIHLQKGKEYYIEILLQEYRLSAFVDVGLYQYRNVYTEQQTGDAVNEEQVIKSQSTILQEVQVITLENWETTNAINEVQKIKVTSPCVEANSCSLYQYRLIYNMEKTVFLPADASEFILQSALNDLWSIKPDTVQVIRTQNPQSYVYMVTFISTRGDFDLLGYEVVEGNNVTLDITEQTKGKPNLETFTLNWDGIASKPLTLWSSEAEFQGAVEEMVSTKCPPQIANFEEGFVVKYFRDYETDFNLEHINRGQKTAETDAYCGRYSLKNPAVLFDSADVKPNRRPYGDILLFPYNQLCLAYKGFLANYIGLKFQYQDNSKITRSTDTQFTYNFAYGNNWTYTCIDLLDLVRTKYTGTNVSLQRISLHKASESQSFYVDVVYIGHTSTISTLDEMPKRRLPALANKGIFLEHFQVNQTKTNGPTMTNQYSVTMTSYNCSYNIPMMAVSFGQIITHETENEFVYRGNNWPGESKIHIQRIQAASPPLSGSFDIQAYGHILKGLPAAVSAADLQFALQSLEGMGRISVTREGTCAGYAWNIKWRSTCGKQNLLQINDSNIIGEKANMTVTRIKEGGLFRQHVLGDLLRTPSQQPQVEVYVNGIPAKCSGDCGFTWDSNITPLVLAISPSQGSYEEGTILTIVGSGFSPSSAVTVSVGPVGCSLLSVDEKELKCQILNGSAGHAPVAVSMADVGLAQNVGGEEFYFVYQSQISHIWPDSGSIAGGTLLTLSGFGFNENSKVLVGNETCNVIEGDLNRITCRTPKKTEGTVDISVTTNGFQATARDAFSYNCLQTPIITDFSPKVRTILGEVNLTIKGYNFGNELTQNMAVYVGGKTCQILHWNFTDIRCLLPKLSPGKHDIYVEVRNWGFASTRDKLNSSIQYVLEVTSMFPQRGSLFGGTEITIRGFGFSTIPAENTVLLGSIPCNVTSSSENVIKCILHSTGNIFRITNNGKDSVHGLGYAWSPPVLNVSVGDTVAWHWQTHPFLRGIGYRIFSVSSPGSVIYDGKGFTSGRQKSTSGSFSYQFTSPGIHYYSSGYVDEAHSIFLQGVINVLPAETRHIPLHLFVGRSEATYAYGGPENLHLGSSVAGCLATEPLCSLNNTRVKNSKRLLFEVSSCFSPSISNITPSTGTVNELITIIGHGFSNLPWANKVTIGSYPCVVEESSEDSITCHIDPQNSMDVGIRETVTLTVYNLGTAINTLSNEFDRRFVLLPNIDLVLPNAGSTTGMTSVTIKGSGFAVSSAGVKVLMGHFPCKVLSVNYTAIECETSPAAQQLVDVDLLIHGVPAQCQGNCTFSYLESITPYITGVFPNSVIGSVKVLIEGEGLGTVLEDIAVFIGNQQFRAIEVNENNITALVTPLPVGHHSVSVVVGSKGLALGNLTVSSPPVASLSPTSGSIGGGTTLVITGNGFYPGNTTVTIGDEPCQIISINPNEVYCRTPAGTTGMVDVKIFVNTIAYPPLLFTYALEDTPFLRGIIPSRGPPGTEIEITGSNFGFEILEISVMINNIQCNVTMANDSVVQCIVGDHAGGTFPVMMHHKTKGSAMSTVVFEYPLNIQNINPSQGSFGGGQTMTVTGTGFNPQNSIILVCGSECAIDRLRSDYTTLLCEIPSNNGTGAEQACEVSVVNGKDLSQSMTPFTYAVSLTPLITAVSPKRGSTAGGTRLTVVGSGFSENMEDVHITIAEAKCDVEYSNKTHIICMTDAHTLSGWAPVCVHIRGVGMAKLDNADFLYVDAWSSNFSWGGKSPPEEGSLVVITKGQTILLDQSTPILKMLLIQGGTLIFDEADIELQAENILITDGGVLQIGTETSPFQHKAVITLHGHLRSPELPVYGAKTLAVREGILDLHGVPVPVTWTRLAHTAKAGERILILQEAVTWKPGDNIVIASTGHRHSQGENEKMTIASVSADGINITLSNPLNYTHLGITVTLPDGTLFEARAEVGILTRNILIRGSDNVEWNNKIPACPDGFDTGEFATQTCLQGKFGEEIGSDQFGGCVMFHAPVPGANMVTGRIEYVEVFHAGQAFRLGRYPIHWHLLGDLQFKSYVRGCAIHQAYNRAVTIHNTHHLLVERNIIYDIKGGAFFIEDGIEHGNILQYNLAVFVQQSTSLLNDDVTPAAFWVTNPNNTIRHNAVAGGTHFGFWYRMNNHPDGPSYDRNICQKRVPLGEFFNNTVHSQGWFGMWIFEEYFPMQTGSCTSTVPAPAIFNSLTTWNCQKGAEWVNGGALQFHNFVMVNNYEAGIETKRILAPYVGGWGETNGAVIKNAKIVGHLDELGMGSAFCTAKGLVLPFSEGLTVSSVHFMNFDRPNCVALGVTSISGVCNDRCGGWSAKFVDVQYSHTPNKAGFRWEHEMVMIDVDGSLTGHKGHTVIPHSSLLDPSHCTQEAEWSIGFPGSVCDASVSFHRLAFNQPSPVSLLEKDVVLSDSFGTSIIPFQKKRLTHMSGWMALIPNANHINWYFKGVDHITNISYTSTFYGFKEEDYVIISHNFTQNPDMFNIIDMRNGSSNPLNWNTSKNGDWHLEANTSTLYYLVSGRNDLHQSQLISGNLDPDVKDVVINFQAYCCILQDCFPVHPPSRKPIPKKRPATYNLWSNDSFWQSSRENNYTVPHPGANVIIPEGTWIVADIDMPSMERLIIWGVLELEDKYNVGAAESSYREVVLNATYISLQGGRLIGGWEDNPFKGDLKIVLRGNHTTQDWALPEGPNQGAKVLGVFGELDLHGIPHSIYKTKLSETAFAGSKVLSLMDAVDWQEGEEIVITTTSYDFHQTETRSIVKILHDHKILILNDSLSYTHFAEKYHVPGTGESYTLAADVGILSRNIKIVGEDYPGWSEDSFGARVLVGSFTENMMTFKGNARISNVEFYHSGQEGFRDSTDPRYAVTFLNLGQIQEHGSSYIRGCAFHHGFSPAIGVFGTDGLDIDDNIIHFTVGEGIRIWGNANRVRGNLIALSVWPGTYQNRKDLSSTLWHAAIEINRGTNTVLQNNVVAGFGRAGYRIDGEPCPGQFNPVEKWFDNEAHGGLYGIYMNQDGLPGCSLIQGFTIWTCWDYGIYFQTTESVHIYNVTLVDNGMAIFPMIYMPAAISHKISSKNVQIKSSLIVGSSPGFNCSDVLTNDDPNIELTAAHRSPRSPSGGRSGICWPTFASAHNMAPRKPHAGIMSYNAISGLLDISGSTFVGFKNVCSGETNVIFITNPLNEDLQHPIHVKNIKLVDTTEQSKIFIHRPDISKVNPSDCVDMVCDAKRKSFLRDIDGSFLGNAGSVIPQAEYEWDGNSQVGIGDYRIPKAMLTFLNGSRIPVTEKAPHKGIIRDSTCKYLPEWQSYQCFGMEYAMMVIESLDPDTETRRLSPVAIMGNGYVDLINGPQDHGWCAGYTCQRRLSLFHSIVALNKSYEVYFTGTSPQNLRLMLLNVDHNKAVLVGIFFSTLQRLDVYVNNLLVCPKTTIWNAQQKHCELNNHLYKDQFLPNLDSTVLGENYFDGTYQMLYLLVKGTIPVEIHTATVIFVSFQLSVATEDDFYTSHNLVKNLALFLKIPSDKIRISKIRGKSLRRKRSMGFIIEIEIGDPPIQFISNGTTGQMQLSELQEIAGSLGQAVILGNISSILGFNISSMSITNPLPSPSDSGWIKVTAQPVERSAFPVHHVAFVSSLLVITQPVAAQPGQPFPQQPSVKATDSDGNCVSVGITALTLRAILKDSNNNQVNGLSGNTTIPFSSCWANYTDLTPLRTGKNYKIEFILDNVVGVESRTFSLLAESVSSSGSSSSSNSKASTVGTYAQIMTVVISCLVGRMWLLEIFMAAVSTLNITLRSY

SEQ ID NO: 58396 - protein, 2253 aa, Homo sapiens
MRPGPALLLLGVGLSLSVGRLPLPPVPRGAQAAVSGAPGGLLRGAPGLGVRGGRALLSLRPSAVRAGGAVLSGRGSLCFPHGGTGRRWYCLDLRVLLSAQRLPWPAAPALALVDLQLSARGGRLSLTWSVRLPRSPGRLAWAFRLRLLGPGAARPASPAARVSPRSAAPGPRPQQGFVARTECPTDGPARVMLQAVNSSSHRAVESSVSCQINACVIQRVRINTDQKGAPVRLSMQAEATINASVQLDCPAARAIAQYWQVFSVPAVGQAPDWTQPLDLPQLEIRNSPLFIHIPNNSLQWGVYVFNFTVSITTGNPKMPEVKDSDAVYVWIVRSSLQAVMLGDANITANFTEQLILDGSTSSDPDADSPLQGLQFFWYCTTDPRNYGGDRIILGSKEVCHPEQANLKWPWASGPVLTLLPETLKGDHVYFFRMVIRKDSRTAFSDKRVHVLQGPKAIAHITCIENCERNFIVSDRFSLFLNCTNCASRDFYKWSILSSSGGEMLFDWMGETVTGRNGAYLSIKAFAFRHFLEAEFSISLYLACWSGVTSVFRHSFIINHGPQIGECKINPAKGIALITKFVVQCSNFRDKHVPLTYKIIVSDLHSVGEISSVKENTLGTILYLGPQSTVPPSFLPVGMLASQYGLKIYAQVYDSLGAFSQVTLHATAQAPTDKNSSKTVLNQLLSFTVGPSSLLSTLIQKKDFLPAGYLLYIVASVLNNMKTELPLRDDRVNLRKHLIDQSFLLPVSTLVEIGQVVMTITKLTQKPSEFTWDAQKRATMRVWQANQALQEYQQKDKRFRSEQIEIVSTGILMSLSNILKMTSPHQVVKDPFYVIESLSDTILANKVPGNKTTSMRTPNFNMYVKKVEKWGINQLFRNEKHCRNCFYPTLNVSSVPGLSANGPISTMFCDFTNDLFPWLNDQENTSVEVSGFRMTGVADNGSVLEITPDVAEVYLVRKNLTFAAFNLTVGPNSEVDGSLKKTTGGFSFQVDSTVLREVLVHIVTEVMVLFTVLVYTGSQITPTALVATFLVPHDIPPFASQSALFDPACTVKKARVVCLPVSLLQLIAQHSHSPHCTVSIVLQAPRFVMKLNDKLVRISIFSVQCLDMYGIQSEWREGYCILGEKTSWYEVHCICKNVVRARRQLGTIGLTGIHLHTHYVMAKVIVIPNPVDLRLNIIKSLHQNPVTLFTVLFIILLYVGLAFWALYRDEMDQHLRGHVIVLPDNDPYDNLCYLVTIFTGSRWGSGTRANVFVQLRGTVSTSDVHCLSHPHFTTLYRGSINTFLLTTKSDLGDIHSIRVWHNNEGRSPSWYLSRIKVENLFSRHIWLFICQKWLSVDTTLDRTFHVTHPDERLTRKDFFFIDVSSNLRKNHMWFSIFASVVAKTFNRLQRLSCCLAMLLSSLLCNIMFFNLNRQEQTESRERKYMRSMMIGIESVLITIPVQLLITFLFTCSQRKPQADLKEVSPQKHPLMSEASEHWEEYLRKWHAYETAKVHPREVAKPASKGKPRLPKASPKATSKPKHRHRKAQIKTPETLGPNTNSNNNIEDDQDVHSEQHPSQKDLQQLKKKPRIVLPWWCVYVAWFLVFATSSISSFFIVFYGLTYGYDKSIEWLFASFCSFCQSVLLVQPSKIILLSGFRTNKPKYCKNLSWSTKYKYTEIRLDGMRMHPEEMQRIHDQIVRIRGTRMYQPLTEDEIRIFKRKKRIKRRALLFLSYILTHFIFLALLLILIVLLRHTDCFYYNQFIRDRFSMDLATVTKLEDIYRWLNSVLLPLLHNDLNPTFLPESSSKILGLPLMRQVRAKSSEKMCLPAEKFVQNSIRREIHCHPKYGIDPEDTKNYSGFWNEVDKQAIDESTNGFTYKPQGTQWLYYSYGLLHTYGSGGYALYFFPEQQRFNSTLRLKELQESNWLDEKTWAVVLELTTFNPDINLFCSISVIFEVSQLGVVNTSISLHSFSLADFDRKASAEIYLYVAILIFFLAYVVDEGCIIMQERASYVRSVYNLLNFALKCIFTVLIVLFLRKHFLATGIIRFYLSNPEDFIPFHAVSQVDHIMRIILGFLLFLTILKTLRYSRFFYDVRLAQRAIQAALPGICHMAFVVSVYFFVYMAFGYLVFGQHEWNYSNLIHSTQTVFSYCVSAFQNTEFSNNRILGVLFLSSFMLVMICVLINLFQAVILSAYEEMKQPVYEEPSDEVEAMTYLCRKLRTMFSFLTSQSKAKDEPEFFIDMLYGQPEKNSHRYLGLKTRNINGKKMVYLVV

SEQ ID NO: 58397 - protein, 4303 aa, Homo sapiens
MPPAAPARLALALGLGLWLGALAGGPGRGCGPCEPPCLCGPAPGAACRVNCSGRGLRTLGPALRIPADATALDVSHNLLRALDVGLLANLSALAELDISNNKISTLEEGIFANLFNLSEINLSGNPFECDCGLAWLPRWAEEQQVRVVQPEAATCAGPGSLAGQPLLGIPLLDSGCGEEYVACLPDNSSGTVAAVSFSAAHEGLLQPEACSAFCFSTGQGLAALSEQGWCLCGAAQPSSASFACLSLCSGPPPPPAPTCRGPTLLQHVFPASPGATLVGPHGPLASGQLAAFHIAAPLPVTATRWDFGDGSAEVDAAGPAASHRYVLPGRYHVTAVLALGAGSALLGTDVQVEAAPAALELVCPSSVQSDESLDLSIQNRGGSGLEAAYSIVALGEEPARAVHPLCPSDTEIFPGNGHCYRLVVEKAAWLQAQEQCQAWAGAALAMVDSPAVQRFLVSRVTRSLDVWIGFSTVQGVEVGPAPQGEAFSLESCQNWLPGEPHPATAEHCVRLGPTGWCNTDLCSAPHSYVCELQPGGPVQDAENLLVGAPSGDLQGPLTPLAQQDGLSAPHEPVEVMVFPGLRLSREAFLTTAEFGTQELRRPAQLRLQVYRLLSTAGTPENGSEPESRSPDNRTQLAPACMPGGRWCPGANICLPLDASCHPQACANGCTSGPGLPGAPYALWREFLFSVPAGPPAQYSVTLHGQDVLMLPGDLVGLQHDAGPGALLHCSPAPGHPGPRAPYLSANASSWLPHLPAQLEGTWACPACALRLLAATEQLTVLLGLRPNPGLRLPGRYEVRAEVGNGVSRHNLSCSFDVVSPVAGLRVIYPAPRDGRLYVPTNGSALVLQVDSGANATATARWPGGSVSARFENVCPALVATFVPGCPWETNDTLFSVVALPWLSEGEHVVDVVVENSASRANLSLRVTAEEPICGLRATPSPEARVLQGVLVRYSPVVEAGSDMVFRWTINDKQSLTFQNVVFNVIYQSAAVFKLSLTASNHVSNVTVNYNVTVERMNRMQGLQVSTVPAVLSPNATLALTAGVLVDSAVEVAFLWTFGDGEQALHQFQPPYNESFPVPDPSVAQVLVEHNVMHTYAAPGEYLLTVLASNAFENLTQQVPVSVRASLPSVAVGVSDGVLVAGRPVTFYPHPLPSPGGVLYTWDFGDGSPVLTQSQPAANHTYASRGTYHVRLEVNNTVSGAAAQADVRVFEELRGLSVDMSLAVEQGAPVVVSAAVQTGDNITWTFDMGDGTVLSGPEATVEHVYLRAQNCTVTVGAASPAGHLARSLHVLVFVLEVLRVEPAACIPTQPDARLTAYVTGNPAHYLFDWTFGDGSSNTTVRGCPTVTHNFTRSGTFPLALVLSSRVNRAHYFTSICVEPEVGNVTLQPERQFVQLGDEAWLVACAWPPFPYRYTWDFGTEEAAPTRARGPEVTFIYRDPGSYLVTVTASNNISAANDSALVEVQEPVLVTSIKVNGSLGLELQQPYLFSAVGRGRPASYLWDLGDGGWLEGPEVTHAYNSTGDFTVRVAGWNEVSRSEAWLNVTVKRRVRGLVVNASRTVVPLNGSVSFSTSLEAGSDVRYSWVLCDRCTPIPGGPTISYTFRSVGTFNIIVTAENEVGSAQDSIFVYVLQLIEGLQVVGGGRYFPTNHTVQLQAVVRDGTNVSYSWTAWRDRGPALAGSGKGFSLTVLEAGTYHVQLRATNMLGSAWADCTMDFVEPVGWLMVAASPNPAAVNTSVTLSAELAGGSGVVYTWSLEEGLSWETSEPFTTHSFPTPGLHLVTMTAGNPLGSANATVEVDVQVPVSGLSIRASEPGGSFVAAGSSVPFWGQLATGTNVSWCWAVPGGSSKRGPHVTMVFPDAGTFSIRLNASNAVSWVSATYNLTAEEPIVGLVLWASSKVVAPGQLVHFQILLAAGSAVTFRLQVGGANPEVLPGPRFSHSFPRVGDHVVSVRGKNHVSWAQAQVRIVVLEAVSGLQVPNCCEPGIATGTERNFTARVQRGSRVAYAWYFSLQKVQGDSLVILSGRDVTYTPVAAGLLEIQVRAFNALGSENRTLVLEVQDAVQYVALQSGPCFTNRSAQFEAATSPSPRRVAYHWDFGDGSPGQDTDEPRAEHSYLRPGDYRVQVNASNLVSFFVAQATVTVQVLACREPEVDVVLPLQVLMRRSQRNYLEAHVDLRDCVTYQTEYRWEVYRTASCQRPGRPARVALPGVDVSRPRLVLPRLALPVGHYCFVFVVSFGDTPLTQSIQANVTVAPERLVPIIEGGSYRVWSDTRDLVLDGSESYDPNLEDGDQTPLSFHWACVASTQREAGGCALNFGPRGSSTVTIPRERLAAGVEYTFSLTVWKAGRKEEATNQTVLIRSGRVPIVSLECVSCKAQAVYEVSRSSYVYLEGRCLNCSSGSKRGRWAARTFSNKTLVLDETTTSTGSAGMRLVLRRGVLRDGEGYTFTLTVLGRSGEEEGCASIRLSPNRPPLGGSCRLFPLGAVHALTTKVHFECTGWHDAEDAGAPLVYALLLRRCRQGHCEEFCVYKGSLSSYGAVLPPGFRPHFEVGLAVVVQDQLGAAVVALNRSLAITLPEPNGSATGLTVWLHGLTASVLPGLLRQADPQHVIEYSLALVTVLNEYERALDVAAEPKHERQHRAQIRKNITETLVSLRVHTVDDIQQIAAALAQCMGPSRELVCRSCLKQTLHKLEAMMLILQAETTAGTVTPTAIGDSILNITGDLIHLASSDVRAPQPSELGAESPSRMVASQAYNLTSALMRILMRSRVLNEEPLTLAGEEIVAQGKRSDPRSLLCYGGAPGPGCHFSIPEAFSGALANLSDVVQLIFLVDSNPFPFGYISNYTVSTKVASMAFQTQAGAQIPIERLASERAITVKVPNNSDWAARGHRSSANSANSVVVQPQASVGAVVTLDSSNPAAGLHLQLNYTLLDGHYLSEEPEPYLAVYLHSEPRPNEHNCSASRRIRPESLQGADHRPYTFFISPGSRDPAGSYHLNLSSHFRWSALQVSVGLYTSLCQYFSEEDMVWRTEGLLPLEETSPRQAVCLTRHLTAFGASLFVPPSHVRFVFPEPTADVNYIVMLTCAVCLVTYMVMAAILHKLDQLDASRGRAIPFCGQRGRFKYEILVKTGWGRGSGTTAHVGIMLYGVDSRSGHRHLDGDRAFHRNSLDIFRIATPHSLGSVWKIRVWHDNKGLSPAWFLQHVIVRDLQTARSAFFLVNDWLSVETEANGGLVEKEVLAASDAALLRFRRLLVAELQRGFFDKHIWLSIWDRPPRSRFTRIQRATCCVLLICLFLGANAVWYGAVGDSAYSTGHVSRLSPLSVDTVAVGLVSSVVVYPVYLAILFLFRMSRSKVAGSPSPTPAGQQVLDIDSCLDSSVLDSSFLTFSGLHAEQAFVGQMKSDLFLDDSKSLVCWPSGEGTLSWPDLLSDPSIVGSNLRQLARGQAGHGLGPEEDGFSLASPYSPAKSFSASDEDLIQQVLAEGVSSPAPTQDTHMETDLLSSLSSTPGEKTETLALQRLGELGPPSPGLNWEQPQAARLSRTGLVEGLRKRLLPAWCASLAHGLSLLLVAVAVAVSGWVGASFPPGVSVAWLLSSSASFLASFLGWEPLKVLLEALYFSLVAKRLHPDEDDTLVESPAVTPVSARVPRVRPPHGFALFLAKEEARKVKRLHGMLRSLLVYMLFLLVTLLASYGDASCHGHAYRLQSAIKQELHSRAFLAITRSEELWPWMAHVLLPYVHGNQSSPELGPPRLRQVRLQEALYPDPPGPRVHTCSAAGGFSTSDYDVGWESPHNGSGTWAYSAPDLLGAWSWGSCAVYDSGGYVQELGLSLEESRDRLRFLQLHNWLDNRSRAVFLELTRYSPAVGLHAAVTLRLEFPAAGRALAALSVRPFALRRLSAGLSLPLLTSVCLLLFAVHFAVAEARTWHREGRWRVLRLGAWARWLLVALTAATALVRLAQLGAADRQWTRFVRGRPRRFTSFDQVAQLSSAARGLAASLLFLLLVKAAQQLRFVRQWSVFGKTLCRALPELLGVTLGLVVLGVAYAQLAILLVSSCVDSLWSVAQALLVLCPGTGLSTLCPAESWHLSPLLCVGLWALRLWGALRLGAVILRWRYHALRGELYRPAWEPQDYEMVELFLRRLRLWMGLSKVKEFRHKVRFEGMEPLPSRSSRGSKVSPDVPPPSAGSDASHPSTSSSQLDGLSVSLGRLGTRCEPEPSRLQAVFEALLTQFDRLNQATEDVYQLEQQLHSLQGRRSSRAPAGSSRGPSPGLRPALPSRLARASRGVDLATGPSRTPLRAKNKVHPSST

SEQ ID NO: 58398 - protein, 3637 aa, Homo sapiens
MPPAAPARLALALGLGLWLGALAGGPGRGCGPCEPPCLCGPAPGAACRVNCSGRGLRTLGPALRIPADATALTAMAKADGDVKKYGSKRGALALTHGHSLLRDVSHNLLRALDVGLLANLSALAELDISNNKISTLEEGIFANLFNLSEINLSGNPFECDCGLAWLPRWAEEQQVRVVQPEAATCAGPGSLAGQPLLGIPLLDSGCGATLVGPHGPLASGQLAAFHIAAPLPVTATRWDFGDGSAEVDAAGPAASHRYVLPGRYHVTAVLALGAGSALLGTDVQVEAAPAALELVCPSSVQSDESLDLSIQNRGGSGLEAAYSIVALGEEPARAVHPLCPSDTEIFPGNGHCYRLVVEKAAWLQAQEQCQAWAGAALAMVDSPAVQRFLVSRVTRSLDVWIGFSTVQGVEVGPAPQGEAFSLESCQNWLPGEPHPATAEHCVRLGPTGWCNTDLCSAPHSYVCELQPGGPVQDAENLLVGAPSGDLQGPLTPLAQQDGLSAPHEPVEAGMGSVELRRPPAHQVMVFPGLRLSREAFLTTAEFGTQELRRPAQLRLQVYRLLSTAGTPENGSEPESRSPDNRTQLAPACMPGGRWCPGANICLPLDASCHPQACANGCTEGEHVVDVVVENSASRANLSLRVTAEEPICGLRATPSPEARVLQGVLVRYSPVVEAGSDMVFRWTINDKQSLTFQNVVFNVIYQSAAVFKLSLTASNHVSNVTVNYNVTVERMNRMQGLQVSTVPAVLSPNATLALTAGVLVDSAVEVAFLWTFGDGEQALHQFQPPYNESFPVPDPSVAQVLVEHNVMHTYAAPGEYLLTVLASNAFENLTQQVPVSVRASLPSVAVGVSDGVLSQPAANHTYASRGTYHVRLEVNNTVSGAAAQADVRVFEELRGLSVDMSLAVEQGAPVVVSAAVQTGDNITWTFDMGDGTVLSGPEATVEHVYLRAQNCTVTVGAASPAGHLARSLHVLVFVLEVLRVEPAACIPTQPDARLTAYVTGNPAHYLFDWTFGDGSSNTTVRGCPTVTHNFTRSGTFPLALVLSSRVNRAHYFTSICVEPEVGNVTLQPERQFVQLGDEAWLVACAWPPFPYRYTWDFGTEEAAPTRARGPEVTFIYRDPGSYLVTVTASNNISAANDSALVEVQEPVLVTSIKVNGSLGLELQQPYLFSAVGRGRPASYLWDLGDGGWLEGPEVTHAYNSTGDFTGPGPGRQRQRLLAHREAGTYHVQLRATNMLGSAWADCTMDFVEPVGWLMVAASPNPAAVNTSVTLSAELAGGSGVVYTWSLEEGLSWETSEPFTTHSFPTPGLHLVTMTAGNPLGSANATVEVDVQVPVSGLSIRASEPGGSFVAAGSSVPFWGQLATGTNVSWCWAVPGGSSKRGPHVTMVFPDAGTFSIRLNASNAVSWVSATYNLTAEEPIVGLVLWASSKVVAPGQLVHFQILLAAGSAVTFRLQDTDEPRAEHSYLRPGDYRVQVNASNLVSFFVAQATVTVQVLACREPEVDVVLPLQVLMRRSQRNYLEAHVDLRDCVTYQTEYRWEVYRTASCQRPGRPARVALPGVDVSRPRLVLPRLALPVGHYCFVFVVSFGDTPLTQSIQANVTVAPERLVPIIEGGSYRVWSDTRDLVLDGSESYDPNLEDGDQTPLSFHWACVASTQREAGGCALNFGPRGSSTVTIPRERLAAGVEYTFSLTVWKAGRKEEATNQTVLIRSGRVPIVSLECVSCKAQAVYEVSRSSYVYLEGRCLNCSSGSKRGRWAARTFSNKTLVLDETTTSTGSAGMRLVLRRGVLRDGEGYTFTLTVLGRSGEEEGCASIRLSPNRPPLGGSCRLFPLGAVHALTTKVHFECTGWHDAEDAGAPLVYALLLRRCRQGHCEEFCVYKGSLSSYGAVLPPGFRPHFEVGLAVVVQDQLGAAVVALNRSLAITLPEPNGSATGLTVWLHGLTASVLPGLLRQADPQHVIEYSLALVTVLNEHRAQIRKNITETLVSLRVHTVDDIQQIAAALAQCMGPSRELVCRSCLKQTLHKLEAMMLILQAETTAGTVTPTAIGDSILNITGDLIHLASSDVRAPQPSELGAESPSRMVASQAYNLTSALMRILMRSRVLNEEPLTLAGEEIVAQGKRSDPRSLLCYGGAPGPGCHFSIPEAFSGALANLSDVVQLIFLVDSNPFPFGYISNYTVSTKVASMAFQTQAGAQIPIERLASERAITVKVPNNSDWAARGHRSSANSANSVVVQPQASVGAVVTLDSSNPAAGLHLQLNYTLLDGHYLSEEPEPYLAVYLHSEPRPNEHNCSASRRIRPESLQGADHRPYTFFISPGSRDPAGSYHLNLSSHFRWSALQVSVGLYTSLCQYFSEEDMVWRTEGLLPLEETSPRQAVCLTRHLTAFGASLFVPPSHVRFVFPEPTADVNYIVMLTCAVCLVTYMVMAAILHKLDQLDASRGRAIPFCGQRGRFKYEILVKTGWGRGSGTTAHVGIMLYGVDSRSGHRHLDGDRAFHRNSLDIFRIATPHSLGSVWKIRVWHDNKGLSPAWFLQHVIVRDLQTARSAFFLVNDWLSVETEANGGLVEKEVLAASDAALLRFRRLLVAELQRGFFDKHIWLSIWDRPPRSRFTRIQRATCCVLLICLFLGANAVWYGAVGDSAYSTGHVSRLSPLSVDTVAVGLVSSVVVYPVYLAILFLFRMSRSKVAGSPSPTPAGQQVLDIDSCLDSSVLDSSFLTFSGLHAEAFVGQMKSDLFLDDSKSLVCWPSGEGTLSWPDLLSDPSIVGSNLRQLARGQAGHGLGPEEDGFSLASPYSPAKSFSASDEDLIQQVLAEGVSSPAPTQDTHMETDLLSSLSSTPGEKTETLALQRLGELGPPSPGLNWEQPQAARLSRTGLVEGLRKRLLPAWCASLAHGLSLLLVAVAVAVSGWVGASFPPGVSVAWLLSSSASFLASFLGWEPLKVLLEALYFSLVAKRLHPDEDDTLVESPAVTPVSARVPRVRPPHGFALFLAKEEARKVKRLHGMLRSLLVYMLFLLVTLLASYGDASCHGHAYRLQSAIKQELHSRAFLAITRSEELWPWMAHVLLPYVHGNQSSPELGPPRLRQVRLQEALYPDPPGPRVHTCSAAGGFSTSDYDVGWESPHNGSGTWAYSAPDLLGAWSWGSCAVYDSGGYVQELGLSLEESRDRLRFLQLHNWLDNRSRAVFLELTRYSPAVGLHAAVTLRLEFPAAGRALAALSVRPFALRRLSAGLSLPLLTSVCLLLFAVHFAVAEARTWHREGRWRVLRLGAWARWLLVALTAATALVRLAQLGAADRQWTRFVRGRPRRFTSFDQVAQLSSAARGLAASLLFLLLVKAAQQLRFVRQWSVFGKTLCRALPELLGVTLGLVVLGVAYAQLAILLVSSCVDSLWSVAQALLVLCPGTGLSTLCPAESWHLSPLLCVGLWALRLWGALRLGAVILRWRYHALRGELYRPAWEPQDYEMVELFLRRLRLWMGLSKVKEFRHKVRFEGMEPLPSRSSRGSKVSPDVPPPSAGSDASHPSTSSSQLDGLSVSLGRLGTRCEPEPSRLQAVFEALLTQFDRLNQATEDVYQLEQQLHSLQGRRSSRAPAGSSRGPSPGLRPALPSRLARASRGVDLATGPSRTPLRAKNKVHPSST

SEQ ID NO: 58399 - protein, 1230 aa, Homo sapiens
MVAASPNPAAVNTSVTLSAELAGGSGVVYTWSLEEGLSWETSEPFTTHSFPTPGLHLVTMTAGNPLGSANATVEVDVQVPVSGLSIRASEPGGSFVAAGSSVPFWGQLATGTNVSWCWAVPGGSSKRGPHVTMVFPDAGTFSIRLNASNAVSWVSATYNLTAEEPIVGLVLWASSKVVAPGQLVHFQILLAAGSAVTFRLQVGGANPEVLPGPRFSHSFPRVGDHVVSVRGKNHVSWAQAQVRIVVLEAVSGLQVPNCCEPGIATGTERNFTARVQRGSRVAYAWYFSLQKVQGDSLVILSGRDVTYTPVAAGLLEIQVRAFNALGSENRTLVLEVQDAVQYVALQSGPCFTNRSAQFEAATSPSPRRVAYHWDFGDGSPGQDTDEPRAEHSYLRPGDYRVQVNASNLVSFFVAQATVTVQVLACREPEVDVVLPLQVLMRRSQRNYLEAHVDLRDCVTYQTEYRWEVYRTASCQRPGRPARVALPGVDVSRPRLVLPRLALPVGHYCFVFVVSFGDTPLTQSIQANVTVAPERLVPIIEGGSYRVWSDTRDLVLDGSESYDPNLEDGDQTPLSFHWACVASTQREAGGCALNFGPRGSSTVTIPRERLAAGVEYTFSLTVWKAGRKEEATNQTVLIRSGRVPIVSLECVSCKAQAVYEVSRSSYVYLEGRCLNCSSGSKRGRWAARTFSNKTLVLDETTTSTGSAGMRLVLRRGVLRDGEGYTFTLTVLGRSGEEEGCASIRLSPNRPPLGGSCRLFPLGAVHALTTKVHFECTGWHDAEDAGAPLVYALLLRRCRQGHCEEFCVYKGSLSSYGAVLPPGFRPHFEVGLAVVVQDQLGAAVVALNRSLAITLPEPNGSATGLTVWLHGLTASVLPGLLRQADPQHVIEYSLALVTVLNEYERALDVAAEPKHERQHRAQIRKNITETLVSLRVHTVDDIQQIAAALAQCMGPSRELVCRSCLKQTLHKLEAMMLILQAETTAGTVTPTAIGDSILNITGDLIHLASSDVRAPQPSELGAESPSRMVASQAYNLTSALMRILMRSRVLNEEPLTLAGEEIVAQGKRSDPRSLLCYGGAPGPGCHFSIPEAFSGALANLSDVVQLIFLVDSNPFPFGYISNYTVSTKAPPTPPTPLWSSPRPPSVLWSPWTAATLRPGCICSSTIRCWTATTCLRNLSPTWQSTYTRSPGPMSTTARLAGGSAQSHSRVLTTGPTPSSFPRGAETQRGVTI

SEQ ID NO: 58400 - protein, 4302 aa, Homo sapiens
MPPAAPARLALALGLGLWLGALAGGPGRGCGPCEPPCLCGPAPGAACRVNCSGRGLRTLGPALRIPADATALDVSHNLLRALDVGLLANLSALAELDISNNKISTLEEGIFANLFNLSEINLSGNPFECDCGLAWLPRWAEEQQVRVVQPEAATCAGPGSLAGQPLLGIPLLDSGCGEEYVACLPDNSSGTVAAVSFSAAHEGLLQPEACSAFCFSTGQGLAALSEQGWCLCGAAQPSSASFACLSLCSGPPPPPAPTCRGPTLLQHVFPASPGATLVGPHGPLASGQLAAFHIAAPLPVTATRWDFGDGSAEVDAAGPAASHRYVLPGRYHVTAVLALGAGSALLGTDVQVEAAPAALELVCPSSVQSDESLDLSIQNRGGSGLEAAYSIVALGEEPARAVHPLCPSDTEIFPGNGHCYRLVVEKAAWLQAQEQCQAWAGAALAMVDSPAVQRFLVSRVTRSLDVWIGFSTVQGVEVGPAPQGEAFSLESCQNWLPGEPHPATAEHCVRLGPTGWCNTDLCSAPHSYVCELQPGGPVQDAENLLVGAPSGDLQGPLTPLAQQDGLSAPHEPVEVMVFPGLRLSREAFLTTAEFGTQELRRPAQLRLQVYRLLSTAGTPENGSEPESRSPDNRTQLAPACMPGGRWCPGANICLPLDASCHPQACANGCTSGPGLPGAPYALWREFLFSVPAGPPAQYSVTLHGQDVLMLPGDLVGLQHDAGPGALLHCSPAPGHPGPRAPYLSANASSWLPHLPAQLEGTWACPACALRLLAATEQLTVLLGLRPNPGLRLPGRYEVRAEVGNGVSRHNLSCSFDVVSPVAGLRVIYPAPRDGRLYVPTNGSALVLQVDSGANATATARWPGGSVSARFENVCPALVATFVPGCPWETNDTLFSVVALPWLSEGEHVVDVVVENSASRANLSLRVTAEEPICGLRATPSPEARVLQGVLVRYSPVVEAGSDMVFRWTINDKQSLTFQNVVFNVIYQSAAVFKLSLTASNHVSNVTVNYNVTVERMNRMQGLQVSTVPAVLSPNATLALTAGVLVDSAVEVAFLWTFGDGEQALHQFQPPYNESFPVPDPSVAQVLVEHNVMHTYAAPGEYLLTVLASNAFENLTQQVPVSVRASLPSVAVGVSDGVLVAGRPVTFYPHPLPSPGGVLYTWDFGDGSPVLTQSQPAANHTYASRGTYHVRLEVNNTVSGAAAQADVRVFEELRGLSVDMSLAVEQGAPVVVSAAVQTGDNITWTFDMGDGTVLSGPEATVEHVYLRAQNCTVTVGAASPAGHLARSLHVLVFVLEVLRVEPAACIPTQPDARLTAYVTGNPAHYLFDWTFGDGSSNTTVRGCPTVTHNFTRSGTFPLALVLSSRVNRAHYFTSICVEPEVGNVTLQPERQFVQLGDEAWLVACAWPPFPYRYTWDFGTEEAAPTRARGPEVTFIYRDPGSYLVTVTASNNISAANDSALVEVQEPVLVTSIKVNGSLGLELQQPYLFSAVGRGRPASYLWDLGDGGWLEGPEVTHAYNSTGDFTVRVAGWNEVSRSEAWLNVTVKRRVRGLVVNASRTVVPLNGSVSFSTSLEAGSDVRYSWVLCDRCTPIPGGPTISYTFRSVGTFNIIVTAENEVGSAQDSIFVYVLQLIEGLQVVGGGRYFPTNHTVQLQAVVRDGTNVSYSWTAWRDRGPALAGSGKGFSLTVLEAGTYHVQLRATNMLGSAWADCTMDFVEPVGWLMVAASPNPAAVNTSVTLSAELAGGSGVVYTWSLEEGLSWETSEPFTTHSFPTPGLHLVTMTAGNPLGSANATVEVDVQVPVSGLSIRASEPGGSFVAAGSSVPFWGQLATGTNVSWCWAVPGGSSKRGPHVTMVFPDAGTFSIRLNASNAVSWVSATYNLTAEEPIVGLVLWASSKVVAPGQLVHFQILLAAGSAVTFRLQVGGANPEVLPGPRFSHSFPRVGDHVVSVRGKNHVSWAQAQVRIVVLEAVSGLQVPNCCEPGIATGTERNFTARVQRGSRVAYAWYFSLQKVQGDSLVILSGRDVTYTPVAAGLLEIQVRAFNALGSENRTLVLEVQDAVQYVALQSGPCFTNRSAQFEAATSPSPRRVAYHWDFGDGSPGQDTDEPRAEHSYLRPGDYRVQVNASNLVSFFVAQATVTVQVLACREPEVDVVLPLQVLMRRSQRNYLEAHVDLRDCVTYQTEYRWEVYRTASCQRPGRPARVALPGVDVSRPRLVLPRLALPVGHYCFVFVVSFGDTPLTQSIQANVTVAPERLVPIIEGGSYRVWSDTRDLVLDGSESYDPNLEDGDQTPLSFHWACVASTQREAGGCALNFGPRGSSTVTIPRERLAAGVEYTFSLTVWKAGRKEEATNQTVLIRSGRVPIVSLECVSCKAQAVYEVSRSSYVYLEGRCLNCSSGSKRGRWAARTFSNKTLVLDETTTSTGSAGMRLVLRRGVLRDGEGYTFTLTVLGRSGEEEGCASIRLSPNRPPLGGSCRLFPLGAVHALTTKVHFECTGWHDAEDAGAPLVYALLLRRCRQGHCEEFCVYKGSLSSYGAVLPPGFRPHFEVGLAVVVQDQLGAAVVALNRSLAITLPEPNGSATGLTVWLHGLTASVLPGLLRQADPQHVIEYSLALVTVLNEYERALDVAAEPKHERQHRAQIRKNITETLVSLRVHTVDDIQQIAAALAQCMGPSRELVCRSCLKQTLHKLEAMMLILQAETTAGTVTPTAIGDSILNITGDLIHLASSDVRAPQPSELGAESPSRMVASQAYNLTSALMRILMRSRVLNEEPLTLAGEEIVAQGKRSDPRSLLCYGGAPGPGCHFSIPEAFSGALANLSDVVQLIFLVDSNPFPFGYISNYTVSTKVASMAFQTQAGAQIPIERLASERAITVKVPNNSDWAARGHRSSANSANSVVVQPQASVGAVVTLDSSNPAAGLHLQLNYTLLDGHYLSEEPEPYLAVYLHSEPRPNEHNCSASRRIRPESLQGADHRPYTFFISPGSRDPAGSYHLNLSSHFRWSALQVSVGLYTSLCQYFSEEDMVWRTEGLLPLEETSPRQAVCLTRHLTAFGASLFVPPSHVRFVFPEPTADVNYIVMLTCAVCLVTYMVMAAILHKLDQLDASRGRAIPFCGQRGRFKYEILVKTGWGRGSGTTAHVGIMLYGVDSRSGHRHLDGDRAFHRNSLDIFRIATPHSLGSVWKIRVWHDNKGLSPAWFLQHVIVRDLQTARSAFFLVNDWLSVETEANGGLVEKEVLAASDAALLRFRRLLVAELQRGFFDKHIWLSIWDRPPRSRFTRIQRATCCVLLICLFLGANAVWYGAVGDSAYSTGHVSRLSPLSVDTVAVGLVSSVVVYPVYLAILFLFRMSRSKVAGSPSPTPAGQQVLDIDSCLDSSVLDSSFLTFSGLHAEAFVGQMKSDLFLDDSKSLVCWPSGEGTLSWPDLLSDPSIVGSNLRQLARGQAGHGLGPEEDGFSLASPYSPAKSFSASDEDLIQQVLAEGVSSPAPTQDTHMETDLLSSLSSTPGEKTETLALQRLGELGPPSPGLNWEQPQAARLSRTGLVEGLRKRLLPAWCASLAHGLSLLLVAVAVAVSGWVGASFPPGVSVAWLLSSSASFLASFLGWEPLKVLLEALYFSLVAKRLHPDEDDTLVESPAVTPVSARVPRVRPPHGFALFLAKEEARKVKRLHGMLRSLLVYMLFLLVTLLASYGDASCHGHAYRLQSAIKQELHSRAFLAITRSEELWPWMAHVLLPYVHGNQSSPELGPPRLRQVRLQEALYPDPPGPRVHTCSAAGGFSTSDYDVGWESPHNGSGTWAYSAPDLLGAWSWGSCAVYDSGGYVQELGLSLEESRDRLRFLQLHNWLDNRSRAVFLELTRYSPAVGLHAAVTLRLEFPAAGRALAALSVRPFALRRLSAGLSLPLLTSVCLLLFAVHFAVAEARTWHREGRWRVLRLGAWARWLLVALTAATALVRLAQLGAADRQWTRFVRGRPRRFTSFDQVAQLSSAARGLAASLLFLLLVKAAQQLRFVRQWSVFGKTLCRALPELLGVTLGLVVLGVAYAQLAILLVSSCVDSLWSVAQALLVLCPGTGLSTLCPAESWHLSPLLCVGLWALRLWGALRLGAVILRWRYHALRGELYRPAWEPQDYEMVELFLRRLRLWMGLSKVKEFRHKVRFEGMEPLPSRSSRGSKVSPDVPPPSAGSDASHPSTSSSQLDGLSVSLGRLGTRCEPEPSRLQAVFEALLTQFDRLNQATEDVYQLEQQLHSLQGRRSSRAPAGSSRGPSPGLRPALPSRLARASRGVDLATGPSRTPLRAKNKVHPSST

SEQ ID NO: 58401 - protein, 2849 aa, Homo sapiens
MAEEAAQNISDDQERCLQAACCLSFGGELSVSTDKSWGLHLCSCSPPGGGLWVEVYANHVLLMSDGKCGCPWCALNGKAEDRESQSPSSSASRQKNIWKTTSEAALSVVNEKTQAVVNEKTQAPLDCDNSADRIPHKPFIIIARAWSSGGPRFHHRRLCATGTADSTFSALLQLQGTTSAAAPCSLKMEASCCVLRLLCCAEDVATGLLPGTVTMETPTKVARPTQTSSQRVPLWPISHFPTSPRSSHGLPPGIPRTPSFTASQSGSEILYPPTQHPPVAILARNSDNFMNPVLNCSLEVEARAPPNLGFRVHMASGEALCLMMDFGDSSGVEMRLHNMSEAMAVTAYHQYSKGIFFHLLHFQLDMSTYKEAETQNTTLNVYLCQSENSCLEDSDPSNLGYELISAFVTKGVYMLKAVIYNEFHGTEVELGPYYVEIGHEAVSAFMNSSSVHEDEVLVFADSQVNQKSTVVIHHFPSIPSYNVSFISQTQVGDSQAWHSMTVWYKMQSVSVYTNGTVFATDTDITFTAVTKETIPLEFEWYFGEDPPVRTTSRSIKKRLSIPQWYRVMVKASNRMSSVVSEPHVIRVQKKIVANRLTSPSSALVNASVAFECWINFGTDVAYLWDFGDGTVSLGSSSSSHVYSREGEFTVEVLAFNNVSASTLRQQLFIVCEPCQPPLVKNMGPGKVQIWRSQPVRLGVTFEAAVFCDISQGLSYTWNLMDSEGLPVSLPAAVDTHRQTLILPSHTLEYGNYTALAKVQIEGSVVYSNYCVGLEVRAQAPVSVISEGTHLFFSRTTSSPIVLRGTQSFDPDDPGATLRYHWECATAGSPAHPCFDSSTAHQLDAAAPTVSFEAQWLSDSYDQFLVMLRVSSGGRNSSETRVFLSPYPDSAFRFVHISWVSFKDTFVNWNDELSLQAMCEDCSEIPNLSYSWDLFLVNATEKNRIEVPFCRVVGLLGSLGLGAISESSQLNLLPTEPGTADPDATTTPFSREPSPVTLGQPATSAPRGTPTEPMTGVYWIPPAGDSAVLGEAPEEGSLDLEPGPQSKGSLMTGRSERSQPTHSPDPHLSDFEAYYSDIQEAIPSGGRQPAKDTSFPGSGPSLSAEESPGDGDNLVDPSLSAGRAEPVLMIDWPKALLGRAVFQGYSSSGITEQTVTIKPYSLSSGETYVLQVSVASKHGLLGKAQLYLTVNPAPRDMACQVQPHHGLEAHTVFSVFCMSGKPDFHYEFSYQIGNTSKHTLYHGRDTQYYFVLPAGEHLDNYKVMVSTEITDGKGSKVQPCTVVVTVLPRYHGNDCLGEDLYNSSLKNLSTLQLMGSYTEIRNYITVITRILSRLSKEDKTASCNQWSRIQDALISSVCRLAFVDQEEMIGSVLMLRDLVSFSNKLGFMSAVLILKYTRALLAQGQFSGPFVIDKGVRLELIGLISRVWEVSEQENSKEEVYRHEEGITVISDLLLGCLSLNHVSTGQMEFRTLLHYNLQSSVQSLGSVQVHLPGDLAGHSPAGAETQSPCYISQLILFKKNPYPGSQAPGQIGGVVGLNLYTCSSRRPINRQWLRKPVMVEFGEEDGLDNRRNKTTFVLLRDKVNLHQFTELSENPQESLQIEIEFSKPVTRAFPVMLLVRFSEKPTPSDFLVKQIYFWDESIVQIYIPAASQKDASVGYLSLLDADYDRKPPNRYLAKAVNYTVHFQWIRCLFWDKREWKSERFSPQPGTSPEKVNCSYHRLAAFALLRRKLKASFEVSDISKLQSHPENLLPSIFIMGSVILYGFLVAKSRQVDHHEKKKAGYIFLQEASLPGHQLYAVVIDTGFRAPARLTSKVYIVLCGDNGLSETKELSCPEKPLFERNSRHTFILSAPAQLGLLRKIRLWHDSRGPSPGWFISHVMVKELHTGQGWFFPAQCWLSAGRHDGRVERELTCLQGGLGFRKLFYCKFTEYLEDFHVWLSVYSRPSSSRYLHTPRLTVSFSLLCVYACLTALVAAGGQEQPHLDVSPTLGSFRVGLLCTLLASPGAQLLSLLFRLSKEAPGSARVEPHSPLRGGAQTEAPHGPNSWGRIPDAQEPRKQPASAILSGSGRAQRKAASDNGTACPAPKLQVHGADHSRTSLMGKSHCCPPHTQAPSSGLEGLMPQWSRALQPWWSSAVWAICGTASLACSLGTGFLAYRFGQEQCVQWLHLLSLSVVCCIFITQPLMVCLMALGFAWKRRADNHFFTESLCEATRDLDSELAERSWTRLPFSSSCSIPDCAGEVEKVLAARQQARHLRWAHPPSKAQLRGTRQRMRRESRTRAALRDISMDILMLLLLLCVIYGRFSQDEYSLNQAIRKEFTRNARNCLGGLRNIADWWDWSLTTLLDGLYPGGTPSARVPGAQPGALGGKCYLIGSSVIRQLKVFPRHLCKPPRPFSALIEDSIPTCSPEVGGPENPYLIDPENQNVTLNGPGGCGTREDCVLSLGRTRTEAHTALSRLRASMWIDRSTRAVSVHFTLYNPPTQLFTSVSLRVEILPTGSLVPSSLVESFSIFRSDSALQYHLMLPQLVFLALSLIHLCVQLYRMMDKGVLSYWRKPRNWLELSVVGVSLTYYAVSGHLVTLAGDVTNQFHRGLCRAFMDLTLMASWNQRARWLRGILLFLFTLKCVYLPGIQNTMASCSSMMRHSLPSIFVAGLVGALMLAALSHLHRFLLSMWVLPPGTFTDAFPGLLFHFPRRSQKDCLLGLSKSDQRAMACYFGILLIVSATLCFGMLRGFLMTLPQKRKSFQSKSFVRLKDVTAYMWEKVLTFLRLETPKLEEAEMVENHNYYLDEFANLLDELLMKINGLSDSLQLPLLEKTSNNTGEARTEESPLVDISSYQAAEPADIKDF

SEQ ID NO: 58402 - protein, 164 aa, Homo sapiens
  VARIANT 1: note = MOD_RES - Any amino acid
XVGGPENPYLIDPENQNVTLNGPGGCGTREDCVLSLGRTRTEAHTALSRLRASMWIDRSTRAVSVHFTLYNPPTQLFTSVSLRVEILPTGSLVPSSLVESFSIFRSDSALQYHLMLPQLVFLALSLIHLCVQLYRMMDKGVLSYWRKPRNWLEVASLVSFSFEK

SEQ ID NO: 58403 - protein, 968 aa, Homo sapiens
MVNSSRVQPQQPGDAKRPPAPRAPDPGRLMAGCAAVGASLAAPGGLCEQRGLEIEMQRIRQAAARDPPAGAAASPSPPLSSCSRQAWSRDNPGFEAEEEEEEVEGEEGGMVVEMDVEWRPGSRRSAASSAVSSVGARSRGLGGYHGAGHPSGRRRRREDQGPPCPSPVGGGDPLHRHLPLEGQPPRVAWAERLVRGLRGLWGTRLMEESSTNREKYLKSVLRELVTYLLFLIVLCILTYGMMSSNVYYYTRMMSQLFLDTPVSKTEKTNFKTLSSMEDFWKFTEGSLLDGLYWKMQPSNQTEADNRSFIFYENLLLGVPRIRQLRVRNGSCSIPQDLRDEIKECYDVYSVSSEDRAPFGPRNGTAWIYTSEKDLNGSSHWGIIATYSGAGYYLDLSRTREETAAQVASLKKNVWLDRGTRATFIDFSVYNANINLFCVVRLLVEFPATGGVIPSWQFQPLKLIRYVTTFDFFLAACEIIFCFFIFYYVVEEILEIRIHKLHYFRSFWNCLDVVIVVLSVVAIGINIYRTSNVEVLLQFLEDQNTFPNFEHLAYWQIQFNNIAAVTVFFVWIKLFKFINFNRTMSQLSTTMSRCAKDLFGFAIMFFIIFLAYAQLAYLVFGTQVDDFSTFQECIFTQFRIILGDINFAEIEEANRVLGPIYFTTFVFFMFFILLNMFLAIINDTYSEVKSDLAQQKAEMELSDLIRKGYHKALVKLKLKKNTVDDISESLRQGGGKLNFDELRQDLKGKGHTDAEIEAIFTKYDQDGDQELTEHEHQQMRDDLEKEREDLDLDHSSLPRPMSSRSFPRSLDDSEEDDDEDSGHSSRRRGSISSGVSYEEFQVLVRRVDRMEHSIGSIVSKIDAVIVKLEIMERAKLKRREVLGRLLDGVAEDERLGRDSEIHREQMERLVREELERWESDDAASQISHGLGTPVGLNGQPRPRSSRPSSSQSTEGMEGAGGNGSSNVHV

SEQ ID NO: 58404 - protein, 386 aa, Homo sapiens
MSQLSTTMSRCAKDLFGFAIMFFIIFLAYAQLAYLVFGTQVDDFSTFQECIFTQFRIILGDINFAEIEEANRVLGPIYFTTFVFFMFFILLNMFLAIINDTYSEVKSDLAQQKAEMELSDLIRKGYHKALVKLKLKKNTVDDISESLRQGGGKLNFDELRQDLKGKGHTDAEIEAIFTKYDQDGDQELTEHEHQQMRDDLEKEREDLDLDHSSLPRPMSSRSFPRSLDDSEEDDDEDSGHSSRRRGSISSGVSYEEFQVLVRRVDRMEHSIGSIVSKIDAVIVKLEIMERAKLKRREVLGRLLDGVAEDERLGRDSEIHREQMERLVREELERWESDDAASQISHGLGTPVGLNGQPRPRSSRPSSSQSTEGMEGAGGNGSSNVHV

SEQ ID NO: 58405 - protein, 386 aa, Homo sapiens; identical to SEQ ID NO: 58404

SEQ ID NO: 58406 - protein, 805 aa, Homo sapiens
MNAVGSPEGQELQKLGSGAWDNPAYSGPPSPHGTLRVCTISSTGPLQPQPKKPEDEPQETAYRTQVSSCCLHICQGIRGLWGTTLTENTAENRELYIKTTLRELLVYIVFLVDICLLTYGMTSSSAYYYTKVMSELFLHTPSDTGVSFQAISSMADFWDFAQGPLLDSLYWTKWYNNQSLGHGSHSFIYYENMLLGVPRLRQLKVRNDSCVVHEDFREDILSCYDVYSPDKEEQLPFGPFNGTAWTYHSQDELGGFSHWGRLTSYSGGGYYLDLPGSRQGSAEALRALQEGLWLDRGTRVVFIDFSVYNANINLFCVLRLVVEFPATGGAIPSWQIRTVKLIRYVSNWDFFIVGCEVIFCVFIFYYVVEEILELHIHRLRYLSSIWNILDLVVILLSIVAVGFHIFRTLEVNRLMGKLLQQPNTYADFEFLAFWQTQYNNMNAVNLFFAWIKIFKYISFNKTMTQLSSTLARCAKDILGFAVMFFIVFFAYAQLGYLLFGTQVENFSTFIKCIFTQFRIILGDFDYNAIDNANRILGPAYFVTYVFFVFFVLLNMFLAIINDTYSEVKEELAGQKDELQLSDLLKQGYNKTLLRLRLRKERVSDVQKVLQGGEQEIQFEDFTNTLRELGHAEHEITELTATFTKFDRDGNRILDEKEQEKMRQDLEEERVALNTEIEKLGRSIVSSPQGKSGPEAARAGGWVSGEEFYMLTRRVLQLETVLEGVVSQIDAVGSKLKMLERKGWLAPSPGVKEQAIWKHPQPAPAVTPDPWGVQGGQESEVPYKREEEALEERRLSRGEIPTLQRS

SEQ ID NO: 58407 - protein, 730 aa, Homo sapiens
MNAVGSPEGQELQKLGSGAWDNPAYSGPPSPHGTLRVCTISSTGPLQPQPKKPEDEPQETAYRTQVSSCCLHICQGIRGLWGTTLTENTAENRELYIKTTLRELLVYIVFLVDICLLTYGMTSSSAYYYTKVMSELFLHTPSDTGVSFQAISSMADFWDFAQGPLLDSLYWTKWYNNQSLGHGSHSFIYYENMLLGVPRLRQLKVRNDSCVVHEDFREDILSCYDVYSPDKEEQLPFGPFNGTALVVEFPATGGAIPSWQIRTVKLIRYVSNWDFFIVGCEVIFCVFIFYYVVEEILELHIHRLRYLSSIWNILDLVVILLSIVAVGFHIFRTLEVNRLMGKLLQQPNTYADFEFLAFWQTQYNNMNAVNLFFAWIKIFKYISFNKTMTQLSSTLARCAKDILGFAVMFFIVFFAYAQLGYLLFGTQVENFSTFIKCIFTQFRIILGDFDYNAIDNANRILGPAYFVTYVFFVFFVLLNMFLAIINDTYSEVKEELAGQKDELQLSDLLKQGYNKTLLRLRLRKERVSDVQKVLQGGEQEIQFEDFTNTLRELGHAEHEITELTATFTKFDRDGNRILDEKEQEKMRQDLEEERVALNTEIEKLGRSIVSSPQGKSGPEAARAGGWVSGEEFYMLTRRVLQLETVLEGVVSQIDAVGSKLKMLERKGWLAPSPGVKEQAIWKHPQPAPAVTPDPWGVQGGQESEVPYKREEEALEERRLSRGEIPTLQRS

SEQ ID NO: 58408 - protein, 775 aa, Homo sapiens
MNAVGSPEGQELQKLGSGAWDNPAYSGPPSPHGTLRVCTISSTGPLQPQPKKPEDEPQETAYRTQVSSCCLHICQGIRGLWGTTLTENTAENRELYIKTTLRELLVYIVFLVDICLLTYGMTSSSAYYYTKVMSELFLHTPSDTGVSFQAISSMADFWDFAQGPLLDSLYWTKWYNNQSLGHGSHSFIYYENMLLGVPRLRQLKVRNDSCVVHEDFREDILSCYDVYSPDKEEQLPFGPFNGTAWTYHSQDELGGFSHWGRLTSYSGGGYYLDLPGSRQGSAEALRALQEGLWLDRGTRVVFIDFSVYNANINLFCVLRLVVEFPARRCHPILANPHSQADPLCQQLFFIVGCEVIFCVFIFYYVVEEILELHIHRLRYLSSIWNILDLVVILLSIVAVGFHIFRTLEVNRLMGKLLQQPNTYADFEFLAFWQTQYNNMNAVNLFFAWIKIFKYISFNKTMTQLSSTLARCAKDILGFAVMFFIVFFAYAQLGYLLFGTQVENFSTFIKCIFTQFRIILGDFDYNAIDNANRILGPAYFVTYVFFVFFVLLNMFLAIINDTYSEVKEELAGQKDELQLSDLLKQGYNKTLLRLRLRKERVSDVQKVLQGGEQEIQFEDFTNTLRELGHAEHEITELTATFTKFDRDGNRILDEKEQEKMRQDLEEERVALNTEIEKLGRSIVSSPQGKSGPEAARAGGWVSGEEFYMLTRRVLQLETVLEGVVSQIDAVGSKLKMLERKGWLAPSPGVKEQAIWKHPQPAPAVTPDPWGPGWAGE

SEQ ID NO: 58409 - protein, 760 aa, Homo sapiens
MNAVGSPEGQELQKLGSGAWDNPAYSGPPSPHGTLRVCTISSTGPLQPQPKKPEDEPQETAYRTQVSSCCLHICQGIRGLWGTTLTENTAENRELYIKTTLRELLVYIVFLVDICLLTYGMTSSSAYYYTKVMSELFLHTPSDTGVSFQAISSMADFWDFAQGPLLDSLYWTKWYNNQSLGHGSHSFIYYENMLLGVPRLRQLKVRNDSCVVHEDFREDILSCYDVYSPDKEEQLPFGPFNGTAWTYHSQDELGGFSHWGRLTSYSGGGYYLDLPGSRQGSAEALRALQEGLWLDRGTRVVFIDFSVYNANINLFCVLRLVVEFPATGGAIPSWQIRTVKLIRYVSNWDFFIVGCEVIFCVFIFYYVVEEILELHIHRLRYLSSIWNILDLVVILLSIVAVGFHIFRTLEVNRLMGKLLQQPNTYADFEFLAFWQTQYNNMNAVNLFFAWIKIFKYISFNKTMTQLSSTLARCAKDILGFAVMFFIVFFAYAQLGYLLFGTQVENFSTFIKCIFTQFRIILGDFDYNAIDNANRILGPAYFVTYVFFVFFVLLNMFLAIINDTYSEVKEELAGQKDELQLSDLLKQGYNKTLLRLRLRKERVSDVQKVLQGGEQEIQFEDFTNTLRELGHAEHEITELTATFTKFDRDGNRILDEKEQEKMRQDLEEERVALNTEIEKLGRSIVSSPQGKSGPEAARAGGWVSGEEFYMLTRRVLQLETVLEGVVSQIDAVGSKLKMLERKGWLAPSPGVRFPIKEKRKP

SEQ ID NO: 58410 - protein, 613 aa, Homo sapiens
MAEASRWHRGGASKHKLHYRKEVEITTTLQELLLYFIFLINLCILTFGMVNPHMYYLNKVMSSLFLDTSVPGEERTNFKSIRSITDFWKFMEGPLLEGLYWDSWYNNQQLYNLKNSSRIYYENILLGVPRVRQLKVRNNTCKVYSSFQSLMSECYGKYTSANEDLSNFGLQINTEWRYSTSNTNSPWHWGFLGVYRNGGYIFTLSKSKSETKNKFIDLRLNSWITRGTRVIFIDFSLYNANVNLFCIIRLVAEFPATGGILTSWQFYSVKLLRYVSYYDYFIASCEITFCIFLFVFTTQEVKKIKEFKSAYFKSIWNWLELLLLLLCFVAVSFNTYYNVQIFLLLGQLLKSTEKYSDFYFLACWHIYYNNIIAITIFFAWIKIFKFISFNKTMSQLSSTLSRCVKDIVGFAIMFFIIFFAYAQLGFLVFGSQVDDFSTFQNSIFAQFRIVLGDFNFAGIQQANPILGPIYFITFIFFVFFVLLNMFLAIINDTYSEVKADYSIGRRLDFELGKMIKQSYKNVLEKFRLKKAQKDEDKKTKGSGDLAEQARREGFDENEIQNAEQMKKWKERLEKKYYSMEIQDDYQPVTQEEFRDGTTTKYKMRFSECLTKRI

SEQ ID NO: 58411 - protein, 590 aa, Homo sapiens
MAEASRWHRGVTFGMVNPHMYYLNKVMSSLFLDTSVPGEERTNFKSIRSITDFWKFMEGPLLEGLYWDSWYNNQQLYNLKNSSRIYYENILLGVPRVRQLKVRNNTCKVYSSFQSLMSECYGKYTSANEDLSNFGLQINTEWRYSTSNTNSPWHWGFLGVYRNGGYIFTLSKSKSETKNKFIDLRLNSWITRGTRVIFIDFSLYNANVNLFCIIRLVAEFPATGGILTSWQFYSVKLLRYVSYYDYFIASCEITFCIFLFVFTTQEVKKIKEFKSAYFKSIWNWLELLLLLLCFVAVSFNTYYNVQIFLLLGQLLKSTEKYSDFYFLACWHIYYNNIIAITIFFAWIKIFKFISFNKTMSQLSSTLSRCVKDIVGFAIMFFIIFFAYAQLGFLVFGSQVDDFSTFQNSIFAQFRIVLGDFNFAGIQQANPILGPIYFITFIFFVFFVLLNMFLAIINDTYSEVKADYSIGRRLDFELGKMIKQSYKNVLEKFRLKKAQKDEDKKTKGSGDLAEQARREGFDENEIQNAEQMKKWKERLEKKYYSMEIQDDYQPVTQEEFRELFLYAVELEKELHYINLKLNQVVRKVSAL

SEQ ID NO: 58412 - protein, 624 aa, Homo sapiens
MAEASRWHRGGASKHKLHYRKEVEITTTLQELLLYFIFLINLCILTFGMVNPHMYYLNKVMSSLFLDTSVPGEERTNFKSIRSITDFWKFMEGPLLEGLYWDSWYNNQQLYNLKNSSRIYYENILLGVPRVRQLKVRNNTCKVYSSFQSLMSECYGKYTSANEDLSNFGLQINTEWRYSTSNTNSPWHWGFLGVYRNGGYIFTLSKSKSETKNKFIDLRLNSWITRGTRVIFIDFSLYNANVNLFCIIRLVAEFPATGGILTSWQFYSVKLLRYVSYYDYFIASCEITFCIFLFVFTTQEVKKIKEFKSAYFKSIWNWLELLLLLLCFVAVSFNTYYNVQIFLLLGQLLKSTEKYSDFYFLACWHIYYNNIIAITIFFAWIKIFKFISFNKTMSQLSSTLSRCVKDIVGFAIMFFIIFFAYAQLGFLVFGSQVDDFSTFQNSIFAQFRIVLGDFNFAGIQQANPILGPIYFITFIFFVFFVLLNMFLAIINDTYSEVKADYSIGRRLDFELGKMIKQSYKNVLEKFRLKKAQKDEDKKTKGSGDLAEQARREGFDENEIQNAEQMKKWKERLEKKYYSMEIQDDYQPVTQEEFRELFLYAVELEKELHYINLKLNQVVRKVSAL

SEQ ID NO: 58413 - protein, 602 aa, Homo sapiens
MAEASRWHRGGASKHKLHYRKEVEITTTLQELLLYFIFLINLCILTFGMVNPHMYYLNKVMSSLFLDTSVPGEERTNFKSIRSITDFWKFMEGPLLEGLYWDSWYNNQQLYNLKNSSRIYYENILLGVPRVRQLKVRNNTCKVYSSFQSLMSECYGKYTSANEDLSNFGLQINTEWRYSTSNTNSPWHWGFLGVYRNGGYIFTLSKSKSETKNKFIDLRLNSWITRGTRVIFIDFSLYNANVNLFCIIRLVAEFPATGGILTSWQFYSVKLLRYVSYYDYFIASCEITFCIFLFVFTTQEVKKIKEFKSAYFKSIWNWLELLLLLLLKSTEKYSDFYFLACWHIYYNNIIAITIFFAWIKIFKFISFNKTMSQLSSTLSRCVKDIVGFAIMFFIIFFAYAQLGFLVFGSQVDDFSTFQNSIFAQFRIVLGDFNFAGIQQANPILGPIYFITFIFFVFFVLLNMFLAIINDTYSEVKADYSIGRRLDFELGKMIKQSYKNVLEKFRLKKAQKDEDKKTKGSGDLAEQARREGFDENEIQNAEQMKKWKERLEKKYYSMEIQDDYQPVTQEEFRELFLYAVELEKELHYINLKLNQVVRKVSAL

SEQ ID NO: 58414 - protein, 523 aa, Homo sapiens
MAEASRWHRGGASKHKLHYRKEVEITTTLQELLLYFIFLINLCILTFGMVNPHMYYLNKVMSSLFLDTSVPGEERTNFKSIRSITDFWKFMEGPLLEGLYWDSWYNNQQLYNLKNSSRIYYENILLGVPRVRQLKVRNNTCKVYSSFQSLMSECYGKYTSANEDLSNFGLQINTEWRYSTSNTNSPWHWGFLGVYRNGGYIFTLSKSKSETKNKFIDLRLNSWITRGTRVIFIDFSLYNANVNLFCIIRLVAEFPATGGILTSWQFYSVKLLRYVSYYDYFIASCEITFCIFLFVFTTQEVKKIKEFKSAYFKSIWNWLELLLLLLCFVAVSFNTYYNVQIFLLLGQLLKSTEKYSDFYFLACWHIYYNNIIAITIFFAWIKNMFLAIINDTYSEVKADYSIGRRLDFELGKMIKQSYKNVLEKFRLKKAQKDEDKKTKGSGDLAEQARREGFDENEIQNAEQMKKWKERLEKKYYSMEIQDDYQPVTQEEFRELFLYAVELEKELHYINLKLNQVVRKVSAL

SEQ ID NO: 58415 - protein, 265 aa, Homo sapiens
MPLPVALQTRLAKRGILKHLEPEPEEEIIAEDYDDDPVDYEATRLEGLPPSWYKVFDPSCGLPYYWNADTDLVSWLSPHDPNSVVTKSAKKLRSSNADAEEKLDRSHDKSDRGHDKSDRSHEKLDRGHDKSDRGHDKSDRDRERGYDKVDRERERDRERDRDRGYDKADREEGKERRHHRREELAPYPKSKKAVSRKDEELDPMDPSSYSDAPRGTWSTGLPKRNEAKTGADTTAAGPLFQQRPYPSPGAVLRANAEASRTKQQD

SEQ ID NO: 58416 - protein, 170 aa, Homo sapiens
MPLPVALQTRLAKRGILKHLEPEPEEEIIAEDYDDDPVDYEATRLEGLPPSWYKVFDPSCGLPYYWNADTDLVSWLSPHDPNSVVTKSAKKLRSSNAAVSRKDEELDPMDPSSYSDAPRGTWSTGLPKRNEAKTGADTTAAGPLFQQRPYPSPGAVLRANAEASRTKQQD

SEQ ID NO: 58417 - protein, 67 aa, Homo sapiens
MPLPVALQTRLAKRGILKHLEPEPEEEIIAEDYDDDPVDYEATRLEGLPPSWYKVFDPSCPGWSAMV

SEQ ID NO: 58418 - protein, 265 aa, Homo sapiens; identical to SEQ ID NO: 58415

SEQ ID NO: 58419 - protein, 170 aa, Homo sapiens; identical to SEQ ID NO: 58416

SEQ ID NO: 58420 - protein, 265 aa, Homo sapiens; identical to SEQ ID NO: 58415

SEQ ID NO: 58421 - protein, 213 aa, Homo sapiens
MPLPVALQTRLAKRGILKHLEPEPEEEIIAEDYDDDPVDYEATRLEGLPPSWYKVFDPSCGLPYYWNADTDLVSWLSPHDPNSVVTKSAKKLRSSNADAEEKLDRSHDKSDRGHDKSDRSHEKLDRGHDKSDRGHDKSDRDRERGYDKVDRERERDRERDRDRGYDKADREEGKERRHHRREELAPYPKSKKAVSRKDEELDPMDPSSYSDAP

SEQ ID NO: 58422 - protein, 265 aa, Homo sapiens; identical to SEQ ID NO: 58415

SEQ ID NO: 58423 - protein, 150 aa, Homo sapiens
  VARIANT 1: note = MOD_RES - Any amino acid
XIATYLLHLLVQPEEEIIAEDYDDDPVDYEATRLEGLPPSWYKVFDPSCGLPYYWNADTDLVSWLSPHDPNSVVTKSAKKLRSSNAAVSRKDEELDPMDPSSYSDAPRGTWSTGLPKRNEAKTGADTTAAGPLFQQRPYPSPGAVLRANA

SEQ ID NO: 58424 - protein, 740 aa, Homo sapiens
MEKLGVEPEEEGGGDDDEEDAEAWAMELADVGAAASSQGVHDQVLPTPNASSRVIVHVDLDCFYAQVEMISNPELKDKPLGVQQKYLVVTCNYEARKLGVKKLMNVRDAKEKCPQLVLVNGEDLTRYREMSYKVTELLEEFSPVVERLGFDENFVDLTEMVEKRLQQLQSDELSAVTVSGHVYNNQSINLLDVLHIRLLVGSQIAAEMREAMYNQLGLTGCAGVASNKLLAKLVSGVFKPNQQTVLLPESCQHLIHSLNHIKEIPGIGYKTAKCLEALGINSVRDLQTFSPKILEKELGISVAQRIQKLSFGEDNSPVILSGPPQSFSEEDSFKKCSSEVEAKNKIEELLASLLNRVCQDGRKPHTVRLIIRRYSSEKHYGRESRQCPIPSHVIQKLGTGNYDVMTPMVDILMKLFRNMVNVKMPFHLTLLSVCFCNLKALNTAKKGLIDYYLMPSLSTTSRSGKHSFKMKDTHMEDFPKDKETNRDFLPSGRIESTRTRESPLDTTNFSKEKDINEFPLCSLPEGVDQEVFKQLPVDIQEEILSGKSREKFQGKGSVSCPLHASRGVLSFFSKKQMQDIPINPRDHLSSSKQVSSVSPCEPGTSGFNSSSSSYMSSQKDYSYYLDNRLKDERISQGPKEPQGFHFTNSNPAVSAFHSFPNLQSEQLFSRNHTTDSHKQTVATDSHEGLTENREPDSVDEKITFPSDIDPQVFYELPEAVQKELLAEWKRAGSDFHIGHK

SEQ ID NO: 58425 - protein, 661 aa, Homo sapiens
MEKLGVEPEEEGGGDDDEEDAEAWAMELADVGAAASSQGVHDQVLPTPNASSRVIVHVDLDCFYAQVEMISNPELKDKPLGVQQKYLVVTCNYEARKLGVKKLMNVRDAKEKCPQLVLVNGEDLTRYREMSYKVTELLEEFSPVVERLGFDENFVDLTEMVEKRLQQLQSDELSAVTVSGHVYNNQCIGYKTAKCLEALGINSVRDLQTFSPKILEKELGISVAQRIQKLSFGEDNSPVILSGPPQSFSEEDSFKKCSSEVEAKNKIEELLASLLNRVCQDGRKPHTVRLIIRRYSSEKHYGRESRQCPIPSHVIQKLGTGNYDVMTPMVDILMKLFRNMVNVKMPFHLTLLSVCFCNLKALNTAKKGLIDYYLMPSLSTTSRSGKHSFKMKDTHMEDFPKDKETNRDFLPSGRIESTRTRESPLDTTNFSKEKDINEFPLCSLPEGVDQEVFKQLPVDIQEEILSGKSREKFQGKGSVSCPLHASRGVLSFFSKKQMQDIPINPRDHLSSSKQVSSVSPCEPGTSGFNSSSSSYMSSQKDYSYYLDNRLKDERISQGPKEPQGFHFTNSNPAVSAFHSFPNLQSEQLFSRNHTTDSHKQTVATDSHEGLTENREPDSVDEKITFPSDIDPQVFYELPEAVQKELLAEWKRAGSDFHIGHK

SEQ ID NO: 58426 - protein, 740 aa, Homo sapiens; identical to SEQ ID NO: 58424

SEQ ID NO: 58427 - protein, 870 aa, Homo sapiens
MDSTKEKCDSYKDDLLLRMGLNDNKAGMEGLDKEKINKIIMEATKGSRFYGNELKKEKQVNQRIENMMQQKAQITSQQLRKAQLQVDRFAMELEQSRNLSNTIVHIDMDAFYAAVEMRDNPELKDKPIAVGSMSMLSTSNYHARRFGVRAAMPGFIAKRLCPQLIIVPPNFDKYRAVSKEVKEILADYDPNFMAMSLDEAYLNITKHLEERQNWPEDKRRYFIKMGSSVENDNPGKEVNKLSEHERSISPLLFEESPSDVQPPGDPFQVNFEEQNNPQILQNSVVFGTSAQEVVKEIRFRIEQKTTLTASAGIAPNTMLAKVCSDKNKPNGQYQILPNRQAVMDFIKDLPIRKVSGIGKVTEKMLKALGIITCTELYQQRALLSLLFSETSWHYFLHISLGLGSTHLTRDGERKSMSVERTFSEINKAEEQYSLCQELCSELAQDLQKERLKGRTVTIKLKNVNFEVKTRASTVSSVVSTAEEIFAIAKELLKTEIDADFPHPLRLRLMGVRISSFPNEEDRKHQQRSIIGFLQAGNQALSATECTLEKTDKDKFVKPLEMSHKKSFFDKKRSERKWSHQDTFKCEAVNKQSFQTSQPFQVLKKKMNENLEISENSDDCQILTCPVCFRAQGCISLEALNKHVDECLDGPSISENFKMFSCSHVSATKVNKKENVPASSLCEKQDYEAHPKIKEISSVDCIALVDTIDNSSKAESIDALSNKHSKEECSSLPSKSFNIEHCHQNSSSTVSLENEDVGSFRQEYRQPYLCEVKTGQALVCPVCNVEQKTSDLTLFNVHVDVCLNKSFIQELRKDKFNPVNQPKESSRSTGSSSGVQKAVTRTKRPGLMTKYSTSKKIKPNNPKHTLDIFFK

SEQ ID NO: 58428 - protein, 672 aa, Homo sapiens
MDSTKEKCDSYKDDLLLRMGLNDNKAGMEGLDKEKINKIIMEATKGSRFYGNELKKEKQVNQRIENMMQQKAQITSQQLRKAQLQVDRFAMELEQSRNLSNTIVHIDMDAFYAAVEMRDNPELKDKPIAVGSMSMLSTSNYHARRFGVRAAMPGFIAKRLCPQLIIVPPNFDKYRAVSKEVKEILADYDPNFMAMSLDEAYLNITKHLEERQNWPEDKRRYFIKMGSSVENDNPGKEVNKLSEHERSISPLLFEESPSDVQPPGDPFQVNFEEQNNPQILQNSVVFGTSAQEVVKEIRFRIEQKTTLTASAGVRISSFPNEEDRKHQQRSIIGFLQAGNQALSATECTLEKTDKDKFVKPLEMSHKKSFFDKKRSERKWSHQDTFKCEAVNKQSFQTSQPFQVLKKKMNENLEISENSDDCQILTCPVCFRAQGCISLEALNKHVDECLDGPSISENFKMFSCSHVSATKVNKKENVPASSLCEKQDYEAHPKIKEISSVDCIALVDTIDNSSKAESIDALSNKHSKEECSSLPSKSFNIEHCHQNSSSTVSLENEDVGSFRQEYRQPYLCEVKTGQALVCPVCNVEQKTSDLTLFNVHVDVCLNKSFIQELRKDKFNPVNQPKESSRSTGSSSGVQKAVTRTKRPGLMTKYSTSKKIKPNNPKHTLDIFFK

SEQ ID NO: 58429 - protein, 780 aa, Homo sapiens
MELEQSRNLSNTIVHIDMDAFYAAVEMRDNPELKDKPIAVGSMSMLSTSNYHARRFGVRAAMPGFIAKRLCPQLIIVPPNFDKYRAVSKEVKEILADYDPNFMAMSLDEAYLNITKHLEERQNWPEDKRRYFIKMGSSVENDNPGKEVNKLSEHERSISPLLFEESPSDVQPPGDPFQVNFEEQNNPQILQNSVVFGTSAQEVVKEIRFRIEQKTTLTASAGIAPNTMLAKVCSDKNKPNGQYQILPNRQAVMDFIKDLPIRKVSGIGKVTEKMLKALGIITCTELYQQRALLSLLFSETSWHYFLHISLGLGSTHLTRDGERKSMSVERTFSEINKAEEQYSLCQELCSELAQDLQKERLKGRTVTIKLKNVNFEVKTRASTVSSVVSTAEEIFAIAKELLKTEIDADFPHPLRLRLMGVRISSFPNEEDRKHQQRSIIGFLQAGNQALSATECTLEKTDKDKFVKPLEMSHKKSFFDKKRSERKWSHQDTFKCEAVNKQSFQTSQPFQVLKKKMNENLEISENSDDCQILTCPVCFRAQGCISLEALNKHVDECLDGPSISENFKMFSCSHVSATKVNKKENVPASSLCEKQDYEAHPKIKEISSVDCIALVDTIDNSSKAESIDALSNKHSKEECSSLPSKSFNIEHCHQNSSSTVSLENEDVGSFRQEYRQPYLCEVKTGQALVCPVCNVEQKTSDLTLFNVHVDVCLNKSFIQELRKDKFNPVNQPKESSRSTGSSSGVQKAVTRTKRPGLMTKYSTSKKIKPNNPKHTLDIFFK

SEQ ID NO: 58430 - protein, 461 aa, Homo sapiens
MDSTKEKCDSYKDDLLLRMGLNDNKAGMEGLDKEKINKIIMEATKGSRFYGNELKKEKQVNQRIENMMQQKAQITSQQLRKAQLQVDRFAMELEQSRNLSNTIVHIDMDAFYAAVEMRDNPELKDKPIAVGSMSMLSTSNYHARRFGVRAAMPGFIAKRLCPQLIIVPPNFDKYRAVSKEVKEILADYDPNFMAMSLDEAYLNITKHLEERQNWPEDKRRYFIKMGSSVENDNPGKEVNKLSEHERSISPLLFEESPSDVQPPGDPFQVNFEEQNNPQILQNSVVFGTSAQEVVKEIRFRIEQKTTLTASAGIAPNTMLAKVCSDKNKPNGQYQILPNRQAVMDFIKDLPIRKVSGIGKVTEKMLKALGIITCTELYQQRALLSLLFSETSWHYFLHISLGLGSTHLTRDGERKSMSVERTFSEINKAEEQYSLCQELCSELAQDLQKERLKVAQVEYRRL

SEQ ID NO: 58431 - protein, 672 aa, Homo sapiens; identical to SEQ ID NO: 58428

SEQ ID NO: 58432 - protein, 489 aa, Homo sapiens
MDSTKEKCDSYKDDLLLRMGLNDNKAGMEGLDKEKINKIIMEATKGSRFYGNELKKEKQVNQRIENMMQQKAQITSQQLRKAQLQVDRFAMELEQSRNLSNTIVHIDMDAFYAAVEMRDNPELKDKPIAVGSMSMLSTSNYHARRFGVRAAMPGFIAKRLCPQLIIVPPNFDKYRAVSKEVKEILADYDPNFMAMSLDEAYLNITKHLEERQNWPEDKRRYFIKMGSSVENDNPGKEVNKLSEHERSISPLLFEESPSDVQPPGDPFQVNFEEQNNPQILQNSVVFGTSAQEVVKEIRFRIEQKTTLTASAGIAPNTMLAKVCSDKNKPNGQYQILPNRQAVMDFIKDLPIRKVSGIGKVTEKMLKALGIITCTELYQQRALLSLLFSETSWHYFLHISLGLGSTHLTRDGERKSMSVERTFSEINKAEEQYSLCQELCSELAQDLQKERLKVFGYLVFPMKRTGNTNKGALLAFYRLETKPCQPLSVH

SEQ ID NO: 58433 - protein, 141 aa, Homo sapiens
MDSTKEKCDSYKDDLLLRMGLNDNKAGMEGLDKEKINKIIMEATKGSRFYGNELKKEKQVNQRIENMMQQKAQITSQQLRKAQLQVDRFAMELEQSRNLSNTIVHIDMDAFYAAVEMRDNPELKDKPIAVGSMSMLSTSNY

SEQ ID NO: 58434 - protein, 472 aa, Homo sapiens
MDSTKEKCDSYKDDLLLRMGLNDNKAGMEGLDKEKINKIIMEATKGSRFYGNELKKEKQVNQRIENMMQQKAQITSQQLRKAQLQVDRFAMELEQSRNLSNTIVHIDMDAFYAAVEMRDNPELKDKPIAVGSMSMLSTSNYHARRFGVRAAMPGFIAKRLCPQLIIVPPNFDKYRAVSKEVKEILADYDPNFMAMSLDEAYLNITKHLEERQNWPEDKRRYFIKMGSSVENDNPGKEVNKLSEHERSISPLLFEESPSDVQPPGDPFQVNFEEQNNPQILQNSVVFGTSAQEVVKEIRFRIEQKTTLTASAGIAPNTMLAKVCSDKNKPNGQYQILPNRQAVMDFIKDLPIRKVSGIGKVTEKMLKALGIITCTELYQQRALLSLLFSETSWHYFLHISLGLGSTHLTRDGERKSMSVERTFSEINKAEEQYSLCQELCSELAQDLQKERLKVLYFDMVSLVFKFFNSKMLP

SEQ ID NO: 58435 - protein, 636 aa, Homo sapiens
MKCKCPVICFNAKDFVRIVLQFFGNDGSWKHVADFIGLDPRIAAWLIDPSDATPSFEDLVEKYCEKSITVKVNSTYGNSSRNIVNQNVRENLKTLYRLTMDLCSKLKDYGLWQLFRTLELPLIPILAVMESHAIQVNKEEMEKTSALLGARLKELEQEAHFVAGERFLITSNNQLREILFGKLKLHLLSQRNSLPRTGLQKYPSTSEAVLNALRDLHPLPKIILEYRQVHKIKSTFVDGLLACMKKGSISSTWNQTGTVTGRLSAKHPNIQGISKHPIQITTPKNFKGKEDKILTISPRAMFVSSKGHTFLAADFSQIELRILTHLSGDPELLKLFQESERDDVFSTLTSQWKDVPVEQVTHADREQTKKVVYAVVYGAGKERLAACLGVPIQEAAQFLESFLQKYKKIKDFARAAIAQCHQTGCVVSIMGRRRPLPRIHAHDQQLRAQAERQAVNFVVQGSAADLCKLAMIHVFTAVAASHTLTARLVAQIHDELLFEVEDPQIPECAALVRRTMESLEQVPLKVSLSAGRSWGHLVPLQEAWLRQAHVALSLPATAWLPLGPLPAPSPHPCIFRLHFVCSPRQQWEERTGFQQSIVWPSPRSPALYAPGRINPLGLGWPAIPWSKCLCKALLIL

SEQ ID NO: 58436 - protein, 311 aa, Homo sapiens
MAVGSQDYGLWQLFRTLELPLIPILAVMESHAIQVNKEEMEKTSALLGARLKELEQEAHFVAGERFLITSNNQLREILFGKLKLHLLSQRNSLPRTGLQKYPSTSEAVNIQGISKHPIQITTPKNFKGKEDKILTISPRAMFVSSKGHTFLAADFSQIELRILTHLSGDPELLKLFQESERDDVFSTLTSQWKDVPVEQVTHADREQTKKVVYAVVYGAGKERLAACLGVPIQEAAQFLESFLQKYKKIKDFARAAIAQCHQTGCVVSIMGRRRPLPRIHAHDQQLRAQAERQAVNFVVQAQSQHLCVEVP

SEQ ID NO: 58437 - protein, 900 aa, Homo sapiens
MENYEALVGFDLCNTPLSSVAQKIMSAMHSGDLVDSKTWGKSTETMEVINKSSVKYSVQLEDRKTQSPEKKDLKSLRSQTSRGSAKLSPQSFSVRLTDQLSADQKQKSISSLTLSSCLIPQYNQEASVLQKKGHKRKHFLMENINNENKGSINLKRKHITYNNLSEKTSKQMALEEDTDDAEGYLNSGNSGALKKHFCDIRHLDDWAKSQLIEMLKQAAALVITVMYTDGSTQLGADQTPVSSVRGIVVLVKRQAEGGHGCPDAPACGPVLEGFVSDDPCIYIQIEHSAIWDQEQEAHQQFARNVLFQTMKCKCPVICFNAKDFVRIVLQFFGNDGSWKHVADFIGLDPRIAAWLIDPSDATPSFEDLVEKYCEKSITVKVNSTYGNSSRNIVNQNVRENLKTLYRLTMDLCSKLKDYGLWQLFRTLELPLIPILAVMESHAIQVNKEEMEKTSALLGARLKELEQEAHFVAGERFLITSNNQLREILFGKLKLHLLSQRNSLPRTGLQKYPSTSEAVLNALRDLHPLPKIILEYRQVHKIKSTFVDGLLACMKKGSISSTWNQTGTVTGRLSAKHPNIQGISKHPIQITTPKNFKGKEDKILTISPRAMFVSSKGHTFLAADFSQIELRILTHLSGDPELLKLFQESERDDVFSTLTSQWKDVPVEQVTHADREQTKKVVYAVVYGAGKERLAACLGVPIQEAAQFLESFLQKYKKIKDFARAAIAQCHQTGCVVSIMGRRRPLPRIHAHDQQLRAQAERQAVNFVVQGSAADLCKLAMIHVFTAVAASHTLTARLVAQIHDELLFEVEDPQIPECAALVRRTMESLEQVQALELQLQVPLKVSLSAGRSWGHLVPLQEAWGPPPGPCRTESPSNSLAAPGSPASTQPPPLHFSPSFCL

SEQ ID NO: 58438 - protein, 900 aa, Homo sapiens; identical to SEQ ID NO: 58437

SEQ ID NO: 58439 - protein, 1010 aa, Homo sapiens
RMDGKRRPGPGPGVPPKRARGGLWDDDDAPRPSQFEEDLALMEEMEAEHRLQEQEEEELQSVLEGVADGQVPPSAIDPRWLRPTPPALDPQTEPLIFQQLEIDHYVGPAQPVPGGPPPSRGSVPVLRAFGVTDEGFSVCCHIHGFAPYFYTPAPPGFGPEHMGDLQRELNLAISRDSRGGRELTGPAVLAVELCSRESMFGYHGHGPSPFLRITVALPRLVAPARRLLEQGIRVAGLGTPSFAPYEANVDFEIRFMVDTDIVGCNWLELPAGKYALRLKEKATQCQLEADVLWSDVVSHPPEGPWQRIAPLRVLSFDIECAGRKGIFPEPERDPVIQICSLGLRWGEPEPFLRLALTLRPCAPILGAKVQSYEKEEDLLQAWSTFIRIMDPDVITGYNIQNFDLPYLISRAQTLKVQTFPFLGRVAGLCSNIRDSSFQSKQTGRRDTKVVSMVGRVQMDMLQVLLREYKLRSYTLNAVSFHFLGEQKEDVQHSIITDLQNGNDQTRRRLAVYCLKDAYLPLRLLERLMVLVNAVEMARVTGVPLSYLLSRGQQVKVVSQLLRQAMHEGLLMPVVKSEGGEDYTGATVIEPLKGYYDVPIATLDFSSLYPSIMMAHNLCYTTLLRPGTAQKLGLTEDQFIRTPTGDEFVKTSVRKGLLPQILENLLSARKRAKAELAKETDPLRRQVLDGRQLALKVSANSVYGFTGAQVGKLPCLEISQSVTGFGRQMIEKTKQLVESKYTVENGYSTSAKVVYGDTDSVMCRFGVSSVAEAMALGREAADWVSGHFPSPIRLEFEKVYFPYLLISKKRYAGLLFSSRPDAHDRMDCKGLEAVRRDNCPLVANLVTASLRRLLIDRDPEGAVAHAQDVISDLLCNRIDISQLVITKELTRAASDYAGKQAHVELAERTRCSCWSTACPLTRSTTWSSSWPSPSCASSSPSWARAVPRLCYCGGTTRAARRCSRARWAASWPSPNAATAALAAAQCSATREPCVSSASPGSLSCIRRRYPI

SEQ ID NO: 58440 - protein, 1107 aa, Homo sapiens
MDGKRRPGPGPGVPPKRARGGLWDDDDAPRPSQFEEDLALMEEMEAEHRLQEQEEEELQSVLEGVADGQVPPSAIDPRWLRPTPPALDPQTEPLIFQQLEIDHYVGPAQPVPGGPPPSRGSVPVLRAFGVTDEGFSVCCHIHGFAPYFYTPAPPGFGPEHMGDLQRELNLAISRDSRGGRELTGPAVLAVELCSRESMFGYHGHGPSPFLRITVALPRLVAPARRLLEQGIRVAGLGTPSFAPYEANVDFEIRFMVDTDIVGCNWLELPAGKYALRLKEKATQCQLEADVLWSDVVSHPPEGPWQRIAPLRVLSFDIECAGRKGIFPEPERDPVIQICSLGLRWGEPEPFLRLALTLRPCAPILGAKVQSYEKEEDLLQAWSTFIRIMDPDVITGYNIQNFDLPYLISRAQTLKVQTFPFLGRVAGLCSNIRDSSFQSKQTGRRDTKVVSMVGRVQMDMLQVLLREYKLRSYTLNAVSFHFLGEQKEDVQHSIITDLQNGNDQTRRRLAVYCLKDAYLPLRLLERLMVLVNAVEMARVTGVPLSYLLSRGQQVKVVSQLLRQAMHEGLLMPVVKSEGGEDYTGATVIEPLKGYYDVPIATLDFSSLYPSIMMAHNLCYTTLLRPGTAQKLGLTEDQFIRTPTGDEFVKTSVRKGLLPQILENLLSARKRAKAELAKETDPLRRQVLDGRQLALKVSANSVYGFTGAQVGKLPCLEISQSVTGFGRQMIEKTKQLVESKYTVENGYSTSAKVVYGDTDSVMCRFGVSSVAEAMALGREAADWVSGHFPSPIRLEFEKVYFPYLLISKKRYAGLLFSSRPDAHDRMDCKGLEAVRRDNCPLVANLVTASLRRLLIDRDPEGAVAHAQDVISDLLCNRIDISQLVITKELTRAASDYAGKQAHVELAERMRKRDPGSAPSLGDRVPYVIISAAKGVAAYMKSEDPLFVLEHSLPIDTQYYLEQQLAKPLLRIFEPILGEGRAEAVLLRGDHTRCKTVLTGKVGGLLAFAKRRNCCIGCRTVLSHQGAVCEFCQPRESELYQKEVSHLNALEERFSRLWTQCQRCQGSLHEDVICTSRDCPIFYMRKKVRKDLEDQEQLLRRFGPPGPEAW

SEQ ID NO: 58441 - protein, 469 aa, Homo sapiens
MFSEQAAQRAHTLLSPPSANNATFARVPVATYTNSSQPFRLGERSFSRQYAHIYATRLIQMRPFLENRAQQHWGSGVGVKKLCELQPEEKCCVVGTLFKAMPLQPSILREVSEEHNLLPQPPRSKYIHPDDELVLEDELQRIKLKGTIDVSKLVTGTVLAVFGSVRDDGKFLVEDYCFADLAPQKPAPPLDTDRFVLLVSGLGLGGGGGESLLGTQLLVDVVTGQLGDEGEQCSAAHVSRVILAGNLLSHSTQSRDSINKAKYLTKKTQAASVEAVKMLDEILLQLSASVPVDVMPGEFDPTNYTLPQQPLHPCMFPLATAYSTLQLVTNPYQATIDGVRFLGTSGQNVSDIFRYSSMEDHLEILEWTLRVRHISPTAPDTLGCYPFYKTDPFIFPECPHVYFCGNTPSFGSKIIRGPEDQTVLLVTVPDFSATQTACLVNLRSLACQPISFSGFGAEDDDLGGLGLGP

SEQ ID NO: 58442 - protein, 148 aa, Homo sapiens
MFSEQAAQRAHTLLSPPSANNATFARVPVATYTNSSQPFRLGERSFSRQYAHIYATRLIQMRPFLENRAQQHWGSGVGVKKLCELQPEEKCCVVGTLFKAMPLQPSILREVSEEHNLLPQPPRSKYIHPDDELVLEDELQRIKLKGTI

SEQ ID NO: 58443 - protein, 220 aa, Homo sapiens
MFSEQAAQRAHTLLSPPSANNATFARVPVATYTNSSQPFRLGERSFSRQYAHIYATRLIQMRPFLENRAQQHWGSGVGVKKLCELQPEEKCCVVGTLFKAMPLQPSILREVSEEHNLLPQPPRSKYIHPDDELVLEDELQRIKLKGTIDVSKLVTGTVLAVFGSVRDDGKFLVEDYCFADLAPQKPAPPLDTDRFVLLVSGLGLGGGGGESLLGTQLLVD

SEQ ID NO: 58444 - protein, 469 aa, Homo sapiens; identical to SEQ ID NO: 58441

SEQ ID NO: 58445 - protein, 155 aa, Homo sapiens
MFSEQAAQRAHTLLSPPSANNATFARVPVATYTNSSQPFRLGERSFSRQYAHIYATRLIQMRPFLENRAQQHWGSGVGVKKLCELQPEEKCCVVGTLFKAMPLQPSILREVSEEHNLLPQPPRSKYIHPDDELVLEDELQRIKLKGTIDVSKLVT

SEQ ID NO: 58446 - protein, 256 aa, Homo sapiens
MFPVLPGSHLLLNNPALEFIKYVCKVLSLDTNITNQVNKLNRDLLRLVDVGEFSEEAQFRDPCRSYVLPEVICRSCNFCRDLDLCKDSSFSEDGAVLPQWLCSNCQAPYDSSAIEMTLVEVLQKKLMAFTLQDLKEADTPKCEEKERRKRELHSSATGRSCRGASEQRLGDAPSCRVVVHGVQACRMEGVCLKCRGVKETSMPVYCSCAGDFALTIHTQVFMEQIGIFRNIAQHYGMSYLLETLEWLLQKNPQLGH

SEQ ID NO: 58447 - protein, 2286 aa, Homo sapiens
MSLRSGGRRRADPGADGEASRDDGATSSVSALKRLERSQWTDKMDLRFGFERLKEPGEKTGWLINMHPTEILDEDKRLGSAVDYYFIQDDGSRFKVALPYKPYFYIATRKGCEREVSSFLSKKFQGKIAKVETVPKEDLDLPNHLVGLKRNYIRLSFHTVEDLVKVRKEISPAVKKNREQDHASDAYTALLSSVLQRGGVITDEEETSKKIADQLDNIVDMREYDVPYHIRLSIDLKIHVAHWYNVRYRGNAFPVEITRRDDLVERPDPVVLAFDIETTKLPLKFPDAETDQIMMISYMIDGQGYLITNREIVSEDIEDFEFTPKPEYEGPFCVFNEPDEAHLIQRWFEHVQETKPTIMVTYNGDFFDWPFVEARAAVHGLSMQQEIGFQKDSQGEYKAPQCIHMDCLRWVKRDSYLPVGSHNLKAAAKAKLGYDPVELDPEDMCRMATEQPQTLATYSVSDAVATYYLYMKYVHPFIFALCTIIPMEPDEVLRKGSGTLCEALLMVQAFHANIIFPNKQEQEFNKLTDDGHVLDSETYVGGHVEALESGVFRSDIPCRFRMNPAAFDFLLQRVEKTLRHALEEEEKVPVEQVTNFEEVCDEIKSKLASLKDVPSRIECPLIYHLDVGAMYPNIILTNRLQPSAMVDEATCAACDFNKPGANCQRKMAWQWRGEFMPASRSEYHRIQHQLESEKFPPLFPEGPARAFHELSREEQAKYEKRRLADYCRKAYKKIHITKVEERLTTICQRENSFYVDTVRAFRDRRYEFKGLHKVWKKKLSAAVEVGDAAEVKRCKNMEVLYDSLQLAHKCILNSFYGYVMRKGARWYSMEMAGIVCFTGANIITQARELIEQIGRPLELDTDGIWCVLPNSFPENFVFKTTNVKKPKVTISYPGAMLNIMVKEGFTNDQYQELAEPSSLTYVTRSENSIFFEVDGPYLAMILPASKEEGKKLKKRYAVFNEDGSLAELKGFEVKRRGELQLIKIFQSSVFEAFLKGSTLEEVYGSVAKVADYWLDVLYSKAANMPDSELFELISENRSMSRKLEDYGEQKSTSISTAKRLAEFLGDQMVKDAGLSCRYIISRKPEGSPVTERAIPLAIFQAEPTVRKHFLRKWLKSSSLQDFDIRAILDWDYYIERLGSAIQKIITIPAALQQVKNPVPRVKHPDWLHKKLLEKNDVYKQKKISELFTLEGRRQVTMAEASEDSPRPSAPDMEDFGLVKLPHPAAPVTVKRKRVLWESQEESQDLTPTVPWQEILGQPPALGTSQEEWLVWLRFHKKKWQLQARQRLARRKRQRLESAEGVLRPGAIRDGPATGLGSFLRRTARSILDLPWQIVQISETSQAGLFRLWALVGSDLHCIRLSIPRVFYVNQRVAKAEEGASYRKVNRVLPRSNMVYNLYEYSVPEDMYQEHINEINAELSAPDIEGVYETQVPLLFRALVHLGCVCVVNKQLVRHLSGWEAETFALEHLEMRSLAQFSYLEPGSIRHIYLYHHAQAHKALFGIFIPSQRRASVFVLDTVRSNQMPSLGALYSAEHGLLLEKVGPELLPPPKHTFEVRAETDLKTICRAIQRFLLAYKEERRGPTLIAVQSSWELKRLASEIPVLEEFPLVPICVADKINYGVLDWQRHGARRMIRHYLNLDTCLSQAFEMSRYFHIPIGNLPEDISTFGSDLFFARHLQRHNHLLWLSPTARPDLGGKEADDNCLVMEFDDQATVEINSSGCYSTVCVELDLQNLAVNTILQSHHVNDMEGADSMGISFDVIQQASLEDMITGGQAASAPASYDETALCSNTFRILKSMVVGWVKEITQYHNIYADNQVMHFYRWLRSPSSLLHDPALHRTLHNMMKKLFLQLIAEFKRLGSSVIYANFNRIILCTKKRRVEDAIAYVEYITSSIHSKETFHSLTISFSRCWEFLLWMDPSNYGGIKGKVSSRIHCGLQDSQKAGGAEDEQENEDDEEERDGEEEEEAEESNVEDLLENNWNILQFLPQAASCQNYFLMIVSAYIVAVYHCMKDGLRRSAPGSTPVRRRGASQLSQEAEGAVGALPGMITFSQDYVANELTQSFFTITQKIQKKVTGSRNSTELSEMFPVLPGSHLLLNNPALEFIKYVCKVLSLDTNITNQVNKLNRDLLRLVDVGEFSEEAQFRDPCRSYVLPEVICRSCNFCRDLDLCKDSSFSEDGAVLPQWLCSNCQAPYDSSAIEMTLVEVLQKKLMAFTLQDLVCLKCRGVKETSMPVYCSCAGDFALTIHTQVFMEQIGIFRNIAQHYGMSYLLETLEWLLQKNPQLGH

SEQ ID NO: 58448 - protein, 1109 aa, Homo sapiens
MHPTEILDEDKRLGSAVDYYFIQDDGSRFKVALPYKPYFYIATRKGCEREVSSFLSKKFQGKIAKVETVPKEDLDLPNHLVGLKRNYIRLSFHTVEDLVKVRKEISPAVKKNREQDHASDAYTALLSSVLQRGGVITDEEETSKKIADQLDNIVDMREYDVPYHIRLSIDLKIHVAHWYNVRYRGNAFPVEITRRDDLVERPDPVVLAFDIETTKLPLKFPDAETDQIMMISYMIDGQGYLITNREIVSEDIEDFEFTPKPEYEGPFCVFNEPDEAHLIQRWFEHVQETKPTIMVTYNGDFFDWPFVEARAAVHGLSMQQEIGFQKDSQGEYKAPQCIHMDCLRWVKRDSYLPVGSHNLKAAAKAKLGYDPVELDPEDMCRMATEQPQTLATYSVSDAVATYYLYMKYVHPFIFALCTIIPMEPDEVLRKGSGTLCEALLMVQAFHANIIFPNKQEQEFNKLTDDGHVLDSETYVGGHVEALESGVFRSDIPCRFRMNPAAFDFLLQRVEKTLRHALEEEEKVPVEQVTNFEEVCDEIKSKLASLKDVPSRIECPLIYHLDVGAMYPNIILTNRLQPSAMVDEATCAACDFNKPGANCQRKMAWQWRGEFMPASRSEYHRIQHQLESEKFPPLFPEGPARAFHELSREEQAKYEKRRLADYCRKAYKKIHITKVEERLTTICQRENSFYVDTVRAFRDRRYEFKGLHKVWKKKLSAAVEVGDAAEVKRCKNMEVLYDSLQLAHKCILNSFYGYVMRKGARWYSMEMAGIVCFTGANIITQARELIEQIGRPLELDTDGIWCVLPNSFPENFVFKTTNVKKPKVTISYPGAMLNIMVKEGFTNDQYQELAEPSSLTYVTRSENSIFFEVDGPYLAMILPASKEEGKKLKKRYAVFNEDGSLAELKGFEVKRRGELQLIKIFQSSVFEAFLKGSTLEEVYGSVAKVADYWLDVLYSKAANMPDSELFELISENRSMSRKLEDYGEQKSTSISTAKRLAEFLGDQMVKDAGLSCRYIISRKPEGSPVTERAIPLAIFQAEPTVRKHFLRKWLKSSSLQDFDIRAILDWDYYIERLGSAIQKIITIPAALQQVKNPVPRVKHPDWLHKTAGEE

SEQ ID NO: 58449 - protein, 496 aa, Homo sapiens
MEGILKSMVVGWVKEITQYHNIYADNQVMHFYRWLRSPSSLLHDPALHRTLHNMMKKLFLQLIAEFKRLGSSVIYANFNRIILCTKKRRVEDAIAYVEYITSSIHSKETFHSLTISFSRCWEFLLWMDPSNYGGIKGKVSSRIHCGLQDSQKAGGAEDEQENEDDEEERDGEEEEEAEESNVEDLLENNWNILQFLPQAASCQNYFLMIVSAYIVAVYHCMKDGLRRSAPGSTPVRRRGASQLSQEAEGAVGALPGMITFSQDYVANELTQSFFTITQKIQKKVTGSRNSTELSEMFPVLPGSHLLLNNPALEFIKYVCKVLSLDTNITNQVNKLNRDLLRLVDVGEFSEEAQFRDPCRSYVLPEVICRSCNFCRDLDLCKDSSFSEDGAVLPQWLCSNCQAPYDSSAIEMTLVEVLQKKLMAFTLQDLVCLKCRGVKETSMPVYCSCAGDFALTIHTQVFMEQIGIFRNIAQHYGMSYLLETLEWLLQKNPQLGH

SEQ ID NO: 58450 - protein, 2297 aa, Homo sapiens
MSRPLGLKSFPRHKQAPLPLSLTFHGCLLLRRDDGATSSVSALKRLERSQWTDKMDLRFGFERLKEPGEKTGWLINMHPTEILDEDKRLGSAVDYYFIQDDGSRFKVALPYKPYFYIATRKGCEREVSSFLSKKFQGKIAKVETVPKEDLDLPNHLVGLKRNYIRLSFHTVEDLVKVRKEISPAVKKNREQDHASDAYTALLSSVLQRGGVITDEEETSKKIADQLDNIVDMREYDVPYHIRLSIDLKIHVAHWYNVRYRGNAFPVEITRRDDLVERPDPVVLAFDIETTKLPLKFPDAETDQIMMISYMIDGQGYLITNREIVSEDIEDFEFTPKPEYEGPFCVFNEPDEAHLIQRWFEHVQETKPTIMVTYNGDFFDWPFVEARAAVHGLSMQQEIGFQKDSQGEYKAPQCIHMDCLRWVKRDSYLPVGSHNLKAAAKAKLGYDPVELDPEDMCRMATEQPQTLATYSVSDAVATYYLYMKYVHPFIFALCTIIPMEPDEVLRKGSGTLCEALLMVQAFHANIIFPNKQEQEFNKLTDDGHVLDSETYVGGHVEALESGVFRSDIPCRFRMNPAAFDFLLQRVEKTLRHALEEEEKVPVEQVTNFEEVCDEIKSKLASLKDVPSRIECPLIYHLDVGAMYPNIILTNRLQPSAMVDEATCAACDFNKPGANCQRKMAWQWRGEFMPASRSEYHRIQHQLESEKFPPLFPEGPARAFHELSREEQAKYEKRRLADYCRKAYKKIHITKVEERLTTICQRENSFYVDTVRAFRDRRYEFKGLHKVWKKKLSAAVEVGDAAEVKRCKNMEVLYDSLQLAHKCILNSFYGYVMRKGARWYSMEMAGIVCFTGANIITQARELIEQIGRPLELDTDGIWCVLPNSFPENFVFKTTNVKKPKVTISYPGAMLNIMVKEGFTNDQYQELAEPSSLTYVTRSENSIFFEVDGPYLAMILPASKEEGKKLKKRYAVFNEDGSLAELKGFEVKRRGELQLIKIFQSSVFEAFLKGSTLEEVYGSVAKVADYWLDVLYSKAANMPDSELFELISENRSMSRKLEDYGEQKSTSISTAKRLAEFLGDQMVKDAGLSCRYIISRKPEGSPVTERAIPLAIFQAEPTVRKHFLRKWLKSSSLQDFDIRAILDWDYYIERLGSAIQKIITIPAALQQVKNPVPRVKHPDWLHKKLLEKNDVYKQKKISELFTLEGRRQVTMAEASEDSPRPSAPDMEDFGLVKLPHPAAPVTVKRKRVLWESQEESQDLTPTVPWQEILGQPPALGTSQEEWLVWLRFHKKKWQLQARQRLARRKRQRLESAEGVLRPGAIRDGPATGLGSFLRRTARSILDLPWQIVQISETSQAGLFRLWALVGSDLHCIRLSIPRVFYVNQRVAKAEEGASYRKVNRVLPRSNMVYNLYEYSVPEDMYQEHINEINAELSAPDIEGVYETQVPLLFRALVHLGCVCVVNKQLVRHLSGWEAETFALEHLEMRSLAQFSYLEPGSIRHIYLYHHAQAHKALFGIFIPSQRRASVFVLDTVRSNQMPSLGALYSAEHGLLLEKVGPELLPPPKHTFEVRAETDLKTICRAIQRFLLAYKEERRGPTLIAVQSSWELKRLASEIPVLEEFPLVPICVADKINYGVLDWQRHGARRMIRHYLNLDTCLSQAFEMSRYFHIPIGNLPEDISTFGSDLFFARHLQRHNHLLWLSPTARPDLGGKEADDNCLVMEFDDQATVEINSSGCYSTVCVELDLQNLAVNTILQSHHVNDMEGADSMGISFDVIQQASLEDMITGGQAASAPASYDETALCSNTFRILKSMVVGWVKEITQYHNIYADNQVMHFYRWLRSPSSLLHDPALHRTLHNMMKKLFLQLIAEFKRLGSSVIYANFNRIILCTKKRRVEDAIAYVEYITSSIHSKETFHSLTISFSRCWEFLLWMDPSNYGGIKGKVSSRIHCGLQDSQKAGGAEDEQENEDDEEERDGEEEEEAEESNVEDLLENNWNILQFLPQAASCQNYFLMIVSAYIVAVYHCMKDGLRRSAPGSTPVRRRGASQLSQEAEGAVGALPGMITFSQDYVANELTQSFFTITQKIQKKVTGSRNSTELSEMFPVLPGSHLLLNNPALEFIKYVCKVLSLDTNITNQVNKLNRDLLRLVDVGEFSEEAQFRDPCRSYVLPEVICRSCNFCRDLDLCKDSSFSEDGAVLPQWLCSNCQAPYDSSAIEMTLVEVLQKKLMAFTLQDLVCLKCRGVKETSMPVYCSCAGDFALTIHTQVFMEQIGIFRNIAQHYGMSYLLETLEWLLQKNPQLGH

SEQ ID NO: 58451 - protein, 2259 aa, Homo sapiens
MSLRSGGRRRADPGADGEASRDDGATSSVSALKRLERSQWTDKMDLRFGFERLKEPGEKTGWLINMHPVALPYKPYFYIATRKGCEREVSSFLSKKFQGKIAKVETVPKEDLDLPNHLVGLKRNYIRLSFHTVEDLVKVRKEISPAVKKNREQDHASDAYTALLSSVLQRGGVITDEEETSKKIADQLDNIVDMREYDVPYHIRLSIDLKIHVAHWYNVRYRGNAFPVEITRRDDLVERPDPVVLAFDIETTKLPLKFPDAETDQIMMISYMIDGQGYLITNREIVSEDIEDFEFTPKPEYEGPFCVFNEPDEAHLIQRWFEHVQETKPTIMVTYNGDFFDWPFVEARAAVHGLSMQQEIGFQKDSQGEYKAPQCIHMDCLRWVKRDSYLPVGSHNLKAAAKAKLGYDPVELDPEDMCRMATEQPQTLATYSVSDAVATYYLYMKYVHPFIFALCTIIPMEPDEVLRKGSGTLCEALLMVQAFHANIIFPNKQEQEFNKLTDDGHVLDSETYVGGHVEALESGVFRSDIPCRFRMNPAAFDFLLQRVEKTLRHALEEEEKVPVEQVTNFEEVCDEIKSKLASLKDVPSRIECPLIYHLDVGAMYPNIILTNRLQPSAMVDEATCAACDFNKPGANCQRKMAWQWRGEFMPASRSEYHRIQHQLESEKFPPLFPEGPARAFHELSREEQAKYEKRRLADYCRKAYKKIHITKVEERLTTICQRENSFYVDTVRAFRDRRYEFKGLHKVWKKKLSAAVEVGDAAEVKRCKNMEVLYDSLQLAHKCILNSFYGYVMRKGARWYSMEMAGIVCFTGANIITQARELIEQIGRPLELDTDGIWCVLPNSFPENFVFKTTNVKKPKVTISYPGAMLNIMVKEGFTNDQYQELAEPSSLTYVTRSENSIFFEVDGPYLAMILPASKEEGKKLKKRYAVFNEDGSLAELKGFEVKRRGELQLIKIFQSSVFEAFLKGSTLEEVYGSVAKVADYWLDVLYSKAANMPDSELFELISENRSMSRKLEDYGEQKSTSISTAKRLAEFLGDQMVKDAGLSCRYIISRKPEGSPVTERAIPLAIFQAEPTVRKHFLRKWLKSSSLQDFDIRAILDWDYYIERLGSAIQKIITIPAALQQVKNPVPRVKHPDWLHKKLLEKNDVYKQKKISELFTLEGRRQVTMAEASEDSPRPSAPDMEDFGLVKLPHPAAPVTVKRKRVLWESQEESQDLTPTVPWQEILGQPPALGTSQEEWLVWLRFHKKKWQLQARQRLARRKRQRLESAEGVLRPGAIRDGPATGLGSFLRRTARSILDLPWQIVQISETSQAGLFRLWALVGSDLHCIRLSIPRVFYVNQRVAKAEEGASYRKVNRVLPRSNMVYNLYEYSVPEDMYQEHINEINAELSAPDIEGVYETQVPLLFRALVHLGCVCVVNKQLVRHLSGWEAETFALEHLEMRSLAQFSYLEPGSIRHIYLYHHAQAHKALFGIFIPSQRRASVFVLDTVRSNQMPSLGALYSAEHGLLLEKVGPELLPPPKHTFEVRAETDLKTICRAIQRFLLAYKEERRGPTLIAVQSSWELKRLASEIPVLEEFPLVPICVADKINYGVLDWQRHGARRMIRHYLNLDTCLSQAFEMSRYFHIPIGNLPEDISTFGSDLFFARHLQRHNHLLWLSPTARPDLGGKEADDNCLVMEFDDQATVEINSSGCYSTVCVELDLQNLAVNTILQSHHVNDMEGADSMGISFDVIQQASLEDMITGGQAASAPASYDETALCSNTFRILKSMVVGWVKEITQYHNIYADNQVMHFYRWLRSPSSLLHDPALHRTLHNMMKKLFLQLIAEFKRLGSSVIYANFNRIILCTKKRRVEDAIAYVEYITSSIHSKETFHSLTISFSRCWEFLLWMDPSNYGGIKGKVSSRIHCGLQDSQKAGGAEDEQENEDDEEERDGEEEEEAEESNVEDLLENNWNILQFLPQAASCQNYFLMIVSAYIVAVYHCMKDGLRRSAPGSTPVRRRGASQLSQEAEGAVGALPGMITFSQDYVANELTQSFFTITQKIQKKVTGSRNSTELSEMFPVLPGSHLLLNNPALEFIKYVCKVLSLDTNITNQVNKLNRDLLRLVDVGEFSEEAQFRDPCRSYVLPEVICRSCNFCRDLDLCKDSSFSEDGAVLPQWLCSNCQAPYDSSAIEMTLVEVLQKKLMAFTLQDLVCLKCRGVKETSMPVYCSCAGDFALTIHTQVFMEQIGIFRNIAQHYGMSYLLETLEWLLQKNPQLGH

SEQ ID NO: 58452 - protein, 527 aa, Homo sapiens
MAPERLRSRALSAFKLRGLLLRGEAIKYLTEALQSISELELEDKLEKIINAVEKQPLSSNMIERSVVEAAVQECSQSVDETIEHVFNIIGAFDIPRFVYNSERKKFLPLLMTNHPAPNLFGTPRDKAEMFRERYTILHQRTHRHELFTPPVIGSHPDESGSKFQLKTIETLLGSTTKIGDAIVLGMITQLKEGKFFLEDPTGTVQLDLSKAQFHSGLYTEACFVLAEGWFEDQVFHVNAFGFPPTEPSSTTRAYYGNINFFGGPSNTSVKTSAKLKQLEEENKDAMFVFLSDVWLDQVEVLEKLRIMFAGYSPAPPTCFILCGNFSSAPYGKNQVQALKDSLKTLADIICEYPDIHQSSRFVFVPGPEDPGFGSILPRPPLAESITNEFRQRVPFSVFTTNPCRIQYCTQEITVFREDLVNKMCRNCVRFPSSNLAIPNHFVKTILSQGHLTPLPLYVCPVYWAYDYALRVYPVPDLLVIADKYDPFTTTNTECLCINPGSFPRSGFSFKVFYPSNKTVEDSKLQGF

SEQ ID NO: 58453 - protein, 501 aa, Homo sapiens
MAPERLRSRALSAFKLRGLLLRGEAIKYLTEALQSISELELEDKLEKIINAVEKQPLSSNMIERSVVEAAVQECSQSVDETILLMTNHPAPNLFGTPRDKAEMFRERYTILHQRTHRHELFTPPVIGSHPDESGSKFQLKTIETLLGSTTKIGDAIVLGMITQLKEGKFFLEDPTGTVQLDLSKAQFHSGLYTEACFVLAEGWFEDQVFHVNAFGFPPTEPSSTTRAYYGNINFFGGPSNTSVKTSAKLKQLEEENKDAMFVFLSDVWLDQVEVLEKLRIMFAGYSPAPPTCFILCGNFSSAPYGKNQVQALKDSLKTLADIICEYPDIHQSSRFVFVPGPEDPGFGSILPRPPLAESITNEFRQRVPFSVFTTNPCRIQYCTQEITVFREDLVNKMCRNCVRFPSSNLAIPNHFVKTILSQGHLTPLPLYVCPVYWAYDYALRVYPVPDLLVIADKYDPFTTTNTECLCINPGSFPRSGFSFKVFYPSNKTVEDSKLQGF

SEQ ID NO: 58454 - protein, 502 aa, Homo sapiens
MAPERLRSRALSAFKLRGLLLRGEAIKYLTEALQSISELELEDKLEKIINAVEKQPLSSNMIERSVVEAAVQECSQSVDETIEHVFNIIGAFDIPRFVYNSERKKFLPLLMTNHPAPNLFGTPRDKAEMFRERYTILHQRTHRHELFTPPVIGSHPDESGSKFQLKTIETLLGSTTKIGDAIVLGMITQLKEGKFFLEDPTGTVQLDLSKAQFHSGLYTEACFVLAEGWFEDQVFHVNAFGFPPTEPSSTTRAYYGNINFFGGPSNTSVKTSAKLKQLEEENKDAMFVFLSDVWLDQVEVLEKLRIMFAGYSPAPPTCFILCGNFSSAPYGKNQVQALKDSLKTLADIICEYPDIHQSSRFVFVPGPEDPGFGSILPRPPLAESITNEFRQRVPFSVFTTNPCRIQYCTQEITVFREDLVNKMCRNCVRFPSSNLAIPNHFVKTILSQGHLTPLPLYVCPVYWAYDYALRVYPVPDLLVIADKYDPFTTTNTECLCINPVRM

SEQ ID NO: 58455 - protein, 147 aa, Homo sapiens
MAERPEDLNLPNAVITRIIKEALPDGVNISKEARSAISRAASVFVLYATSCANNFAMKGKRKTLNASDVLSAMEEMEFQRFVTPLKEALEAYRREQKGKKEASEQKKKDKDKKTDSEEQDKSRDEDNDEDEERLEEEEQNEEEEVDN

SEQ ID NO: 58456 - protein, 147 aa, Homo sapiens; identical to SEQ ID NO: 58455

SEQ ID NO: 58457 - protein, 414 aa, Homo sapiens
MATGQDRVVALVDMDCFFVQVEQRQNPHLRNKPCAVVQYKSWKGGGIIAVSYEARAFGVTRSMWADDAKKLCPDLLLAQVRESRGKANLTKYREASVEVMEIMSRFAVIERASIDEAYVDLTSAVQERLQKLQGQPISADLLPSTYIEGLPQGPTTAEETVQKEGMRKQGLFQWLDSLQIDNLTSPDLQLTVGAVIVEEMRAAIERETGFQCSAGISHNKVLAKLACGLNKPNRQTLVSHGSVPQLFSQMPIRKIRSLGGKLGASVIEILGIEYMGELTQFTESQLQSHFGEKNGSWLYAMCRGIEHDPVKPRQLPKTIGCSKNFPGKTALATREQVQWWLLQLAQELEERLTKDRNDNDRVATQLVVSIRVQGDKRLSSLRRCCALTRYDAHKMSHDAFTVIKNCNTSGIQTE

SEQ ID NO: 58458 - protein, 713 aa, Homo sapiens
MATGQDRVVALVDMDCFFVQVEQRQNPHLRNKPCAVVQYKSWKGGGIIAVSYEARAFGVTRSMWADDAKKLCPDLLLAQVRESRGKANLTKYREASVEVMEIMSRFAVIERASIDEAYVDLTSAVQERLQKLQGQPISADLLPSTYIEGLPQGPTTAEETVQKEGMRKQGLFQWLDSLQIDNLTSPDLQLTVGAVIVEEMRAAIERETGFQCSAGISHNKVLAKLACGLNKPNRQTLVSHGSVPQLFSQMPIRKIRSLGGKLGASVIEILGIEYMGELTQFTESQLQSHFGEKNGSWLYAMCRGIEHDPVKPRQLPKTIGCSKNFPGKTALATREQVQWWLLQLAQELEERLTKDRNDNDRVATQLVVSIRVQGDKRLSSLRRCCALTRYDAHKMSHDAFTVIKNCNTSGIQTEWSPPLTMLFLCATKFSASAPSSSTDITSFLSSDPSSLPKVPVTSSEAKTQGSGPAVTATKKATTSLESFFQKAAERQKVKEASLSSLTAPTQAPMSNSPSKPSLPFQTSQSTGTEPFFKQKSLLLKQKQLNNSSVSSPQQNPWSNCKALPNSLPTEYPGCVPVCEGVSKLEESSKATPAEMDLAHNSQSMHASSASKSVLEVTQKATPNPSLLAAEDQVPCEKCGSLVPVWDMPEHMDYHFALELQKSFLQPHSSNPQVVSAVSHQGKRNPKSPLACTNKRPRPEGMQTLESFFKPLTH

SEQ ID NO: 58459 - protein, 72 aa, Homo sapiens
MWADDAKKLCPDLLLAQVRESRGKANLTKYREASVEVMEIMSRFAVIERASIDEAYVDLTSAVQERLQKLQG

SEQ ID NO: 58460 - protein, 651 aa, Homo sapiens
MWADDAKKLCPDLLLAQVRESRGKANLTKYREASVEVMEIMSRFAVIERASIDEAYVDLTSAVQERLQKLQGQPISADLLPSTYIEGLPQGPTTAEETVQKEGMRKQGLFQWLDSLQIDNLTSPDLQLTVGAVIVEEMRAAIERETGFQCSAGISHNKVLAKLACGLNKPNRQTLVSHGSVPQLFSQMPIRKIRSLGGKLGASVIEILGIEYMGELTQFTESQLQSHFGEKNGSWLYAMCRGIEHDPVKPRQLPKTIGCSKNFPGKTALATREQVQWWLLQLAQELEERLTKDRNDNDRVATQLVVSIRVQGDKRLSSLRRCCALTRYDAHKMSHDAFTVIKNCNTSGIQTEWSPPLTMLFLCATKFSASAPSSSTDITSFLSSDPSSLPKVPVTSSEAKTQGSGPAVTATKKATTSLESFFQKAAERQKVKEASLSSLTAPTQAPMSNSPSKPSLPFQTSQSTGTEPFFKQKSLLLKQKQLNNSSVSSPQQNPWSNCKALPNSLPTEYPGCVPVCEGVSKLEESSKATPAEMDLAHNSQSMHASSASKSVLEVTQKATPNPSLLAAEDQVPCEKCGSLVPVWDMPEHMDYHFALELQKSFLQPHSSNPQVVSAVSHQGKRNPKSPLACTNKRPRPEGMQTLESFFKPLTH

SEQ ID NO: 58461 - protein, 1239 aa, Homo sapiens
MSRLLWRKVAGATVGPGPVPAPGRWVSSSVPASDPSDGQRRRQQQQQQQQQQQQQPQQPQVLSSEGGQLRHNPLDIQMLSRGLHEQIFGQGGEMPGEAAVRRSVEHLQKHGLWGQPAVPLPDVELRLPPLYGDNLDQHFRLLAQKQSLPYLEAANLLLQAQLPPKPPAWAWAEGWTRYGPEGEAVPVAIPEERALVFDVEVCLAEGTCPTLAVAISPSAWYSWCSQRLVEERYSWTSQLSPADLIPLEVPTGASSPTQRDWQEQLVVGHNVSFDRAHIREQYLIQGSRMRFLDTMSMHMAISGLSSFQRSLWIAAKQGKHKVQPPTKQGQKSQRKARRGPAISSWDWLDISSVNSLAEVHRLYVGGPPLEKEPRELFVKGTMKDIRENFQDLMQYCAQDVWATHEVFQQQLPLFLERCPHPVTLAGMLEMGVSYLPVNQNWERYLAEAQGTYEELQREMKKSLMDLANDACQLLSGERYKEDPWLWDLEWDLQEFKQKKAKKVKKEPATASKLPIEGAGAPGDPMDQEDLGPCSEEEEFQQDVMARACLQKLKGTTELLPKRPQHLPGHPGWYRKLCPRLDDPAWTPGPSLLSLQMRVTPKLMALTWDGFPLHYSERHGWGYLVPGRRDNLAKLPTGTTLESAGVVCPYRAIESLYRKHCLEQGKQQLMPQEAGLAEEFLLTDNSAIWQTVEELDYLEVEAEAKMENLRAAVPGQPLALTARGGPKDTQPSYHHGNGPYNDVDIPGCWFFKLPHKDGNSCNVGSPFAKDFLPKMEDGTLQAGPGGASGPRALEINKMISFWRNAHKRISSQMVVWLPRSALPRAVIRHPDYDEEGLYGAILPQVVTAGTITRRAVEPTWLTASNARPDRVGSELKAMVQAPPGYTLVGADVDSQELWIAAVLGDAHFAGMHGCTAFGWMTLQGRKSRGTDLHSKTATTVGISREHAKIFNYGRIYGAGQPFAERLLMQFNHRLTQQEAAEKAQQMYAATKGLRWYRLSDEGEWLVRELNLPVDRTEGGWISLQDLRKVQRETARKSQWKKWEVVAERAWKGGTESEMFNKLESIATSDIPRTPVLGCCISRALEPSAVQEEFMTSRVNWVVQSSAVDYLHLMLVAMKWLFEEFAIDGRFCISIHDEVRYLVREEDRYRAALALQITNLLTRCMFAYKLGLNDLPQSVAFFSAVDIDRCLRKEVTMDCKTPSNPTGMERRYGIPQGEALDIYQIIELTKGSLEKRSQPGP

SEQ ID NO: 58462 - protein, 1239 aa, Homo sapiens; identical to SEQ ID NO: 58461

SEQ ID NO: 58463 - protein, 485 aa, Homo sapiens
MRSRVAVRACHKVCRCLLSGFGGRVDAGQPELLTERSSPKGGHVKSHAELEGNGEHPEAPGSGEGSEALLEICQRRHFLSGSKQQLSRDSLLSGCHPGFGPLGVELRKNLAAEWWTSVVVFREQVFPVDALHHKPGPLLPGDSAFRLVSAETLREILQDKELSKEQLVAFLENVLKTSGKLRENLLHGALEHYVNCLDLVNKRLPYGLAQIGVCFHPVFDTKQIRNGVKSIGEKTEASLVWFTPPRTSNQWLDFWLRHRLQWWRKFAMSPSNFSSSDCQDEEGRKGNKLYYNFPWGKELIETLWNLGDHELLHMYPGNVSKLHGRDGRKNVVPCVLSVNGDLDRGMLAYLYDSFQLTENSFTRKKNLHRKVLKLHPCLAPIKVALDVGRGPTLELRQVCQGLFNELLENGISVWPGYLETMQSSLEQLYSKYDEMSILFTVLVTETTLENGLIHLRSRDTTMKEMMHISKLKDFLIKYISSAKNV

SEQ ID NO: 58464 - protein, 2590 aa, Homo sapiens
MNLLRRSGKRRRSESGSDSFSGSGGDSSASPQFLSGSVLSPPPGLGRCLKAAAAGECKPTVPDYERDKLLLANWGLPKAVLEKYHSFGVKKMFEWQAECLLLGQVLEGKNLVYSAPTSAGKTLVAELLILKRVLEMRKKALFILPFVSVAKEKKYYLQSLFQEVGIKVDGYMGSTSPSRHFSSLDIAVCTIERANGLINRLIEENKMDLLGMVVVDELHMLGDSHRGYLLELLLTKICYITRKSASCQADLASSLSNAVQIVGMSATLPNLELVASWLNAELYHTDFRPVPLLESVKVGNSIYDSSMKLVREFEPMLQVKGDEDHVVSLCYETICDNHSVLLFCPSKKWCEKLADIIAREFYNLHHQAEGLVKPSECPPVILEQKELLEVMDQLRRLPSGLDSVLQKTVPWGVAFHHAGLTFEERDIIEGAFRQGLIRVLAATSTLSSGVNLPARRVIIRTPIFGGRPLDILTYKQMVGRAGRKGVDTVGESILICKNSEKSKGIALLQGSLKPVRSCLQRREGEEVTGSMIRAILEIIVGGVASTSQDMHTYAACTFLAASMKEGKQGIQRNQESVQLGAIEACVMWLLENEFIQSTEASDGTEGKVYHPTHLGSATLSSSLSPADTLDIFADLQRAMKGFVLENDLHILYLVTPMFEDWTTIDWYRFFCLWEKLPTSMKRVAELVGVEEGFLARCVKGKVVARTERQHRQMAIHKRFFTSLVLLDLISEVPLREINQKYGCNRGQIQSLQQSAAVYAGMITVFSNRLGWHNMELLLSQFQKRLTFGIQRELCDLVRVSLLNAQRARVLYASGFHTVADLARANIVEVEVILKNAVPFKSARKAVDEEEEAVEERRNMRTIWVTGRKGLTEREAAALIVEEARMILQQDLVEMGVQWNPCALLHSSTCSLTHSESEVKEHTFISQTKSSYKKLTSKNKSNTIFSDSYIKHSPNIVQDLNKSREHTSSFNCNFQNGNQEHQTCSIFRARKRASLDINKEKPGASQNEGKTSDKKVVQTFSQKTKKAPLNFNSEKMSRSFRSWKRRKHLKRSRDSSPLKDSGACRIHLQGQTLSNPSLCEDPFTLDEKKTEFRNSGPFAKNVSLSGKEKDNKTSFPLQIKQNCSWNITLTNDNFVEHIVTGSQSKNVTCQATSVVSEKGRGVAVEAEKINEVLIQNGSKNQNVYMKHHDIHPINQYLRKQSHEQTSTITKQKNIIERQMPCEAVSSYINRDSNVTINCERIKLNTEENKPSHFQALGDDISRTVIPSEVLPSAGAFSKSEGQHENFLNISRLQEKTGTYTTNKTKNNHVSDLGLVLCDFEDSFYLDTQSEKIIQQMATENAKLGAKDTNLAAGIMQKSLVQQNSMNSFQKECHIPFPAEQHPLGATKIDHLDLKTVGTMKQSSDSHGVDILTPESPIFHSPILLEENGLFLKKNEVSVTDSQLNSFLQGYQTQETVKPVILLIPQKRTPTGVEGECLPVPETSLNMSDSLLFDSFSDDYLVKEQLPDMQMKEPLPSEVTSNHFSDSLCLQEDLIKKSNVNENQDTHQQLTCSNDESIIFSEMDSVQMVEALDNVDIFPVQEKNHTVVSPRALELSDPVLDEHHQGDQDGGDQDERAEKSKLTGTRQNHSFIWSGASFDLSPGLQRILDKVSSPLENEKLKSMTINFSSLNRKNTELNEEQEVISNLETKQVQGISFSSNNEVKSKIEMLENNANHDETSSLLPRKESNIVDDNGLIPPTPIPTSASKLTFPGILETPVNPWKTNNVLQPGESYLFGSPSDIKNHDLSPGSRNGFKDNSPISDTSFSLQLSQDGLQLTPASSSSESLSIIDVASDQNLFQTFIKEWRCKKRFSISLACEKIRSLTSSKTATIGSRFKQASSPQEIPIRDDGFPIKGCDDTLVVGLAVCWGGRDAYYFSLQKEQKHSEISASLVPPSLDPSLTLKDRMWYLQSCLRKESDKECSVVIYDFIQSYKILLLSCGISLEQSYEDPKVACWLLDPDSQEPTLHSIVTSFLPHELPLLEGMETSQGIQSLGLNAGSEHSGRYRASVESILIFNSMNQLNSLLQKENLQDVFRKVEMPSQYCLALLELNGIGFSTAECESQKHIMQAKLDAIETQAYQLAGHSFSFTSSDDIAEVLFLELKLPPNREMKNQGSKKTLGSTRRGIDNGRKLRLGRQFSTSKDVLNKLKALHPLPGLILEWRRITNAITKVVFPLQREKCLNPFLGMERIYPVSQSHTATGRITFTEPNIQNVPRDFEIKMPTLVGESPPSQAVGKGLLPMGRGKYKKGFSVNPRCQAQMEERAADRGMPFSISMRHAFVPFPGGSILAADYSQLELRILAHLSHDRRLIQVLNTGADVFRSIAAEWKMIEPESVGDDLRQQAKQICYGIIYGMGAKSLGEQMGIKENDAACYIDSFKSRYTGINQFMTETVKNCKRDGFVQTILGRRRYLPGIKDNNPYRKAHAERQAINTIVQGSAADIVKIATVNIQKQLETFHSTFKSHGHREGMLQSDQTGLSRKRKLQGMFCPIRGGFFILQLHDELLYEVAEEDVVQVAQIVKNEMESAVKLSVKLKVKVKIGASWGELKDFDV

SEQ ID NO: 58465 - protein, 2726 aa, Homo sapiens
MNGHRFTFRTRSLLPLQKGQHRCITKLLAHNDPWGIFRAPSSRRSYSVSGVCQPAIPNSSLHIPHNACWLKWKLCSEIALPYHHILGERRKLCSIRRFEFEDWREDVRSCCQARVLPRGRTLGLWLALIGREEFAMNLLRRSGKRRRSESGSDSFSGSGGDSSASPQFLSGSVLSPPPGLGRCLKAAAAGECKPTVPDYERDKLLLANWGLPKAVLEKYHSFGVKKMFEWQAECLLLGQVLEGKNLVYSAPTSAGKTLVAELLILKRVLEMRKKALFILPFVSVAKEKKYYLQSLFQEVGIKVDGYMGSTSPSRHFSSLDIAVCTIERANGLINRLIEENKMDLLGMVVVDELHMLGDSHRGYLLELLLTKICYITRKSASCQADLASSLSNAVQIVGMSATLPNLELVASWLNAELYHTDFRPVPLLESVKVGNSIYDSSMKLVREFEPMLQVKGDEDHVVSLCYETICDNHSVLLFCPSKKWCEKLADIIAREFYNLHHQAEGEGLVKPSECPPVILEQKELLEVMDQLRRLPSGLDSVLQKTVPWGVAFHHAGLTFEERDIIEGAFRQGLIRVLAATSTLSSGVNLPARRVIIRTPIFGGRPLDILTYKQMVGRAGRKGVDTVESILICKNSEKSKGIALLQGSLKPVRSCLQRREGEEVTGSMIRAILEIIVGGVASTSQDMHTYAACTFLAASMKEGKQGIQRNQESVQLGAIEACVMWLLENEFIQSTEASDGTEGKVYHPTHLGSATLSSSLSPADTLDIFADLQRAMKGFVLENDLHILYLVTPMFEDWTTIDWYRFFCLWEKLPTSMKRVAELVGVEEGFLARCVKGKVVARTERQHRQMAIHKRFFTSLVLLDLISEVPLREINQKYGCNRGQIQSLQQSAAVYAGMITVFSNRLGWHNMELLLSQFQKRLTFGIQRELCDLVRVSLLNAQRARVLYASGFHTVADLARANIVEVEVILKNAVPFKSARKAVDEEEEAVEERRNMRTIWVTGRKGLTEREAAALIVEEARMILQQDLVEMGVQWNPCALLHSSTCSLTHSESEVKEHTFISQTKSSYKKLTSKNKSNTIFSDSYIKHSPNIVQDLNKSREHTSSFNCNFQNGNQEHQTCSIFRARKRASLDINKEKPGASQNEGKTSDKKVVQTFSQKTKKAPLNFNSEKMSRSFRSWKRRKHLKRSRDSSPLKDSGACRIHLQGQTLSNPSLCEDPFTLDEKKTEFRNSGPFAKNVSLSGKEKDNKTSFPLQIKQNCSWNITLTNDNFVEHIVTGSQSKNVTCQATSVVSEKGRGVAVEAEKINEVLIQNGSKNQNVYMKHHDIHPINQYLRKQSHEQTSTITKQKNIIERQMPCEAVSSYINRDSNVTINCERIKLNTEENKPSHFQALGDDISRTVIPSEVLPSAGAFSKSEGQHENFLNISRLQEKTGTYTTNKTKNNHVSDLGLVLCDFEDSFYLDTQSEKIIQQMATENAKLGAKDTNLAAGIMQKSLVQQNSMNSFQKECHIPFPAEQHPLGATKIDHLDLKTVGTMKQSSDSHGVDILTPESPIFHSPILLEENGLFLKKNEVSVTDSQLNSFLQGYQTQETVKPVILLIPQKRTPTGVEGECLPVPETSLNMSDSLLFDSFSDDYLVKEQLPDMQMKEPLPSEVTSNHFSDSLCLQEDLIKKSNVNENQDTHQQLTCSNDESIIFSEMDSVQMVEALDNVDIFPVQEKNHTVVSPRALELSDPVLDEHHQGDQDGGDQDERAEKSKLTGTRQNHSFIWSGASFDLSPGLQRILDKVSSPLENEKLKSMTINFSSLNRKNTELNEEQEVISNLETKQVQGISFSSNNEVKSKIEMLENNANHDETSSLLPRKESNIVDDNGLIPPTPIPTSASKLTFPGILETPVNPWKTNNVLQPGESYLFGSPSDIKNHDLSPGSRNGFKDNSPISDTSFSLQLSQDGLQLTPASSSSESLSIIDVASDQNLFQTFIKEWRCKKRFSISLACEKIRSLTSSKTATIGSRFKQASSPQEIPIRDDGFPIKGCDDTLVVGLAVCWGGRDAYYFSLQKEQKHSEISASLVPPSLDPSLTLKDRMWYLQSCLRKESDKECSVVIYDFIQSYKILLLSCGISLEQSYEDPKVACWLLDPDSQEPTLHSIVTSFLPHELPLLEGMETSQGIQSLGLNAGSEHSGRYRASVESILIFNSMNQLNSLLQKENLQDVFRKVEMPSQYCLALLELNGIGFSTAECESQKHIMQAKLDAIETQAYQLAGHSFSFTSSDDIAEVLFLELKLPPNREMKNQGSKKTLGSTRRGIDNGRKLRLGRQFSTSKDVLNKLKALHPLPGLILEWRRITNAITKVVFPLQREKCLNPFLGMERIYPVSQSHTATGRITFTEPNIQNVPRDFEIKMPTLVGESPPSQAVGKGLLPMGRGKYKKGFSVNPRCQAQMEERAADRGMPFSISMRHAFVPFPGGSILAADYSQLELRILAHLSHDRRLIQVLNTGADVFRSIAAEWKMIEPESVGDDLRQQAKQICYGIIYGMGAKSLGEQMGIKENDAACYIDSFKSRYTGINQFMTETVKNCKRDGFVQTILGRRRYLPGIKDNNPYRKAHAERQAINTIVQGSAADIVKIATVNIQKQLETFHSTFKSHGHREGMLQSDQTGLSRKRKLQGMFCPIRGGFFILQLHDELLYEVAEEDVVQVAQIVKNEMESAVKLSVKLKVKVKIGASWGELKDFDV

SEQ ID NO: 58466 - protein, 2213 aa, Homo sapiens
MPTSNSQKELLEVMDQLRRLPSGLDSVLQKTVPWGVAFHHAGLTFEERDIIEGAFRQGLIRVLAATSTLSSGVNLPARRVIIRTPIFGGRPLDILTYKQMVGRAGRKGVDTVGESILICKNSEKSKGIALLQGSLKPVRSCLQRREGEEVTGSMIRAILEIIVGGVASTSQDMHTYAACTFLAASMKEGKQGIQRNQESVQLGAIEACVMWLLENEFIQSTEASDGTEGKVYHPTHLGSATLSSSLSPADTLDIFADLQRAMKGFVLENDLHILYLVTPMFEDWTTIDWYRFFCLWEKLPTSMKRVAELVGVEEGFLARCVKGKVVARTERQHRQMAIHKRFFTSLVLLDLISEVPLREINQKYGCNRGQIQSLQQSAAVYAGMITVFSNRLGWHNMELLLSQFQKRLTFGIQRELCDLVRVSLLNAQRARVLYASGFHTVADLARANIVEVEVILKNAVPFKSARKAVDEEEEAVEERRNMRTIWVTGRKGLTEREAAALIVEEARMILQQDLVEMGVQWNPCALLHSSTCSLTHSESEVKEHTFISQTKSSYKKLTSKNKSNTIFSDSYIKHSPNIVQDLNKSREHTSSFNCNFQNGNQEHQTCSIFRARKRASLDINKEKPGASQNEGKTSDKKVVQTFSQKTKKAPLNFNSEKMSRSFRSWKRRKHLKRSRDSSPLKDSGACRIHLQGQTLSNPSLCEDPFTLDEKKTEFRNSGPFAKNVSLSGKEKDNKTSFPLQIKQNCSWNITLTNDNFVEHIVTGSQSKNVTCQATSVVSEKGRGVAVEAEKINEVLIQNGSKNQNVYMKHHDIHPINQYLRKQSHEQTSTITKQKNIIERQMPCEAVSSYINRDSNVTINCERIKLNTEENKPSHFQALGDDISRTVIPSEVLPSAGAFSKSEGQHENFLNISRLQEKTGTYTTNKTKNNHVSDLGLVLCDFEDSFYLDTQSEKIIQQMATENAKLGAKDTNLAAGIMQKSLVQQNSMNSFQKECHIPFPAEQHPLGATKIDHLDLKTVGTMKQSSDSHGVDILTPESPIFHSPILLEENGLFLKKNEVSVTDSQLNSFLQGYQTQETVKPVILLIPQKRTPTGVEGECLPVPETSLNMSDSLLFDSFSDDYLVKEQLPDMQMKEPLPSEVTSNHFSDSLCLQEDLIKKSNVNENQDTHQQLTCSNDESIIFSEMDSVQMVEALDNVDIFPVQEKNHTVVSPRALELSDPVLDEHHQGDQDGGDQDERAEKSKLTGTRQNHSFIWSGASFDLSPGLQRILDKVSSPLENEKLKSMTINFSSLNRKNTELNEEQEVISNLETKQVQGISFSSNNEVKSKIEMLENNANHDETSSLLPRKESNIVDDNGLIPPTPIPTSASKLTFPGILETPVNPWKTNNVLQPGESYLFGSPSDIKNHDLSPGSRNGFKDNSPISDTSFSLQLSQDGLQLTPASSSSESLSIIDVASDQNLFQTFIKEWRCKKRFSISLACEKIRSLTSSKTATIGSRFKQASSPQEIPIRDDGFPIKGCDDTLVVGLAVCWGGRDAYYFSLQKEQKHSEISASLVPPSLDPSLTLKDRMWYLQSCLRKESDKECSVVIYDFIQSYKILLLSCGISLEQSYEDPKVACWLLDPDSQEPTLHSIVTSFLPHELPLLEGMETSQGIQSLGLNAGSEHSGRYRASVESILIFNSMNQLNSLLQKENLQDVFRKVEMPSQYCLALLELNGIGFSTAECESQKHIMQAKLDAIETQAYQLAGHSFSFTSSDDIAEVLFLELKLPPNREMKNQGSKKTLGSTRRGIDNGRKLRLGRQFSTSKDVLNKLKALHPLPGLILEWRRITNAITKVVFPLQREKCLNPFLGMERIYPVSQSHTATGRITFTEPNIQNVPRDFEIKMPTLVGESPPSQAVGKGLLPMGRGKYKKGFSVNPRCQAQMEERAADRGMPFSISMRHAFVPFPGGSILAADYSQLELRILAHLSHDRRLIQVLNTGADVFRSIAAEWKMIEPESVGDDLRQQAKQICYGIIYGMGAKSLGEQMGIKENDAACYIDSFKSRYTGINQFMTETVKNCKRDGFVQTILGRRRYLPGIKDNNPYRKAHAERQAINTIVQGSAADIVKIATVNIQKQLETFHSTFKSHGHREGMLQSDQTGLSRKRKLQGMFCPIRGGFFILQLHDELLYEVAEEDVVQVAQIVKNEMESAVKLSVKLKVKVKIGASWGELKDFDV

SEQ ID NO: 58467 - protein, 79 aa, Homo sapiens
MGRKRLITDSYPVVKRREGPAGHSKGELAPELGEEPQPRDEEEAELELLRQFDLAWQYGPCTVSGISIPYEAPRKTSCP

SEQ ID NO: 58468 - protein, 107 aa, Homo sapiens
MGRKRLITDSYPVVKRREGPAGHSKGELAPELGEEPQPRDEEEAELELLRQFDLAWQYGPCTGITRLQRWCRAKQMGLEPPPEVWQVLKTHPGDPRFQCSLWHLYPL

SEQ ID NO: 58469 - protein, 34 aa, Homo sapiens
MGRKRLITDSYPVVKRREGPAGHSKGELAPELGL

SEQ ID NO: 58470 - protein, 421 aa, Homo sapiens
MADISLDELIRKRGAAAKGRLNARPGVGGVRSRVGIQQGLLSQSTRTATFQQRFDARQKIGLSDARLKLGVKDAREKLLQKDARFRIKGKVQDAREMLNSRKQQTTVPQKPRQVADAREKISLKRSSPAAFINPPIGTVTPALKLTKTIQVPQQKAMAPLHPHPAGMRINVVNNHQAKQNLYDLDEDDDGIASVPTKQMKFAASGGFLHHMAGLSSSKLSMSKALPLTKVVQNDAYTAPALPSSIRTKALTNMSRTLVNKEEPPKELPAAEPVLSPLEGTKMTVNNLHPRVTEEDIVELFCVCGALKRARLVHPGVAEVVFVKKDDAITAYKKYNNRCLDGQPMKCNLHMNGNVITSDQPILLRLSDSPSMKKESELPRRVNSASSSNPPAEVDPDTILKALFKSSGASVTTQPTEFKIKL

SEQ ID NO: 58471 - protein, 185 aa, Homo sapiens
MADISLDELIRKRGAAAKGRLNARPGVGGVRSRVGIQQGLLSQSTRTATFQQRFDARQKIGLSDARLKLGVKDAREKLLQKDARFRIKGKVQDAREMLNSRKQQTTVPQKPRQVADAREKISLKRSSPAAFINPPIGTVTPALKLTKTIQVGLRAVPLLCLVSGGAWVGSRSQASCPLPSGSRPH

SEQ ID NO: 58472 - protein, 392 aa, Homo sapiens
MADISLDELIRKRGAAAKGRLNARPGVGGVRSRVGIQQGLLSQSTRTATFQQRFDARQKIGLSDARLKLGVKDAREKLLQKDARFRIKGKVQDAREMLNSRKQQTTVPQKPRQVADAREKISLKRSSPAAFINPPIGTVTPALKLTKTIQNLYDLDEDDDGIASVPTKQMKFAASGGFLHHMAGLSSSKLSMSKALPLTKVVQNDAYTAPALPSSIRTKALTNMSRTLVNKEEPPKELPAAEPVLSPLEGTKMTVNNLHPRVTEEDIVELFCVCGALKRARLVHPGVAEVVFVKKDDAITAYKKYNNRCLDGQPMKCNLHMNGNVITSDQPILLRLSDSPSMKKESELPRRVNSASSSNPPAEVDPDTILKALFKSSGASVTTQPTEFKIKL

SEQ ID NO: 58473 - protein, 229 aa, Homo sapiens [sequence omitted]

SEQ ID NO: 58474 - protein, 186 aa, Homo sapiens
MAPLHPHPAGMRINVVNNHQAKQNLYDLDEDDDGIASVPTKQMKFAASGGFLHHMAGLSSSKLSMSKALPLTKVVQNDAYTAPALPSSIRTKALTNMSRTLVNKEEPPKELPAAEPVLSPLEGTKMTVNNLHPRVTEEDIVELFCVCGALKRARLVHPGVAEVVFVKKDDAITAYKKYNNRCLDGG

SEQ ID NO: 58475 - protein, 184 aa, Homo sapiens
MADISLDELIRKRGAAAKGRLNARPGVGGVRSRVGIQQGLLSQSTRTATFQQRFDARQKIGLSDARLKLGVKDAREKLLQKDARFRIKGKVQDAREMLNSRKQQTTVPQKPRQVADAREKISLKRSSPAAFINPPIGTVTPALKLTKTIQVPSFPCPRPSLSPKWFRMMHTQLLLSLPLFEQKP

SEQ ID NO: 58476 - protein, 117 aa, Homo sapiens
MAAAAAAGSGTPREEEGPAGEAAASQPQAPTSVPGARLSRLPLARVKALVKADPDVTLAGQEAIFILARAAELFVETIAKDAYCCAQQGKRKTLQRRDLDNAIEAVDEFAFLEGTLD

SEQ ID NO: 58477 - protein, 342 aa, Homo sapiens
MAASQAVEEMRSRVVLGEFGVRNVHTTDFPGNYSGYDDAWDQDRFEKNFRVDVVHMDENSLEFDMVGIDAAIANAFRRILLAEVPTMAVEKVLVYNNTSIVQDEILAHRLGLIPIHADPRLFEYRNQGDEEGTEIDTLQFRLQVRCTRNPHAAKDSSDPNELYVNHKVYTRHMTWIPLGNQADLFPEGTIRPVHDDILIAQLRPGQEIDLLMHCVKGIGKDHAKFSPVATASYRLLPDITLLEPVEGEAAEELSRCFSPGVIEVQEVQGKKVARVANPRLDTFSREIFRNEKLKKVVRLARVRDHYICKKDLLAAVAHTCNPSTLGGQGEWITGSRERDHPG

SEQ ID NO: 58478 - protein, 210 aa, Homo sapiens
MAVEKVLVYNNTSIVQDEILAHRLGLIPIHADPRLFEYRNQGDEEGTEIDTLQFRLQVRCTRNPHAAKDSSDPNELYVNHKVYTRHMTWIPLGNQADLFPEGTIRPVHDDILIAQLRPGQEIDLLMHCVKGIGKKVARVANPRLDTFSREIFRNEKLKKVVRLARVRDHYIFSVESTGVLPPDVLVSEAIKVLMGKCRRFLDELDAVQMD

SEQ ID NO: 58479 - protein, 346 aa, Homo sapiens
MAASQAVEEMRSRVVLGEFGVRNVHTTDFPGNYSGYDDAWDQDRFEKNFRVDVVHMDENSLEFDMVGIDAAIANAFRRILLAEVPTMAVEKVLVYNNTSIVQDEILAHRLGLIPIHADPRLFEYRNQGDEEGTEIDTLQFRLQVRCTRNPHAAKDSSDPNELYVNHKVYTRHMTWIPLGNQADLFPEGTIRPVHDDILIAQLRPGQEIDLLMHCVKGIGKDHAKFSPVATASYRLLPDITLLEPVEGEAAEELSRCFSPGVIEVQEVQGKKVARVANPRLDTFSREIFRNEKLKKVVRLARVRDHYIFSVESTGVLPPDVLVSEAIKVLMGKCRRFLDELDAVQMD

SEQ ID NO: 58480 - protein, 122 aa, Homo sapiens
MEEDQELERKAIEELLKEAKRGKTRAETMGPMGWMKCPLASTNKRFLINTIKNTLPSHKEQDHEQKEGDKEPAKSQAQKEENPKKHRSHPYKHSFRARGSASYSPPRKRSSQDKYEKRSNRR

SEQ ID NO: 58481 - protein, 133 aa, Homo sapiens
MEEDQELERKISGLKTSMAEGERKTALEMVQAAGTDRHCVTFVLHEEDHTLGNSLRYMIMKNPEVEFCGYTTTHPSESKINLRIQTRGTLPAVEPFQRGLNELMNVCQHVLDKFEASIKDYKDQKASRNESTF

SEQ ID NO: 58482 - protein, 133 aa, Homo sapiens; identical to SEQ ID NO: 58481

SEQ ID NO: 58483 - protein, 1970 aa, Homo sapiens
MHGGGPPSGDSACPLRTIKRVQFGVLSPDELKRMSVTEGGIKYPETTEGGRPKLGGLMDPRQGVIERTGRCQTCAGNMTECPGHFGHIELAKPVFHVGFLVKTMKVLRCVCFFCSKLLVDSNNPKIKDILAKSKGQPKKRLTHVYDLCKGKNICEGGEEMDNKFGVEQPEGDEDLTKEKGHGGCGRYQPRIRRSGLELYAEWKHVNEDSQEKKILLSPERVHEIFKRISDEECFVLGMEPRYARPEWMIVTVLPVPPLSVRPAVVMQGSARNQDDLTHKLADIVKINNQLRRNEQNGAAAHVIAEDVKLLQFHVATMVDNELPGLPRAMQKSGRPLKSLKQRLKGKEGRVRGNLMGKRVDFSARTVITPDPNLSIDQVGVPRSIAANMTFAEIVTPFNIDRLQELVRRGNSQYPGAKYIIRDNGDRIDLRFHPKPSDLHLQTGYKVERHMCDGDIVIFNRQPTLHKMSMMGHRVRILPWSTFRLNLSVTTPYNADFDGDEMNLHLPQSLETRAEIQELAMVPRMIVTPQSNRPVMGIVQDTLTAVRKFTKRDVFLERGEVMNLLMFLSTWDGKVPQPAILKPRPLWTGKQIFSLIIPGHINCIRTHSTHPDDEDSGPYKHISPGDTKVVVENGELIMGILCKKSLGTSAGSLVHISYLEMGHDITRLFYSNIQTVINNWLLIEGHTIGIGDSIADSKTYQDIQNTIKKAKQDVIEVIEKAHNNELEPTPGNTLRQTFENQVNRILNDARDKTGSSAQKSLSEYNNFKSMVVSGAKGSKINISQVIAVVGQQNVEGKRIPFGFKHRTLPHFIKDDYGPESRGFVENSYLAGLTPTEFFFHAMGGREGLIDTAVKTAETGYIQRRLIKSMESVMVKYDATVRNSINQVVQLRYGEDGLAGESVEFQNLATLKPSNKAFEKKFRFDYTNERALRRTLQEDLVKDVLSNAHIQNELEREFERMREDREVLRVIFPTGDSKVVLPCNLLRMIWNAQKIFHINPRLPSDLHPIKVVEGVKELSKKLVIVNGDDPLSRQAQENATLLFNIHLRSTLCSRRMAEEFRLSGEAFDWLLGEIESKFNQAIAHPGEMVGALAAQSLGEPATQMTLNTFHYAGVSAKNVTLGVPRLKELINISKKPKTPSLTVFLLGQSARDAERAKDILCRLEHTTLRKVTANTAIYYDPNPQSTVVAEDQEWVNVYYEMPDFDVARISPWLLRVELDRKHMTDRKLTMEQIAEKINAGFGDDLNCIFNDDNAEKLVLRIRIMNSDENKMQEEEEVVDKMDDDVFLRCIESNMLTDMTLQGIEQISKVYMHLPQTDNKKKIIITEDGEFKALQEWILETDGVSLMRVLSEKDVDPVRTTSNDIVEIFTVLGIEAVRKALERELYHVISFDGSYVNYRHLALLCDTMTCRGHLMAITRHGVNRQDTGPLMKCSFEETVDVLMEAAAHGESDPMKGVSENIMLGQLAPAGTGCFDLLLDAEKCKYGMEIPTNIPGLGAAGPTGMFFGSAPSPMGGISPAMTPWNQGATPAYGAWSPSVGSGMTPGAAGFSPSAASDASGFSPGYSPAWSPTPGSPGSPGPSSPYIPSPGGAMSPSYSPTSPAYEPRSPGGYTPQSPSYSPTSPSYSPTSPSYSPTSPNYSPTSPSYSPTSPSYSPTSPSYSPTSPSYSPTSPSYSPTSPSYSPTSPSYSPTSPSYSPTSPSYSPTSPSYSPTSPSYSPTSPSYSPTSPSYSPTSPSYSPTSPSYSPTSPNYSPTSPNYTPTSPSYSPTSPSYSPTSPNYTPTSPNYSPTSPSYSPTSPSYSPTSPSYSPSSPRYTPQSPTYTPSSPSYSPSSPSYSPASPKYTPTSPSYSPSSPEYTPTSPKYSPTSPKYSPTSPKYSPTSPTYSPTTPKYSPTSPTYSPTSPVYTPTSPKYSPTSPTYSPTSPKYSPTSPTYSPTSPKGSTYSPTSPGYSPTSPTYSLTSPAISPDDSDEEN

SEQ ID NO: 58484 - protein, 275 aa, Homo sapiens
MPYANQPTVRITELTDENVKFIIENTDLAVANSIRRVFIAEVPIIAIDWVQIDANSSVLHDEFIAHRLGLIPLISDDIVDKLQYSRDCTCEEFCPECSVEFTLDVRCNEDQTRHVTSRDLISNSPRVIPVTSRNRDNDPNDYVEQDDILIVKLRKGQELRLRAYAKKGFGKEHAKWNPTAGVAFEYDPDNALRHTVYPKPEEWPKSEYSELDEDESQAPYDPNGKPERFYYNVESCGSLRPETIVLSALSGLKKKLSDLQTQLSHEIQSDVLTIN

SEQ ID NO: 58485 - protein, 210 aa, Homo sapiens
MDDEEETYRLWKIRKTIMQLCHDRGYLVTQDELDQTLEEFKAQSGDKPSEGRPRRTDLTVLVAHNDDPTDQMFVFFPEEPKVGIKTIKVYCQRMQEENITRALIVVQQGMTPSAKQSLVDMAPKYILEQFLQQELLINITEHELVPEHVVMTKEEVTELLARYKLRENQLPRIQAGDPVARYFGIKRGQVVKIIRPSETAGRYITYRLVQ

SEQ ID NO: 58486 - protein, 126 aa, Homo sapiens
MSDNEDNFDGDDFDDVEEDEGLDDLENAEEEGQENVEILPSGERPQANQKRITTPYMTKYERARVLGTRALQIAMCAPVMVELEGETDPLLIAMKELKLLWGLEYTVLRPSYALAHSLGSFSISSR

SEQ ID NO: 58487 - protein, 158 aa, Homo sapiens
MSDNEDNFDGDDFDDVEEDEGLDDLENAEEEGQENVEILPSGERPQANQKRITTPYMTKYERARVLGTRALQIAMCAPVMVELEGETDPLLIAMKELNARSASEPPGEEPPWMDRGTRDEHLPSCPGCPAVASNTRCCPPAACLPGISLSRRRRLREE

SEQ ID NO: 58488 - protein, 127 aa, Homo sapiens
MSDNEDNFDGDDFDDVEEDEGLDDLENAEEEGQENVEILPSGERPQANQKRITTPYMTKYERARVLGTRALQIAMCAPVMVELEGETDPLLIAMKELKARKIPIIIRRYLPDGSYEDWGVDELIITD

SEQ ID NO: 58489 - protein, 172 aa, Homo sapiens
MFYHISLEHEILLHPRYFGPNLLNTVKQKLFTEVEGTCTGKYGFVIAVTTIDNIGAGVIQPGRGFVLYPVKYKAIVFRPFKGEVVDAVVTQVNKVGLFTEIGPMSCFISRHSIPSEMEFDPNSNPPCYKTMDEDIVIQQDDEIRLKIVGTRVDKNDIFAIGSLMDDYLGLVS

SEQ ID NO: 58490 - protein, 150 aa, Homo sapiens
MAGILFEDIFDVKDIDPEGKKFDRVSRLHCESESFKMDLILDVNIQIYPVDLGDKFRLVIASTLYEDGTLDDGEYNPTDDRPSRADQFEYVMYGKVYRIEGDETSTEAATRLSAYVSYGGLLMRLQGDANNLHGFEVDSRVYLLMKKLAF

SEQ ID NO: 58491 - protein, 12 aa, Homo sapiens
MAGILFEDIFDV

SEQ ID NO: 58492 - protein, 149 aa, Homo sapiens
MAGILFEDIFDVKDIDPEGKKFDRVSRLHCESESFKMDLILDVNIQIYPVDLGDKFRLVIASTLYEDGTLDDGEYNPTDDRPSRADQFEYVMYGKVYRIEGDETSTEAATRLSAYVSYGGLLMRLQGDANNLHGFEVDSRVYLLMKKLA

SEQ ID NO: 58493 - protein, 150 aa, Homo sapiens; identical to SEQ ID NO: 58490

SEQ ID NO: 58494 - protein, 125 aa, Homo sapiens
MEPDGTYEPGFVGIRFCQECNNMLYPKEDKENRILLYACRNCDYQQEADNSCIYVNKITHEVDELTQIIADVSQDPTLPRTEDHPCQKCGHKEAVFFQSHSARAEDAMRLYYVCTAPHCGHRWTE

SEQ ID NO: 58495 - protein, 117 aa, Homo sapiens
MNAPPAFESFLLFEGEKKITINKDTKVPNACLFTINKEDHTLGNIIKSQLLKDPQVLFAGYKVPHPLEHKIIIRVQTTPDYSPQEAFTNAITDLISELSLLEERFRVAIKDKQEGIE

SEQ ID NO: 58496 - protein, 127 aa, Homo sapiens
MNAPPAFESFLLFEGEKKITINKDTKVPNACLFTINKEDHTLGNIIKSQLLKDPQVLFAGYKVPHPLEHKIIIRVQTTPDYSPQEAFTNAITDLISELSLLEERFRVRAGPGGADGVAIKDKQEGIE

SEQ ID NO: 58497 - protein, 116 aa, Homo sapiens
MNAPPAFESFLLFEGEKITINKDTKVPKACLFTINKEDHTLGNIIKSRACFPFAFCRDCQFPEASPATLPVQPAELCPRAHQLCAPALKRHLGGEAHPVHLHAGAASRPVQQPQHL

SEQ ID NO: 58498 - protein, 115 aa, Homo sapiens
MNAPPAFESFLLFEGEKITINKDTKVPKACLFTINKEDHTLGNIIKSQLLKDPQVLFAGYKVPHPLEHKIIIRVQTTPDYSPQEAFTNAITDLISELSLLEERFRTCLLPLRLLP

SEQ ID NO: 58499 - protein, 58 aa, Homo sapiens
MDTQKDVQPPKQQPMIYICGECHTENEIKSRDPIRCRECGYRIMYKKRTKRLVVFDAR

SEQ ID NO: 58500 - protein, 67 aa, Homo sapiens
MIIPVRCFTCGKIVGNKWEAYLGLLQAEYTEGDALDALGLKRYCCRRMLLAHVDLIEKLLNYAPLEK

SEQ ID NO: 58501 - protein, 67 aa, Homo sapiens; identical to SEQ ID NO: 58500

SEQ ID NO: 58502 - protein, 1390 aa, Homo sapiens
MVKEQFRETDVAKKISHICFGMKSPEEMRQQAHIQVVSKNLYSQDNQHAPLLYGVLDHRMGTSEKDRPCETCGKNLADCLGHYGYIDLELPCFHVGYFRAVIGILQMICKTCCHIMLSQEEKKQFLDYLKRPGLTYLQKRGLKKKISDKCRKKNICHHCGAFNGTVKKCGLLKIIHEKYKTNKKVVDPIVSNFLQSFETAIEHNKEVEPLLGRAQENLNPLVVLNLFKRIPAEDVPLLLMNPEAGKPSDLILTRLLVPPLCIRPSVVSDLKSGTNEDDLTMKLTEIIFLNDVIKKHRISGAKTQMIMEDWDFLQLQCALYINSELSGIPLNMAPKKWTRGFVQRLKGKQGRFRGNLSGKRVDFSGRTVISPDPNLRIDEVAVPVHVAKILTFPEKVNKANINFLRKLVQNGPEVHPGANFIQQRHTQMKRFLKYGNREKMAQELKYGDIVERHLIDGDVVLFNRQPSLHKLSIMAHLARVKPHRTFRFNECVCTPYNADFDGDEMNLHLPQTEEAKAEALVLMGTKANLVTPRNGEPLIAAIQDFLTGAYLLTLKDTFFDRAKACQIIASILVGKDEKIKVRLPPPTILKPVTLWTGKQIFSVILRPSDDNPVRANLRTKGKQYCGKGEDLCANDSYVTIQNSELMSGSMDKGTLGSGSKNNIFYILLRDWGQNEAADAMSRLARLAPVYLSNRGFSIGIGDVTPGQGLLKAKYELLNAGYKKCDEYIEALNTGKLQQQPGCTAEETLEALILKELSVIRDHAGSACLRELDKSNSPLTMALCGSKGSFINISQMIACVGQQAISGSRVPDGFENRSLPHFEKHSKLPAAKGFVANSFYSGLTPTEFFFHTMAGREGLVDTAVKTAETGYMQRRLVKSLEDLCSQYDLTVRSSTGDIIQFIYGGDGLDPAAMEGKDEPLEFKRVLDNIKAVFPCPSEPALSKNELILTTESIMKKSEFLCCQDSFLQEIKKFIKGVSEKIKKTRDKYGINDNGTTEPRVLYQLDRITPTQVEKFLETCRDKYMRAQMEPGSAVGALCAQSIGEPGTQMTLKTFHFAGVASMNITLGVPRIKEIINASKAISTPIITAQLDKDDDADYARLVKGRIEKTLLGEISEYIEEVFLPDDCFILVKLSLERIRLLRLEVNAETVRYSICTSKLRVKPGDVAVHGEAVVCVTPRENSKSSMYYVLQFLKEDLPKVVVQGIPEVSRAVIHIDEQSGKEKYKLLVEGDNLRAVMATHGVKGTRTTSNNTYEVEKTLGIEAARTTIINEIQYTMVNHGMSIDRRHVMLLSDLMTYKGEVLGITRFGLAKMKESVLMLASFEKTADHLFDAAYFGQKDSVCGVSECIIMGIPMNIGTGLFKLLHKADRDPNPPKRPLIFDTNEFHIPLVT

SEQ ID NO: 58503 - protein, 162 aa, Homo sapiens [sequence omitted]

SEQ ID NO: 58504 - protein, 1369 aa, Homo sapiens
MVKEQFRETDVAKKISHICFGMKSPEEMRQQAHIQVVSKNLYSQDNQHAPLLYGVLDHRMGTSEKDRPCETCGKNLADCLGHYGYIDLELPCFHVGYFRAVIGILQMICKTCCHIMLSQEEKKQFLDYLKRPGLTYLQKRGLKKKISDKCRKKNICHHCGAFNGTVKKCGLLKIIHEKYKTNKKVVDPIVSNFLQSFETAIEHNKEVEPLLGRAQENLNPLVVLNLFKRIPAEDVPLLLMNPEAGKPSDLILTRLLVPPLCIRPSVVSDLKSGTNEDDLTMKLTEIIFLNDVIKKHRISGAKTQMIMEDWDFLQLQCALYINSELSGIPLNMAPKKWTRGFVQRLKGKQGRFRGNLSGKRVDFSGRTVISPDPNLRIDEVAVPVHVAKILTFPEKVNKANINFLRKLVQNGPEVHPGANFIQQRHTQMKRFLKYGNREKMAQELKYGDIVERHLIDGDVVLFNRQPSLHKLSIMAHLARVKPHRTFRFNECVCTPYNADFDGDEMNLHLPQTEEAKAEALVLMGTKANLVTPRNGEPLIAAIQDFLTGAYLLTLKDTFFDRAKACQIIASILVGKDEKIKVRLPPPTILKPVTLWTGKQIFSVILRPSDDNPVRANLRTKGKQYCGKGEDLCANDSYVTIQNSELMSGSMDKGTLGSGSKNNIFYILLRDWGQNEAADAMSRLARLAPVYLSNRGFSIGIGDVTPGQGLLKAKYELLNAGYKKCDEYIEALNTGKLQQQPGCTAEETLEALILKELSVIRDHAGSACLRELDKSNSPLTMALCGSKGSFINISQMIACVGQQAISGSRVPDGFENRSLPHFEKHSKLPAAKGFVANSFYSGLTPTEFFFHTMAGREGLVDTAVKTAETGYMQRRLVKSLEDLCSQYDLTVRSSTGDIIQFIYGGDGLDPAAMEGKDEPLEFKRVLDNIKAVFPCPSEPALSKNELILTTESIMKKSEFLCCQDSFLQEIKKFIKGVSEKIKKTRDKYGINDNGTTEPRVLYQLDRITPTQVEKFLETCRDKYMRAQMEPGSAVGALCAQRNITLGVPRIKEIINASKAISTPIITAQLDKDDDADYARLVKGRIEKTLLGEISEYIEEVFLPDDCFILVKLSLERIRLLRLEVNAETVRYSICTSKLRVKPGDVAVHGEAVVCVTPRENSKSSMYYVLQFLKEDLPKVVVQGIPEVSRAVIHIDEQSGKEKYKLLVEGDNLRAVMATHGVKGTRTTSNNTYEVEKTLGIEAARTTIINEIQYTMVNHGMSIDRRHVMLLSDLMTYKGEVLGITRFGLAKMKESVLMLASFEKTADHLFDAAYFGQKDSVCGVSECIIMGIPMNIGTGLFKLLHKADRDPNPPKRPLIFDTNEFHIPLVT

SEQ ID NO: 58505 - protein, 1133 aa, Homo sapiens
MDVLAEEFGNLTPEQLAAPIPTVEEKWRLLPAFLKVKGLVKQHIDSFNYFINVEIKKIMKANEKVTSDADPMWYLKYLNIYVGLPDVEESFNVTRPVSPHECRLRDMTYSAPITVDIEYTRGSQRIIRNALPIGRMPIMLRSSNCVLTGKTPAEFAKLNECPLDPGGYFIVKGVEKVILIQEQLSKNRIIVEADRKGAVGASVTSSTHEKKSRTNMAVKQGRFYLRHNTLSEDIPIVIIFKAMGVESDQEIVQMIGTEEHVMAAFGPSLEECQKAQIFTQMQALKYIGNKVRRQRMWGGGPKKTKIEEARELLASTILTHVPVKEFNFRAKCIYTAVMVRRVILAQGDNKVDDRDYYGNKRLELAGQLLSLLFEDLFKKFNSEMKKIADQVIPKQRAAQFDVVKHMRQDQITNGMVNAISTGNWSLKRFKMDRQGVTQVLSRLSYISALGMMTRISSQFEKTRKVSGPRSLQPSQWGMLCPSDTPEGEACGLVKNLALMTHITTDMEDGPIVKLASNLGVEDVNLLCGEELSYPNVFLVFLNGNILGVIRDHKKLVNTFRLMRRAGYINEFVSISTNLTDRCVYISSDGGRLCRPYIIVKKQKPAVTNKHMEELAQGYRNFEDFLHESLVEYLDVNEENDCNIALYEHTINKDTTHLEIEPFTLLGVCAGLIPYPHHNQSPRNTYQCAMGKQAMGTIGYNQRNRIDTLMYLLAYPQKPMVKTKTIELIEFEKLPAGQNATVAVMSYSGYDIEDALVLNKASLDRGFGRCLVYKNAKCTLKRYTNQTFDKVMGPMLDAATRKPIWRHEILDADGICSPGEKVENKQVLVNKSMPTVTQIPLEGSNVPQQPQYKDVPITYKGATDSYIEKVMISSNAEDAFLIKMLLRQTRRPEIGDKFSSRHGQKGVCGLIVPQEDMPFCDSGICPDIIMNPHGFPSRMTVGKLIELLAGKAGVLDGRFHYGTAFGGSKVKDVCEDLVRHGYNYLGKDYVTSGITGEPLEAYIYFGPVYYQKLKHMVLDKMHARARGPRAVLTRQPTEGRSRDGGLRLGEMERDCLIGYGASMLLLERLMISSDAFEVDVCGQCGLLGYSGWCHYCKSSCHVSSLRIPYACKLLFQELQSMNIIPRLKLSKYNE

SEQ ID NO: 58506 - protein, 1075 aa, Homo sapiens
MKANEKVTSDADPMWYLKYLNIYVGLPDVEESFNVTRPVSPHECRLRDMTYSAPITVDIEYTRGSQRIIRNALPIGRMPIMLRSSNCVLTGKTPAEFAKLNECPLDPGGYFIVKGVEKVILIQEQLSKNRIIVEADRKGAVGASVTSSTHEKKSRTNMAVKQGRFYLRHNTLSEDIPIVIIFKAMGVESDQEIVQMIGTEEHVMAAFGPSLEECQKAQIFTQMQALKYIGNKVRRQRMWGGGPKKTKIEEARELLASTILTHVPVKEFNFRAKCIYTAVMVRRVILAQGDNKVDDRDYYGNKRLELAGQLLSLLFEDLFKKFNSEMKKIADQVIPKQRAAQFDVVKHMRQDQITNGMVNAISTGNWSLKRFKMDRQGVTQVLSRLSYISALGMMTRISSQFEKTRKVSGPRSLQPSQWGMLCPSDTPEGEACGLVKNLALMTHITTDMEDGPIVKLASNLGVEDVNLLCGEELSYPNVFLVFLNGNILGVIRDHKKLVNTFRLMRRAGYINEFVSISTNLTDRCVYISSDGGRLCRPYIIVKKQKPAVTNKHMEELAQGYRNFEDFLHESLVEYLDVNEENDCNIALYEHTINKDTTHLEIEPFTLLGVCAGLIPYPHHNQSPRNTYQCAMGKQAMGTIGYNQRNRIDTLMYLLAYPQKPMVKTKTIELIEFEKLPAGQNATVAVMSYSGYDIEDALVLNKASLDRGFGRCLVYKNAKCTLKRYTNQTFDKVMGPMLDAATRKPIWRHEILDADGICSPGEKVENKQVLVNKSMPTVTQIPLEGSNVPQQPQYKDVPITYKGATDSYIEKVMISSNAEDAFLIKMLLRQTRRPEIGDKFSSRHGQKGVCGLIVPQEDMPFCDSGICPDIIMNPHGFPSRMTVGKLIELLAGKAGVLDGRFHYGTAFGGSKVKDVCEDLVRHGYNYLGKDYVTSGITGEPLEAYIYFGPVYYQKLKHMVLDKMHARARGPRAVLTRQPTEGRSRDGGLRLGEMERDCLIGYGASMLLLERLMISSDAFEVDVCGQCGLLGYSGWCHYCKSSCHVSSLRIPYACKLLFQELQSMNIIPRLKLSKYNE

SEQ ID NO: 58507 - protein, 1230 aa, Homo sapiens
MSALCWGRGAAGLKRALRPCGRPGLPGKEGTAGGVCGPRRSSSASPQEQDQDRRKDWGHVELLEVLQARVRQLQAESVSEVVVNRVDVARLPECGSGDGSLQPPRKVQMGAKDATPVPCGRWAKILEKDKRTQQMRMQRLKAKLQMPFQSGEFKALTRRLQVEPRLLSKQMAGCLEDCTRQAPESPWEEQLARLLQEAPGKLSLDVEQAPSGQHSQAQLSGQQQRLLAFFKCCLLTDQLPLAHHLLVVHHGQRQKRKLLTLDMYNAVMLGWARQGAFKELVYVLFMVKDAGLTPDLLSYAAALQCMGRQDQDAGTIERCLEQMSQEGLKLQALFTAVLLSEEDRATVLKAVHKVKPTFSLPPQLPPPVNTSKLLRDVYAKDGRVSYPKLHLPLKTLQCLFEKQLHMELASRVCVVSVEKPTLPSKEVKHARKTLKTLRDQWEKALCRALRETKNRLEREVYEGRFSLYPFLCLLDEREVVRMLLQVLQALPAQGESFTTLARELSARTFSRHVVQRQRVSGQVQALQNHYRKYLCLLASDAEVPEPCLPRQYWEELGAPEALREQPWPLPVQMELGKLLAEMLVQATQMPCSLDKPHRSSRLVPVLYHVYSFRNVQQIGILKPHPAYVQLLEKAAEPTLTFEAVDVPMLCPPLPWTSPHSGAFLLSPTKLMRTVEGATQHQELLETCPPTALHGALDALTQLGNCAWRVNGRVLDLVLQLFQAKGCPQLGVPAPPSEAPQPPEAHLPHSAAPARKAELRRELAHCQKVAREMHSLRAEALYRLSLAQHLRDRVFWLPHNMDFRGRTYPCPPHFNHLGSDVARALLEFAQGRPLGPHGLDWLKIHLVNLTGLKKREPLRKRLAFAEEVMDDILDSADQPLTGRKWWMGAEEPWQTLACCMEVANAVRASDPAAYVSHLPVHQDGSCNGLQHYAALGRDSVGAASVNLEPSDVPQDVYSGVAAQVEVFRRQDAQRGMRVAQVLEGFITRKVVKQTVMTVVYGVTRYGGRLQIEKRLRELSDFPQEFVWEASHYLVRQVFKSLQEMFSGTRAIQHWLTESARLISHMGSVVEWVTPLGVPVIQPYRLDSKVKQIGGGIQSITYTHNGDISRKPNTRKQKNGFPPNFIHSLDSSHMMLTALHCYRKGLTFVSVHDCYWTHAADVSVMNQVCREQFVRLHSEPILQDLSRFLVKRFCSEPQKILEASQLKETLQAVPKPGAFDLEQVKRSTYFFS

SEQ ID NO: 58508 - protein, 390 aa, Homo sapiens
MEDPTLYIVERPLPGYPDAEAPEPSSAGAQAAEEPSGAGSEELIKSDQVNGVLVLSLLDKIIGAVDQIQLTQAQLEERQAEMEGAVQSIQGELSKLGKAHATTSNTVSKLLEKVRKVSVNVKTVRGSLERQAGQIKKLEVNEAELLRRRNFKVMIYQDEVKLPAKLSISKSLKESEALPEKEGEELGEGERPEEDAAALELSSDEAVEVEEVIEESRAERIKRSGLRRVDDFKKAFSKEKMEKTKVRTRENLEKTRLKTKENLEKTRHTLEKRMNKLGTRLVPAERREKLKTSRDKLRKSFTPDHVVYARSKTAVYKVPPFTFHVKKIREGQVEVLKATEMVEVGADDDEGGAERGEAGDLRRGSSPDVHALLEITEESDAVLVDKSDSD

SEQ ID NO: 58509 - protein, 345 aa, Homo sapiens
MEDPTLYIVERPLPGYPDAVDQIQLTQAQLEERQAEMEGAVQSIQGELSKLGKAHATTSNTVSKLLEKVRKVSVNVKTVRGSLERQAGQIKKLEVNEAELLRRRNFKVMIYQDEVKLPAKLSISKSLKESEALPEKEGEELGEGERPEEDAAALELSSDEAVEVEEVIEESRAERIKRSGLRRVDDFKKAFSKEKMEKTKVRTRENLEKTRLKTKENLEKTRHTLEKRMNKLGTRLVPAERREKLKTSRDKLRKSFTPDHVVYARSKTAVYKVPPFTFHVKKIREGQVEVLKATEMVEVGADDDEGGAERGEAGDLRRGSSPDVHALLEITEESDAVLVDKSDSD

SEQ ID NO: 58510 - protein, 764 aa, Homo sapiens
MLLFVLTCLLAVFPAISTKSPIFGPEEVNSVEGNSVSITCYYPPTSVNRHTRKYWCRQGARGGCITLISSEGYVSSKYAGRANLTNFPENGTFVVNIAQLSQDDSGRYKCGLGINSRGLSFDVSLEVSQGPGLLNDTKVYTVDLGRTVTINCPFKTENAQKRKSLYKQIGLYPVLVIDSSGYVNPNYTGRIRLDIQGTGQLLFSVVINQLRLSDAGQYLCQAGDDSNSNKKNADLQVLKPEPELVYEDLRGSVTFHCALGPEVANVAKFLCRQSSGENCDVVVNTLGKRAPAFEGRILLNPQDKDGSFSVVITGLRKEDAGRYLCGAHSDGQLQEGSPIQAWQLFVNEESTIPRSPTVVKGVAGGSVAVLCPYNRKESKSIKYWCLWEGAQNGRCPLLVDSEGWVKAQYEGRLSLLEEPGNGTFTVILNQLTSRDAGFYWCLTNGDTLWRTTVEIKIIEGEPNLKVPGNVTAVLGETLKVPCHFPCKFSSYEKYWCKWNNTGCQALPSQDEGPSKAFVNCDENSRLVSLTLNLVTRADEGWYWCGVKQGHFYGETAAVYVAVEERKAAGSRDVSLAKADAAPDEKVLDSGFREIENKAIQDPRLFAEEKAVADTRDQADGSRASVDSGSSEEQGGSSRALVSTLVPLGLVLAVGAVAVGVARARHRKNVDRVSIRSYRTDISMSDFENSREFGANDNMGASSITQETSLGGKEEFVATTESTTETKEPKKAKRSSKEEAEMAYKDFLLQSSTVAAEAQDGPQEA

SEQ ID NO: 58511 - protein, 531 aa, Homo sapiens
MDGIVPDIAVGTKRGSDELFSTCVTNGPFIMSSNSASAANGNDSKKFKGDSRSAGVPSRVIHIRKLPIDVTEGEVISLGLPFGKVTNLLMLKGKNQAFIEMNTEEAANTMVNYYTSVTPVLRGQPIYIQFSNHKELKTDSSPNQARAQAALQAVNSVQSGNLALAASAAAVDAGMAMAGQSPVLRIIVENLFYPVTLDVLHQIFSKFGTVLKIITFTKNNQFQALLQYADPVSAQHAKLSLDGQNIYNACCTLRIDFSKLTSLNVKYNNDKSRDYTRPDLPSGDSQPSLDQTMAAAFGLSVPNVHGALAPLAIPSAAAAAAAAGRIAIPGLAGAGNSVLLVSNLNPERVTPQSLFILFGVYGDVQRVKILFNKKENALVQMADGNQAQLAMSHLNGHKLHGKPIRITLSKHQNVQLPREGQEDQGLTKDYGNSPLHRFKKPGSKNFQNIFPPSATLHLSNIPPSVSEEDLKVLFSSNGGVVKGFKFFQKDRKMALIQMGSVEEAVQALIDLHNHDLGENHHLRVSFSKSTI

SEQ ID NO: 58512 - protein, 197 aa, Homo sapiens
MDGIVPDIAVGTKRVTPQSLFILFGVYGDVQRVKILFNKKENALVQMADGNQAQLAMSHLNGHKLHGKPIRITLSKHQNVQLPREGQEDQGLTKDYGNSPLHRFKKPGSKNFQNIFPPSATLHLSNIPPSVSEEDLKVLFSSNGGVVKGFKFFQKDRKMALIQMGSVEEAVQALIDLHNHDLGENHHLRVSFSKSTI

SEQ ID NO: 58513 - protein, 557 aa, Homo sapiens
MDGIVPDIAVGTKRGSDELFSTCVTNGPFIMSSNSASAANGNDSKKFKGDSRSAGVPSRVIHIRKLPIDVTEGEVISLGLPFGKVTNLLMLKGKNQAFIEMNTEEAANTMVNYYTSVTPVLRGQPIYIQFSNHKELKTDSSPNQARAQAALQAVNSVQSGNLALAASAAAVDAGMAMAGQSPVLRIIVENLFYPVTLDVLHQIFSKFGTVLKIITFTKNNQFQALLQYADPVSAQHAKLSLDGQNIYNACCTLRIDFSKLTSLNVKYNNDKSRDYTRPDLPSGDSQPSLDQTMAAAFGAPGIISASPYAGAGFPPTFAIPQAAGLSVPNVHGALAPLAIPSAAAAAAAAGRIAIPGLAGAGNSVLLVSNLNPERVTPQSLFILFGVYGDVQRVKILFNKKENALVQMADGNQAQLAMSHLNGHKLHGKPIRITLSKHQNVQLPREGQEDQGLTKDYGNSPLHRFKKPGSKNFQNIFPPSATLHLSNIPPSVSEEDLKVLFSSNGGVVKGFKFFQKDRKMALIQMGSVEEAVQALIDLHNHDLGENHHLRVSFSKSTI

SEQ ID NO: 58514 - protein, 550 aa, Homo sapiens
MDGIVPDIAVGTKRGSDELFSTCVTNGPFIMSSNSASAANGNDSKKFKGDSRSAGVPSRVIHIRKLPIDVTEGEVISLGLPFGKVTNLLMLKGKNQAFIEMNTEEAANTMVNYYTSVTPVLRGQPIYIQFSNHKELKTDSSPNQARAQAALQAVNSVQSGNLALAASAAAVDAGMAMAGQSPVLRIIVENLFYPVTLDVLHQIFSKFGTVLKIITFTKNNQFQALLQYADPVSAQHAKLSLDGQNIYNACCTLRIDFSKLTSLNVKYNNDKSRDYTRPDLPSGDSQPSLDQTMAAAFASPYAGAGFPPTFAIPQAAGLSVPNVHGALAPLAIPSAAAAAAAAGRIAIPGLAGAGNSVLLVSNLNPERVTPQSLFILFGVYGDVQRVKILFNKKENALVQMADGNQAQLAMSHLNGHKLHGKPIRITLSKHQNVQLPREGQEDQGLTKDYGNSPLHRFKKPGSKNFQNIFPPSATLHLSNIPPSVSEEDLKVLFSSNGGVVKGFKFFQKDRKMALIQMGSVEEAVQALIDLHNHDLGENHHLRVSFSKSTI

SEQ ID NO: 58515 - protein, 532 aa, Homo sapiens
MDGIVTEVAVGVKRGSDELLSGSVLSSPNSNMSSMVVTANGNDSKKFKGEDKMDGAPSRVLHIRKLPGEVTETEVIALGLPFGKVTNILMLKGKNQAFLELATEEAAITMVNYYSAVTPHLRNQPIYIQYSNHKELKTDNTLNQRAQAVLQAVTAVQTANTPLSGTTVSESAVTPAQSPVLRIIIDNMYYPVTLDVLHQIFSKFGAVLKIITFTKNNQFQALLQYGDPVNAQQAKLALDGQNIYNACCTLRIDFSKLVNLNVKYNNDKSRDYTRPDLPSGDGQPALDPAIAAAFAKETSLLAVPGALSPLAIPNAAAAAAAAAAGRVGMPGVSAGGNTVLLVSNLNEEMVTPQSLFTLFGVYGDVQRVKILYNKKDSALIQMADGNQSQLAMNHLNGQKMYGKIIRVTLSKHQTVQLPREGLDDQGLTKDFGNSPLHRFKKPGSKNFQNIFPPSATLHLSNIPPSVAEEDLRTLFANTGGTVKAFKFFQRDHKMALLQMATVEEAIQALIDLHNYNLGENHHLRVSFSKSTI

SEQ ID NO: 58516 - protein, 537 aa, Homo sapiens
MDGIVTEVAVGVKRGSDELLSGSVLSSPNSNMSSMVVTANGNDSKKFKGEDKMDGAPSRVLHIRKLPGEVTETEVIALGLPFGKVTNILMLKGKNQAFLELATEEAAITMVNYYSAVTPHLRNQPIYIQYSNHKELKTDNTLNQRAQAVLQAVTAVQTANTPLSGTTVSESAVTPAQSPVLRIIIDNMYYPVTLDVLHQIFSKFGAVLKIITFTKNNQFQALLQYGDPVNAQQAKLALDGQNIYNACCTLRIDFSKLVNLNVKYNNDKSRDYTRPDLPSGDGQPALDPAIAAAFAKETSLLGLPVAAVPGALSPLAIPNAAAAAAAAAAGRVGMPGVSAGGNTVLLVSNLNEEMVTPQSLFTLFGVYGDVQRVKILYNKKDSALIQMADGNQSQLAMNHLNGQKMYGKIIRVTLSKHQTVQLPREGLDDQGLTKDFGNSPLHRFKKPGSKNFQNIFPPSATLHLSNIPPSVAEEDLRTLFANTGGTVKAFKFFQRDHKMALLQMATVEEAIQALIDLHNYNLGENHHLRVSFSKSTI

SEQ ID NO: 58517 - protein, 536 aa, Homo sapiens
MDGIVTEVAVGVKRGSDELLSGSVLSSPNSNMSSMVVTANGNDSKKFKGEDKMDGAPSRVLHIRKLPGEVTETEVIALGLPFGKVTNILMLKGKNQAFLELATEEAAITMVNYYSAVTPHLRNQPIYIQYSNHKELKTDNTLNQRAQAVLQAVTAVQTANTPLSGTTVSESAVTPAQSPVLRIIIDNMYYPVTLDVLHQIFSKFGAVLKIITFTKNNQFQALLQYGDPVNAQQAKLALDGQNIYNACCTLRIDFSKLVNLNVKYNNDKSRDYTRPDLPSGDGQPALDPAIAAAFAKETSLLGLPVAAVPGALSPLAIPNAAAAAAAAAAGRVGMPGVSAGGNTVLLVSNLNEEMVTPQSLFTLFGVYGDVQRVKILYNKKDSALIQMADGNQSQLAMNHLNGQKMYGKIIRVTLSKHQTVQLPREGLDDQGLTKDFGNSPLHRFKKPGSKNFQNIFPPSATLHLSNIPPSVAEEDLRTLFANTGGTVKAFKFFQDHKMALLQMATVEEAIQALIDLHNYNLGENHHLRVSFSKSTI

SEQ ID NO: 58518 - protein, 351 aa, Homo sapiens
GMKRGSDELLSGSVLSSPNSNMSSMVVTANGNDSKKFKGEDKMDGAPSRVLHIRKLPGEVTETEVIALGLPFGKVTNILMLKGKNQAFLELATEEAAITMVNYYSAVTPHLRNQPIYIQYSNHKELKTDNTLNQRAQAVLQAVTAVQTANTPLSGTTVSESAVTPAQSPVLRIIIDNMYYPVTLDVLHQIFSKFGAVLKIITFTKNNQFQALLQYGDPVNAQQAKLALDGQNIYNACCTLRIDFSKLVNLNVKYNNDKSRDYTRPDLPSGDGQPALDPAIAAAFAKETSLLGLPVAAVPGALSPLAIPNAAAAAAAAAAGRVGMPGVSAGGNTVLLVSNLNEEVFMEMCSV

SEQ ID NO: 58519 - protein, 548 aa, Homo sapiens
MWSNLTFSFFGLRTKAKKYVTVNNRGSDELLSGSVLSSPNSNMSSMVVTANGNDSKKFKGEDKMDGAPSRVLHIRKLPGEVTETEVIALGLPFGKVTNILMLKGKNQAFLELATEEAAITMVNYYSAVTPHLRNQPIYIQYSNHKELKTDNTLNQRAQAVLQAVTAVQTANTPLSGTTVSESAVTPAQSPVLRIIIDNMYYPVTLDVLHQIFSKFGAVLKIITFTKNNQFQALLQYGDPVNAQQAKLALDGQNIYNACCTLRIDFSKLVNLNVKYNNDKSRDYTRPDLPSGDGQPALDPAIAAAFAKETSLLGLPVAAVPGALSPLAIPNAAAAAAAAAAGRVGMPGVSAGGNTVLLVSNLNEEMVTPQSLFTLFGVYGDVQRVKILYNKKDSALIQMADGNQSQLAMNHLNGQKMYGKIIRVTLSKHQTVQLPREGLDDQGLTKDFGNSPLHRFKKPGSKNFQNIFPPSATLHLSNIPPSVAEEDLRTLFANTGGTVKAFKFFQRDHKMALLQMATVEEAIQALIDLHNYNLGENHHLRVSFSKSTI

SEQ ID NO: 58520 - protein, 531 aa, Homo sapiens
MDGIVTEVAVGVKRGSDELLSGSVLSSPNSNMSSMVVTANGNDSKKFKGEDKMDGAPSRVLHIRKLPGEVTETEVIALGLPFGKVTNILMLKGKNQAFLELATEEAAITMVNYYSAVTPHLRNQPIYIQYSNHKELKTDNTLNQRAQAVLQAVTAVQTANTPLSGTTVSESAVTPAQSPVLRIIIDNMYYPVTLDVLHQIFSKFGAVLKIITFTKNNQFQALLQYGDPVNAQQAKLALDGQNIYNACCTLRIDFSKLVNLNVKYNNDKSRDYTRPDLPSGDGQPALDPAIAAAFAKETSLLAVPGALSPLAIPNAAAAAAAAAAGRVGMPGVSAGGNTVLLVSNLNEEMVTPQSLFTLFGVYGDVQRVKILYNKKDSALIQMADGNQSQLAMNHLNGQKMYGKIIRVTLSKHQTVQLPREGLDDQGLTKDFGNSPLHRFKKPGSKNFQNIFPPSATLHLSNIPPSVAEEDLRTLFANTGGTVKAFKFFQDHKMALLQMATVEEAIQALIDLHNYNLGENHHLRVSFSKSTI

SEQ ID NO: 58521 - protein, 325 aa, Homo sapiens
MSSMVVTANGNDSKKFKGEDKMDGAPSRVLHIRKLPGEVTETEVIALGLPFGKVTNILMLKGKNQAFLELATEEAAITMVNYYSAVTPHLRNQPIYIQYSNHKELKTDNTLNQRAQAVLQAVTAVQTANTPLSGTTVSESAVTPAQSPVLRIIIDNMYYPVTLDVLHQIFSKFGAVLKIITFTKNNQFQALLQYGDPVNAQQAKLALDGQNIYNACCTLRIDFSKLVNLNVKYNNDKSRDYTRPDLPSGDGQPALDPAIAAAFAKETSLLAVPGALSPLAIPNAAAAAAAAAAGRVGMPGVSAGGNTVLLVSNLNEEVFMEMCSV

SEQ ID NO: 58522 - protein, 204 aa, Homo sapiens
MPGVSAGGNTVLLVSNLNEEMVTPQSLFTLFGVYGDVQRVKILYNKKDSALIQMADGNQSQLAMNHLNGQKMYGKIIRVTLSKHQTVQLPREGLDDQGLTKDFGNSPLHRFKKPGSKNFQNIFPPSATLHLSNIPPSVAEEDLRTLFANTGGTVKAFKFFQRDHKMALLQMATVEEAIQALIDLHNYNLGENHHLRVSFSKSTI

SEQ ID NO: 58523 - protein, 115 aa, Homo sapiens
MVCSPVTLRIAPPDRRFSRSAIPEQIISSTLSSPSSNAPDPCAKETVLSALKEKKKKRTVEEEDQIFLDGQENKRSCLVDGLTDASSAFKVPRPGPDTLQFTVDVFHFANDSRNM

SEQ ID NO: 58524 - protein, 187 aa, Homo sapiens
MVCSPVTLRIAPPDRRFSRSAIPEQIISSTLSSPSSNAPDPCAKETVLSALKEKKKKRTVEEEDQIFLDGQENKRSCLVDGLTDASSAFKVPRPGPDTLQFTVDVFHFANDSRNMIYITCHLKVTLAEQDPDELNKACSFSKPSNSWFPVEGLADICQCCNKGDCGTPSHSRRQPRVVSQWSTSASL

SEQ ID NO: 58525 - protein, 364 aa, Homo sapiens
MSANSSRVGQLLLQGSACIRWKQDVEGAVYHLANCLLLLGFMGGSGVYGCFYLFGFLSAGYLCCVLWGWFSACGLDIVLWSFLLAVVCLLQLAHLVYRLREDTLPEEFDLLYKTLCLPLQVPLQTYKEIVHCCEEQVLTLATEQTYAVEGETPINRLSLLLSGRVRVSQDGQFLHYIFPYQFMDSPEWESLQPSEEGVFQVTLTAETSCSYISWPRKSLHLLLTKERYISCLFSALLGYDISEKLYTLNDKLFAKFGLRFDIRLPSLYHVLGPTAADAGPESEKGDEEVCEPAVSPPQATPTSLQQTPPCSTPPATTNFPAPPTRARLSRPDSGILASRIPLQSYSQVISRGQAPLAPTHTPEL

SEQ ID NO: 58526 - protein, 360 aa, Homo sapiens
MSANSSRVGQLLLQGSACIRWKQDVEGAVYHLANCLLLLGFMGGSGVYGCFYLFGFLSAGYLCCVLWGWFSACGLDIVLWSFLLAVVCLLQLAHLVYRLREDTLPEEFDLLYKTLCLPLQVPLQTYKEIVHCCEEQVLTLATEQTYAVEGETPINRLSLLLSGRVRVSQDGQFLHYIFPYQFMDSPEWESLQPSEEGVFQVTLTAETSCSYISWPRKSLHLLLTKERYISCLFSALLGYDISEKLYTLNDKLFAKFGLRFDIRLPSLYHVLGPTAADAGPESEKGDEEVCEPAVSPPQATPTSLQQTPPCSTPPATTNFPAPPTRARLSRPDSGILEIDDFPSYFHQFGFSGKVAAGRIP

SEQ ID NO: 58527 - protein, 360 aa, Homo sapiens; identical to SEQ ID NO: 58526

SEQ ID NO: 58528 - protein, 291 aa, Homo sapiens
MERNSSLWKNLIDEHPVCTTWKQEAEGAIYHLASILFVVGFMGGSGFFGLLYVFSLLGLGFLCSAVWAWVDVCAADIFSWNFVLFVICFMQFVHIAYQVRSITFAREFQVLYSSLFQPLGISLPVFRTIALSSEVVTLEKEHCYAMQGKTSIDKLSLLVSGRIRVTVDGEFLHYIFPLQFLDSPEWDSLRPTEEGIFQVTLTAETDCRYVSWRRKKLYLLFAQHRYISRLFSVLIGSDIADKLYALNDRVYIGKRYHYDIRLPNFYQMSTPEIRRSPLTQHFQNSRRYCDK

SEQ ID NO: 58529 - protein, 101 aa, Homo sapiens
MLFLCFDRIRVTVDGEFLHYIFPLQFLDSPEWDSLRPTEEGIFQVTLTAETDCRYVSWRRKKLYLLFAQHRYISRLFSVLIGSDIADKLYALNDRVYIGKR

SEQ ID NO: 58530 - protein, 461 aa, Homo sapiens
MATFSRQEFFQQLLQGCLLPTAQQGLDQIWLLLAICLACRLLWRLGLPSYLKHASTVAGGFFSLYHFFQLHMVWVVLLSLLCYLVLFLCRHSSHRGVFLSVTILIYLLMGEMHMVDTVTWHKMRGAQMIVAMKAVSLGFDLDRGEVGTVPSPVEFMGYLYFVGTIVFGPWISFHSYLQAVQGRPLSCRWLQKVARSLALALLCLVLSTCVGPYLFPYFIPLNGDRLLRNKKRKARGTMVRWLRAYESAVSFHFSNYFVGFLSEATATLAGAGFTEEKDHLEWDLTVSKPLNVELPRSMVEVVTSWNLPMSYWLNNYVFKNALRLGTFSAVLVTYAASALLHGFSFHLAAVLLSLAFITYVEHVLRKRLARILSACVLSKRCPPDCSHQHRLGLGVRALNLLFGALAIFHLAYLGSLFDVDVDDTTEEQGYGMAYTVHKWSELSWASHWVTFGCWIFYRLIG

SEQ ID NO: 58531 - protein, 455 aa, Homo sapiens
MATFSRQEFFQQLLQGCLLPTAQQGLDQIWLLLAICLACRLLWRLGLPSYLKHASTVAGGFFSLYHFFQLHMVWVVLLSLLCYLVLFLCRHSSHRGVFLSVTILIYLLMGEMHMVDTVTWHKMRGAQMIVAMKAVSLGFDLDRGEVGTVPSPVEFMGYLYFVGTIVFGPWISFHSYLQAVQGRPLSCRWLQKVARSLALALLCLVLSTCVGPYLFPYFIPLNGDRLLRKGTMVRWLRAYESAVSFHFSNYFVGFLSEATATLAGAGFTEEKDHLEWDLTVSKPLNVELPRSMVEVVTSWNLPMSYWLNNYVFKNALRLGTFSAVLVTYAASALLHGFSFHLAAVLLSLAFITYVEHVLRKRLARILSACVLSKRCPPDCSHQHRLGLGVRALNLLFGALAIFHLAYLGSLFDVDVDDTTEEQGYGMAYTVHKWSELSWASHWVTFGCWIFYRLIG

SEQ ID NO: 58532 - protein, 456 aa, Homo sapiens
MATFSRQEFFQQLLQGCLLPTAQQGLDQIWLLLAICLACRLLWRLGLPSYLKHASTVAGGFFSLYHFFQLHMVWVVLLSLLCYLVLFLCRHSSHRGVFLSVTILIYLLMGEMHMVDTVTWHKMRGAQMIVAMKAVSLGFDLDRGEVGTVPSPVEFMGYLYFVGTIVFGPWISFHSYLQAVQGRPLSCRWLQKVARSLALALLCLVLSTCVGPYLFPYFIPLNGDRLLRNKKRKARWLRAYESAVSFHFSNYFVGFLSEATATLAGAGFTEEKDHLEWDLTVSKPLNVELPRSMVEVVTSWNLPMSYWLNNYVFKNALRLGTFSAVLVTYAASALLHGFSFHLAAVLLSLAFITYVEHVLRKRLARILSACVLSKRCPPDCSHQHRLGLGVRALNLLFGALAIFHLAYLGSLFDVDVDDTTEEQGYGMAYTVHKWSELSWASHWVTFGCWIFYRLIG

SEQ ID NO: 58533 - protein, 455 aa, Homo sapiens; identical to SEQ ID NO: 58531

SEQ ID NO: 58534 - protein, 450 aa, Homo sapiens
MATFSRQEFFQQLLQGCLLPTAQQGLDQIWLLLAICLACRLLWRLGLPSYLKHASTVAGGFFSLYHFFQLHMVWVVLLSLLCYLVLFLCRHSSHRGVFLSVTILIYLLMGEMHMVDTVTWHKMRGAQMIVAMKAVSLGFDLDRGEVGTVPSPVEFMGYLYFVGTIVFGPWISFHSYLQAVQGRPLSCRWLQKVARSLALALLCLVLSTCVGPYLFPYFIPLNGDRLLRKWLRAYESAVSFHFSNYFVGFLSEATATLAGAGFTEEKDHLEWDLTVSKPLNVELPRSMVEVVTSWNLPMSYWLNNYVFKNALRLGTFSAVLVTYAASALLHGFSFHLAAVLLSLAFITYVEHVLRKRLARILSACVLSKRCPPDCSHQHRLGLGVRALNLLFGALAIFHLAYLGSLFDVDVDDTTEEQGYGMAYTVHKWSELSWASHWVTFGCWIFYRLIG

SEQ ID NO: 58535 - protein, 379 aa, Homo sapiens
MVWVVLLSLLCYLVLFLCRHSSHRGVFLSVTILIYLLMGEMHMVDTVTWHKMRGAQMIVAMKAVSLGFDLDRGEVGTVPSPVEFMGYLYFVGTIVFGPWISFHSYLQAVQGRPLSCRWLQKVARSLALALLCLVLSTCVGPYLFPYFIPLNGDRLLRKWLRAYESAVSFHFSNYFVGFLSEATATLAGAGFTEEKDHLEWDLTVSKPLNVELPRSMVEVVTSWNLPMSYWLNNYVFKNALRLGTFSAVLVTYAASALLHGFSFHLAAVLLSLAFITYVEHVLRKRLARILSACVLSKRCPPDCSHQHRLGLGVRALNLLFGALAIFHLAYLGSLFDVDVDDTTEEQGYGMAYTVHKWSELSWASHWVTFGCWIFYRLIG

SEQ ID NO: 58536 - protein, 97 aa, Homo sapiens
MATFSRQEFFQQLLQGCLLPTAQQGLDQIWLLLAICLACRLLWRLGLPSYLKHASTVAGGFFSLYHFFQLHMVWVVLLSLLCYLVLFLCRHSSHRGV

SEQ ID NO: 58537 - protein, 461 aa, Homo sapiens; identical to SEQ ID NO: 58530

SEQ ID NO: 58538 - protein, 922 aa, Homo sapiens
MFLHSVNLWNLAFYVFMVFLATLGLWDVFFGFEENKCSMSYMFEYPEYQKIELPKKLAKRYPAYELYLYGEGSYAEEHKILPLTGIPVLFLPGNAGSYKQVRSIGSIALRKAEDIDFKYHFDFFSVNFNEELVALYGGSLQKQTKFVHECIKTILKLYKGQEFAPKSVAIIGHSMGGLVARALLTLKNFKHDLINLLITQATPHVAPVMPLDRFITDFYTTVNNYWILNARHINLTTLSVAGGFRDYQVRSGLTFLPKLSHHTSALSVVSSAVPKTWVSTDHLSIVWCKQLQLTTVRAFFDLIDADTKQITQNSKKKLSVLYHHFIRHPSKHFEENPAIISDLTGTSMWVLVKVSKWTYVAYNESEKIYFTFPLENHRKIYTHVYCQSTMLDTNSWIFACINSTSMCLQGVDLSWKAELLPTIKYLTLRLQDYPSLSHLVVYVPSVRGSKFVVDCEFFKKEKRYIQLPVTHLFSFGLSSRKVVLNTNGLYYNLELLNFGQIYQAFKINVVSKCSAVKEEITSIYRLHIPWSYEDSLTIAQAPSSTEISLKLHIAQPENNTHVALFKMYTSSDCRYEVTVKTSFSQILGQVVRFHGGALPAYVVSNILLAYRGQLYSLFSTGCCLEYATMLDKEAKPYKVDPFVIIIKFLLGYKWFKELWDVLLLPELDAVILTCQSMCFPLISLILFLFGTCTAYWSGLLSSASVRLLSSLWLALKRPSELPKDIKMISPDLPFLTIVLIIVSWTTCGALAILLSYLYYVFKVVHLQASLTTFKNSQPVNPKHSRRSEKKSNHHKDSSIHHLRLSANDAEDSLRMHSTVINLLTWIVLLSMPSLIYWLKNLRYYFKLNPDPCKPLAFILIPTMAILGNTYTVSIKSSKLLKTTSQFPLPLAVGVIAFGSAHLYRLPCFVFIPLLLHALCNFM

SEQ ID NO: 58539 - protein, 304 aa, Homo sapiens
MEVLESKKIELPKKLAKRYPAYELYLYGEGSYAEEHKILPLTGIPVLFLPGNAGSYKQVRSIGSIALRKAEDIDFKYHFDFFSVNFNEELVALYGGSLQKQTKFVHECIKTILKLYKGQEFAPKSVAIIGHSMGGLVARALLTLKNFKHDLINLLITQATPHVAPVMPLDRFITDFYTTVNNYWILNARHINLTTLSVAGGFRDYQVRSGLTFLPKLSHHTSALSVVSSAVPKTWVSTDHLSIVWCKQLQLTTVRAFFDLIDADTKQITQNSKKKLSVLYHHFIRHPSKHFEENPAIISDLTGI

SEQ ID NO: 58540 - protein, 592 aa, Homo sapiens
MFLHSVNLWNLAFYVFMVFLATLGLWDVFFGFEENKCSMSYMFEYPEYQKIELPKKLAKRYPAYELYLYGEGSYAEEHKILPLTGIPVLFLPGNAGSYKQVRSIGSIALRKAEDIDFKYHFDFFSVNFNEELVALYGGSLQKQTKFVHECIKTILKLYKGQEFAPKSVAIIGHSMGGLVARALLTLKNFKHDLINLLITQATPHVAPVMPLDRFITDFYTTVNNYWILNARHINLTTLSVAGGFRDYQVRSGLTFLPKLSHHTSALSVVSSAVPKTWVSTDHLSIVWCKQLQLTTVRAFFDLIDADTKQITQNSKKKLSVLYHHFIRHPSKHFEENPAIISDLTGTSMWVLVKVSKWTYVAYNESEKIYFTFPLENHRKIYTHVYCQSTMLDTNSWIFACINSTSMCLQGVDLSWKAELLPTIKYLTLRLQDYPSLSHLVVYVPSVRGSKFVVDCEFFKKEKRYIQLPVTHLFSFGLSSRKVVLNTNGLYYNLELLNFGQIYQAFKINVVSKCSAVKEEITSIYRLHIPWSYEDSLTIAQAPSSTEISLKLHIAQPENNTHVALFKMYTSSDCRYEVTVKTSFSQILGQVVA

SEQ ID NO: 58541 - protein, 430 aa, Homo sapiens
MFLHSVNLWNLAFYVFMVFLATLGLWDVFFGFEENKCSMSYMFEYPEYQSSAVPKTWVSTDHLSIVWCKQLQLTTVRAFFDLIDADTKQITQNSKKKLSVLYHHFIRHPSKHFEENPAIISDLTGTSMWVLVKVSKWTYVAYNESEKIYFTFPLENHRKIYTHVYCQSTMLDTNSWIFACINSTSMCLQGVDLSWKAELLPTIKYLTLRLQDYPSLSHLVVYVPSVRGSKFVVDCEFFKKEKRYIQLPVTHLFSFGLSSRKVVLNTNGLYYNLELLNFGQIYQAFKINVVSKCSAVKEEITSIYRLHIPWSYEDSLTIAQAPSSTEISLKLHIAQPENNTHVALFKMYTSSDCRYEVTVKTSFSQILGQVVRFHGGALPAYVVSNILLAYRGQLYSLFSTGCCLEYATMLDKEAKPYKVDPFVIIIKFLL

SEQ ID NO: 58542 - protein, 257 aa, Homo sapiens
MSRPLITRSPASPLNNQGIPTPAQLTKSNAPVHIDVGGHMYTSSLATLTKYPESRIGRLFDGTEPIVLDSLKQHYFIDRDGQMFRYILNFLRTSKLLIPDDFKDYTLLYEEAKYFQLQPMLLEMERWKQDRETGRFSRPCECLVVRVAPDLGERITLSGDKSLIEEVFPEIGDVMCNSVNAGWNHDSTHVIRFPLNGYCHLNSVQVLERLQQRGFEIVGSCGGGVDSSQFSEYVLRRELRRTPRVPSVIRIKQEPLD

SEQ ID NO: 58543 - protein, 257 aa, Homo sapiens; identical to SEQ ID NO: 58542

SEQ ID NO: 58544 - protein, 865 aa, Homo sapiens
MARMPGSGDCNTSAGGSASAAAAAAENNGERGEGERGAGGRGRRHSRPHYCSAGEEEEEEEEEDEIQEVQITGDEEEEEDGGGGLEEDEEEEEEEEMGLDWDEPLEPEDSAGEELEPEPVHMINMDQSAALEPEAPPRLLAPRARGGPPGDGSELDPDVLQRPERARLSENTRLATRYAVRIFREYLSEKAQSPDFETMDKGALCRVLRSFYAEARSKSGQLYSKSSLISIRSSLNRYLNEPPYCRTLDLTKDPELRSANLTLAAVIRKLEEQGAGPVVQKQAITRADLRKLYTSSVFSTNTPFGLLNKVWFETCMYFCTRGRENQRELEEDSFGLAMDEDGRKFVYFKSLGPYHKSRSSSWSKKRAESSDEENLPRMYETGTEFCPYASFVKYLSKRNPLCKAFFQRPRDHCSEGDVTWYENKAIGKNLLGTRMQMLSKAAKLSKTYTNHCIGAVSIATLNSIAGIGTKLGSPAPQGCYAEALNGAARHHSHHPPTHPSHHHRPQPPSLGNTYILPKDSQVGPDVKSEAAPKRALYESVFGSGEICGPTSPKRLCIRPSEPVDAVVVVSVKHDPLPLLPEANGHRSTNSPTIVSPAIVSPTQDSRPNMSRPLITRSPASPLNNQGIPTPAQLTKSNAPVHIDVGGHMYTSSLATLTKYPESRIGRLFDGTEPIVLDSLKQHYFIDRDGQMFRYILNFLRTSKLLIPDDFKDYTLLYEEAKYFQLQPMLLEMERWKQDRETGRFSRPCECLVVRVAPDLGERITLSGDKSLIEEVFPEIGDVMCNSVNAGWNHDSTHVIRFPLNGYCHLNSVQVLERLQQRGFEIVGSCGGGVDSSQFSEYVLRRELRRTPRVPSVIRIKQEPLD

SEQ ID NO: 58545 - protein, 257 aa, Homo sapiens; identical to SEQ ID NO: 58542

SEQ ID NO: 58546 - protein, 313 aa, Homo sapiens
MEEMSGESVVSSAVPAAATRTTSFKGTSPSSKYVKLNVGGALYYTTMQTLTKQDTMLKAMFSGRMEVLTDSEGWILIDRCGKHFGTILNYLRDGAVPLPESRREIEELLAEAKYYLVQGLVEECQAALQNKDTYEPFCKVPVITSSKEEQKLIATSNKPAVKLLYNRSNNKYSYTSNSDDNMLKNIELFDKLSLRFNGRVLFIKDVIGDEICCWSFYGQGRKIAEVCCTSIVYATEKKQTKVEFPEARIYEETLNILLYEAQDGRGPDNALLEATGGAAGRSHHLDEDEERERIERVRRIHIKRPDDRAHLHQ

SEQ ID NO: 58547 - protein, 132 aa, Homo sapiens
MLKNIELFDKLSLRFNGRVLFIKDVIGDEICCWSFYGQGRKIAEVCCTSIVYATEKKQTKVEFPEARIYEETLNILLYEAQDGRGPDNALLEATGGAAGRSHHLDEDEERERIERVRRIHIKRPDDRAHLHQ

SEQ ID NO: 58548 - protein, 279 aa, Homo sapiens
  VARIANT 1: note = MOD_RES - Any amino acid
XRYCRSPFWSGYGNFYSLQKSGFLPTLGTVQPFNYCKSGWILIDRCGKHFGTILNYLRDGAVPLPESRREIEELLAEAKYYLVQGLVEECQAALQNKDTYEPFCKVPVITSSKEEQKLIATSNKPAVKLLYNRSNNKYSYTSNSDDNMLKNIELFDKLSLRFNGRVLFIKDVIGDEICCWSFYGQGRKIAEVCCTSIVYATEKKQTKVEFPEARIYEETLNILLYEAQDGRGPDNALLEATGGAAGRSHHLDEDEERERIERVRRIHIKRPDDRAHLHQ

SEQ ID NO: 58549 - protein, 287 aa, Homo sapiens
MSGESVVSSAVPAAATRTTSFKGTSPSSKYVKLNVGGALYYTTMQTLTKQDTMLKAMFSGRMEVLTDSEGWILIDRCGKHFGTILNYLRDGAVPLPESRREIEELLAEAKYYLVQGLVEECQAALQNKDTYEPFCKVPVITSSKEEQKLIATSNKPAVKLLYNRSNNKYSYTRVLFIKDVIGDEICCWSFYGQGRKIAEVCCTSIVYATEKKQTKVEFPEARIYEETLNILLYEAQDGRGPDNALLEATGGAAGRSHHLDEDEERERIERVRRIHIKRPDDRAHLHQ

SEQ ID NO: 58550 - protein, 155 aa, Homo sapiens
MMAVFTSLWSPYQMLFCSNSDDNMLKNIELFDKLSLRFNGRVLFIKDVIGDEICCWSFYGQGRKIAEVCCTSIVYATEKKQTKVEFPEARIYEETLNILLYEAQDGRGPDNALLEATGGAAGRSHHLDEDEERERIERVRRIHIKRPDDRAHLHQ

SEQ ID NO: 58551 - protein, 329 aa, Homo sapiens
MSAEASGPAAAAAPSLEAPKPSGLEPGPAAYGLKPLTPNSKYVKLNVGGSLHYTTLRTLTGQDTMLKAMFSGRVEVLTDAGGWVLIDRSGRHFGTILNYLRDGSVPLPESTRELGELLGEARYYLVQGLIEDCQLALQQKRETLSPLCLIPMVTSPREEQQLLASTSKPVVKLLHNRSNNKYSYTSTSDDNLLKNIELFDKLALRFHGRLLFLKDVLGDEICCWSFYGQGRKIAEVCCTSIVYATEKKQTKVEFPEARIFEETLNILIYETPRGPDPALLEATGGAAGAGGAGRGEDEENREHRVRRIHVRRHITHDERPHGQQIVFKD

SEQ ID NO: 58552 - protein, 329 aa, Homo sapiens; identical to SEQ ID NO: 58551

SEQ ID NO: 58553 - protein, 428 aa, Homo sapiens
MALSGNCSRYYPREQGSAVPNSFPEVVELNVGGQVYFTRHSTLISIPHSLLWKMFSPKRDTANDLAKDSKGRFFIDRDGFLFRYILDYLRDRQVVLPDHFPEKGRLKREAEYFQLPDLVKLLTPDEIKQSPDEFCHSDFEDASQGSDTRICPPSSLLPADRKWGFITVGYRGSCTLGREGQADAKFRRVPRILVCGRISLAKEVFGETLNESRDPDRAPERYTSRFYLKFKHLERAFDMLSECGFHMVACNSSVTASFINQYTDDKIWSSYTEYVFYREPSRWSPSHCDCCCKNGKGDKEGESGTSCNDLSTSSCDSQSEASSPQETVICGPVTRQTNIQTLDRPIKKGPVQLIQQSEMRRKSDLLRTLTSGSRESNMSSKKKAVKEKLSIEEELEKCIQDFLKIKIPDRFPERKHPWQSELLRKYHL

SEQ ID NO: 58554 - protein, 428 aa, Homo sapiens; identical to SEQ ID NO: 58553

SEQ ID NO: 58555 - protein, 263 aa, Homo sapiens
MAELQLDPAMAGLGGGGGSGVGDGGGPVRGPPSPRPAGPTPRGHGRPAAAVAQPLEPGPGPPERAGGGGAARWVRLNVGGTYFVTTRQTLGREPKSFLCRLCCQEDPELDSDKDETGAYLIDRDPTYFGPILNYLRHGKLIITKELAEEGVLEEAEFYNIASLVRLVKERIRDNENRTSQGPVKHVYRVLQCQEEELTQMVSTMSDGWKFEQLISIGSSYNYGNEDQAEFLCVVSRELNNSTNGIVIEPSEKAKILQERGSRM

SEQ ID NO: 58556 - protein, 245 aa, Homo sapiens
SLPRNGPARLRAGSSGGGGGPRWRNCSWTRRWRGWEGAPGPGPPERAGGGGAARWVRLNVGGTYFVTTRQTLGREPKSFLCRLCCQEDPELDSDKDETGAYLIDRDPTYFGPILNYLRHGKLIITKELAEEGVLEEAEFYNIASLVRLVKERIRDNENRTSQGPVKHVYRVLQCQEEELTQMVSTMSDGWKFEQLISIGSSYNYGNEDQAEFLCVVSRELNNSTNGIVIEPSEKAKILQERGSRM

SEQ ID NO: 58557 - protein, 815 aa, Homo sapiens
MAGGHCGSFPAAAAGSGEIVQLNVGGTRFSTSRQTLMWIPDSFFSSLLSGRISTLRDETGAIFIDRDPAAFAPILNFLRTKELDLRGVSINVLRHEAEFYGITPLVRRLLLCEELERSSCGSVLFHGYLPPPGIPSRKINNTVRSADSRNGLNSTEGEARGNGTQPVLSGTGEETVRLGFPVDPRKVLIVAGHHNWIVAAYAHFAVCYRIKESSGWQQVFTSPYLDWTIERVALNAKVVGGPHGDKDKMVAVASESSIILWSVQDGGSGSEIGVFSLGVPVDALFFIGNQLVATSHTGKVGVWNAVTQHWQVQDVVPITSYDTAGSFLLLGCNNGSIYYIDMQKFPLRMKDNDLLVTELYHDPSNDAITALSVYLTPKTSVSGNWIEIAYGTSSGAVRVIVQHPETVGSGPQLFQTFTVHRSPVTKIMLSEKHLVSVCADNNHVRTWTVTRFRGMISTQPGSTPLASFKILSLEETESHGSYSSGNDIGPFGERDDQQVFIQKVVPITNKLFVRLSSTGKRICEIQAVDCTTISSFTVRECEGSSRMGSRPRRYLFTGHTNGSIQMWDLTTAMDMVNKSEDKDVGGPTEEELLKLLDQCDLSTSRCATPNISPATSVVQHSHLRESNSSLQLQHHDTTHEAATYGSMRPYRESPLLARARRTESFHSYRDFQTINLNRNVERAVPENGNLGPIQAEVKGATGECNISERKSPGVEIKSLRELDSGLEVHKIAEGFSESKKRSSEDENENKIEFRKKGGFEGGGFLGRKKVPYLASSPSTSDGGTDSPGTASPSPTKTTPSPRHKKSDSSGQEYSL

SEQ ID NO: 58558 - protein, 240 aa, Homo sapiens
MAGGHCGSFPAAAAGSGEIVQLNVGGTRFSTSRQTLMWIPDSFFSSLLSGRISTLRDETGAIFIDRDPAAFAPILNFLRTKELDLRGVSINVLRHEAEFYGITPLVRRLLLCEELERSSCGSVLFHGYLPPPGIPSRKINNTVRSADSRNGLNSTEGEARGNGTQPVLSGTGEETVRLGFPVDPRKVLIVAGHHNWIVAAYAHFAVCYRVFWLGTVGHACNPSTLGGRDGWSSRSARPTW

SEQ ID NO: 58559 - protein, 188 aa, Homo sapiens
MKDNDLLVTELYHDPSNDAITALSVYLTPKTSVSGNWIEIAYGTSSGAVRVIVQHPETVGSGPQLFQTFTVHRSPVTKIMLSEKHLVSVCADNNHVRTWTVTRFRGMISTQPGSTPLASFKILSLEETESHGSYSSGNDIGPFGERDDQQVFIQKVVPITNKLFVRLSSTGKSLCGVSLVSRSSQEPT

SEQ ID NO: 58560 - protein, 213 aa, Homo sapiens
  VARIANT 1: note = MOD_RES - Any amino acid
XFSTSRQTLMWIPDSFFSSLLSGRISTLRDETGAIFIDRDPAAFAPILNFLRTKELDLRGVSINVLRHEAEFYGITPLVRRLLLCEELERSSCGSVLFHGYLPPPGIPSRKINNTVRSADSRNGLNSTEGEARGNGTQPVLSGTGEETVRLGFPVDPRKVLIVAGHHNWIVAAYAHFAVCYRVFWLGTVGHACNPSTLGGRDGWSSRSARPTW

SEQ ID NO: 58561 - protein, 168 aa, Homo sapiens
  VARIANT 1: note = MOD_RES - Any amino acid
XALSVYLTPKTSVSGNWIEIAYGTSSGAVRVIVQHPETVGSGPQLFQTFTVHRSPVTKIMLSEKHLVSVCADNNHVRTWTVTRFRGMISTQPGSTPLASFKILSLEETESHGSYSSGNDIGPFGERDDQQVFIQKVVPITNKLFVRLSSTGKSLCGVSLVSRSSQEPT

SEQ ID NO: 58562 - protein, 289 aa, Homo sapiens
MVVVTGREPDSRRQDGAMSSSDAEDDFLEPATPTATQAGHALPLLPQEFPEVVPLNIGGAHFTTRLSTLRCYEDTMLAAMFSGRHYIPTDSEGRYFIDRDGTHFGDVLNFLRSGDLPPRERVRAVYKEAQYYAIGPLLEQLENMQPLKGEKVRQAFLGLMPYYKDHLERIVEIARLRAVQRKARFAKLKVCVFKEEMPITPYECPLLNSLRFERSESDGQLFEHHCEVDVSFGPWEAVADVYDLLHCLVTDLSAQGLTVDHQCIGVCDKHLVNHYYCKRPIYEFKITWW

SEQ ID NO: 58563 - protein, 575 aa, Homo sapiens
VSRKKMSLKSERRGIHVDQSDLLCKKGCGYYGNPAWQGFCSKCWREEYHKARQKQIQEDWELAERVLLCYPGWSAMVQFQLTATSASWAQVILLLQPPNVLGLQALQREEEEAFASSQSSQGAQSLTFSKFEEKKTNEKTRKVTTVKKFFSASSRVGSKKEIQEAKAPSPSINRQTSIETDRVSKEFIEFLKTFHKTGQEIYKQTKLFLEGMHYKRDLSIEEQSECAQDFYHNVAERMQTRGKERRFHHVGQAGLELLTSGDPPASASQSAGNTGVEPPHPAVPPERVEKIMDQIEKYIMTRLYKYVFCPETTDDEKKDLAIQKRIRALRWVTPQMLCVPVNEDIPEVSDMVVKAITDIIEMDSKRVPRDKLACITKCSKHIFNAIKITKNEPASADDFLPTLIYIVLKGNPPRLQSNIQYITRFCNPSRLMTGEDGYYFTNLCCAVAFIEKLDAQSLNLSQEDFDRYMSGQTSPRKQEAESWSPDACLGVKQMYKNLDLLSQLNERQERIMNEAKKLEKDLIDWTDGIAREVQDIVEKYPLEIKPPNQPLAAIDSENVENDKLPPPLQPQVYAG

SEQ ID NO: 58564 - protein, 531 aa, Homo sapiens
MSLKSERRGIHVDQSDLLCKKGCGYYGNPAWQGFCSKCWREEYHKARQKQIQEDWELAERVLLCYPGWSAMVQFQLTATSASWAQVILLLQPPNVLGLQALQREEEEAFASSQSSQGAQSLTFSKFEEKKTNEKTRKVTTVKKFFSASSRVGSKKEIQEAKAPSPSINRQTSIETDRVSKEFIEFLKTFHKTGQEIYKQTKLFLEGMHYKRDLSIEEQSECAQDFYHNVAERMQTRGKVPPERVEKIMDQIEKYIMTRLYKYVFCPETTDDEKKDLAIQKRIRALRWVTPQMLCVPVNEDIPEVSDMVVKAITDIIEMDSKRVPRDKLACITKCSKHIFNAIKITKNEPASADDFLPTLIYIVLKGNPPRLQSNIQYITRFCNPSRLMTGEDGYYFTNLCCAVAFIEKLDAQSLNLSQEDFDRYMSGQTSPRKQEAESWSPDACLGVKQMYKNLDLLSQLNERQERIMNEAKKLEKDLIDWTDGIAREVQDIVEKYPLEIKPPNQPLAAIDSENVENDKLPPPLQPQVYAG

SEQ ID NO: 58565 - protein, 491 aa, Homo sapiens
MSLKSERRGIHVDQSDLLCKKGCGYYGNPAWQGFCSKCWREEYHKARQKQIQEDWELAERLQREEEEAFASSQSSQGAQSLTFSKFEEKKTNEKTRKVTTVKKFFSASSRVGSKKEIQEAKAPSPSINRQTSIETDRVSKEFIEFLKTFHKTGQEIYKQTKLFLEGMHYKRDLSIEEQSECAQDFYHNVAERMQTRGKVPPERVEKIMDQIEKYIMTRLYKYVFCPETTDDEKKDLAIQKRIRALRWVTPQMLCVPVNEDIPEVSDMVVKAITDIIEMDSKRVPRDKLACITKCSKHIFNAIKITKNEPASADDFLPTLIYIVLKGNPPRLQSNIQYITRFCNPSRLMTGEDGYYFTNLCCAVAFIEKLDAQSLNLSQEDFDRYMSGQTSPRKQEAESWSPDACLGVKQMYKNLDLLSQLNERQERIMNEAKKLEKDLIDWTDGIAREVQDIVEKYPLEIKPPNQPLAAIDSENVENDKLPPPLQPQVYAG

SEQ ID NO: 58566 - protein, 491 aa, Homo sapiens; identical to SEQ ID NO: 58565

SEQ ID NO: 58567 - protein, 407 aa, Homo sapiens
MSLKSERRGIHVDQSDLLCKKGCGYYGNPAWQGFCSKCWREEYHKARQKQIQEDWELAERLQREEEEAFASSQSSQGAQSLTFSKFEEKKTNEKTRKVTTVKKFFSASSRVGSKKPPERVEKIMDQIEKYIMTRLYKYVFCPETTDDEKKDLAIQKRIRALRWVTPQMLCVPVNEDIPEVSDMVVKAITDIIEMDSKRVPRDKLACITKCSKHIFNAIKITKNEPASADDFLPTLIYIVLKGNPPRLQSNIQYITRFCNPSRLMTGEDGYYFTNLCCAVAFIEKLDAQSLNLSQEDFDRYMSGQTSPRKQEAESWSPDACLGVKQMYKNLDLLSQLNERQERIMNEAKKLEKDLIDWTDGIAREVQDIVEKYPLEIKPPNQPLAAIDSENVENDKLPPPLQPQVYAG

SEQ ID NO: 58568 - protein, 288 aa, Homo sapiens
MVVVTGREPDSRRQDGAMSSSDAEDDFLEPATPTATQAGHALPLLPQEFPEVVPLNIGGAHFTTRLSTLRCYEDTMLAAMFSGRHYIPTDSEGRYFIDRDGTHFGDVLNFLRSGDLPPRERVRAVYKEAQYYAIGPLLEQLENMQPLKGEKVRQAFLGLMPYYKDHLERIVEIARLRAVQRKARFAKLKVCVFKEEMPITPYECPLLNSLRFERSESDGQLFEHHCEVDVSFGPWEAVADVYDLLHCLVTDLSAQGLTVDHQCIGVCDKHLVNHYYCKRPIYEFKITW

SEQ ID NO: 58569 - protein, 220 aa, Homo sapiens
MKGYGHTVPLSDGGKAFCIIYSVIGIPFTLLFLTAVVQRITVHVTRRPVLYFHIRWGFSKQVVAIVHAVLLGFVTVSCFFFIPAAVFSVLEDDWNFLESFYFCFISLSTIGLGDYVPGEGYNQKFRELYKIGITCYLLLGLIAMLVVLETFCELHELKKFRKMFYVKKDKDEDQVHIIEHDQLSFSSITDQAAGMKEDQKQNEPFVATQSSACVDGPANH

SEQ ID NO: 58570 - protein, 336 aa, Homo sapiens
MLQSLAGSSCVRLVERHRSAWCFGFLVLGYLLYLVFGAVVFSSVELPYEDLLRQELRKLKRRFLEEHECLSEQQLEQFLGRVLEASNYGVSVLSNASGNWNWDFTSALFFASTVLSTTGYGHTVPLSDGGKAFCIIYSVIGIPFTLLFLTAVVQRITVHVTRRPVLYFHIRWGFSKQVVAIVHAVLLGFVTVSCFFFIPAAVFSVLEDDWNFLESFYFCFISLSTIGLGDYVPGEGYNQKFRELYKIGITCYLLLGLIAMLVVLETFCELHELKKFRKMFYVKKDKDEDQVHIIEHDQLSFSSITDQAAGMKEDQKQNEPFVATQSSACVDGPANH

SEQ ID NO: 58571 - protein, 242 aa, Homo sapiens
VLRVLSPDLVRRLLNLAVRAFQVPKGESLNFPESTPGYGHTVPLSDGGKAFCIIYSVIGIPFTLLFLTAVVQRITVHVTRRPVLYFHIRWGFSKQVVAIVHAVLLGFVTVSCFFFIPAAVFSVLEDDWNFLESFYFCFISLSTIGLGDYVPGEGYNQKFRELYKIGITCYLLLGLIAMLVVLETFCELHELKKFRKMFYVKKDKDEDQVHIIEHDQLSFSSITDQAAGMKEDQKQNEPFVAT

SEQ ID NO: 58572 - protein, 543 aa, Homo sapiens
MEDGFKGDRTEGCRSDSVAVPAAAPVCQPKSATNGQPPAPAPTPTPRLSISSRATVVARMEGTSQGGLQTVMKWKTVVAIFVVVVVYLVTGGLVFRALEQPFESSQKNTIALEKAEFLRDHVCVSPQELETLIQHALDADNAGVSPIGNSSNNSSHWDLGSAFFFAGTVITTIGYGNIAPSTEGGKIFCILYAIFGIPLFGFLLAGIGDQLGTIFGKSIARVEKVFRKKQVSQTKIRVISTILFILAGCIVFVTIPAVIFKYIEGWTALESIYFVVVTLTTVGFGDFVAGGNAGINYREWYKPLVWFWILVGLAYFAAVLSMIGDWLRVLSKKTKEEVGEIKAHAAEWKANVTAEFRETRRRLSVEIHDKLQRAATIRSMERRRLGLDQRAHSLDMLSPEKRSVFAALDTGRFKASSQESINNRPNNLRLKGPEQLNKHGQGASEDNIINKFGSTSRLTKRKNKDLKKTLPEDVQKIYKTFRNYSLDEEKKEEETEKMCNSDNSSTAMLTDCIQQHAELENGMIPTDTKDREPENNSLLEDRN

SEQ ID NO: 58573 - protein, 543 aa, Homo sapiens
MKFPIETPRKQVNWDPKVAVPAAAPVCQPKSATNGQPPAPAPTPTPRLSISSRATVVARMEGTSQGGLQTVMKWKTVVAIFVVVVVYLVTGGLVFRALEQPFESSQKNTIALEKAEFLRDHVCVSPQELETLIQHALDADNAGVSPIGNSSNNSSHWDLGSAFFFAGTVITTIGYGNIAPSTEGGKIFCILYAIFGIPLFGFLLAGIGDQLGTIFGKSIARVEKVFRKKQVSQTKIRVISTILFILAGCIVFVTIPAVIFKYIEGWTALESIYFVVVTLTTVGFGDFVAGGNAGINYREWYKPLVWFWILVGLAYFAAVLSMIGDWLRVLSKKTKEEVGEIKAHAAEWKANVTAEFRETRRRLSVEIHDKLQRAATIRSMERRRLGLDQRAHSLDMLSPEKRSVFAALDTGRFKASSQESINNRPNNLRLKGPEQLNKHGQGASEDNIINKFGSTSRLTKRKNKDLKKTLPEDVQKIYKTFRNYSLDEEKKEEETEKMCNSDNSSTAMLTDCIQQHAELENGMIPTDTKDREPENNSLLEDRN

SEQ ID NO: 58574 - protein, 538 aa, Homo sapiens
MFFLYTDFFLSLVAVPAAAPVCQPKSATNGQPPAPAPTPTPRLSISSRATVVARMEGTSQGGLQTVMKWKTVVAIFVVVVVYLVTGGLVFRALEQPFESSQKNTIALEKAEFLRDHVCVSPQELETLIQHALDADNAGVSPIGNSSNNSSHWDLGSAFFFAGTVITTIGYGNIAPSTEGGKIFCILYAIFGIPLFGFLLAGIGDQLGTIFGKSIARVEKVFRKKQVSQTKIRVISTILFILAGCIVFVTIPAVIFKYIEGWTALESIYFVVVTLTTVGFGDFVAGGNAGINYREWYKPLVWFWILVGLAYFAAVLSMIGDWLRVLSKKTKEEVGEIKAHAAEWKANVTAEFRETRRRLSVEIHDKLQRAATIRSMERRRLGLDQRAHSLDMLSPEKRSVFAALDTGRFKASSQESINNRPNNLRLKGPEQLNKHGQGASEDNIINKFGSTSRLTKRKNKDLKKTLPEDVQKIYKTFRNYSLDEEKKEEETEKMCNSDNSSTAMLTDCIQQHAELENGMIPTDTKDREPENNSLLEDRN

SEQ ID NO: 58575 - protein, 430 aa, Homo sapiens
MSSRSPRPPPRRSRRRLPRPSCCCCCCRRSHLNEDTGRFVLLAALIGLYLVAGATVFSALESPGEAEARARWGATLRNFSAAHGVAEPELRAFLRHYEAALAAGVRADALRPRWDFPGAFYFVGTVVSTIGFGMTTPATVGGKAFLIAYGLFGCAGTILFFNLFLERIISLLAFIMRACRERQLRRSGLLPATFRRGSALSEADSLAGWKPSVYHVLLILGLFAVLLSCCASAMYTSVEGWDYVDSLYFCFVTFSTIGFGDLVSSQHAAYRNQGLYRLGNFLFILLGVCCIYSLFNVISILIKQVLNWMLRKLSCRCCARCCPAPGAPLARRNAITPGSRLRRRLAALGADPAARDSDAEGRRLSGELISMRDLTASNKVSLALLQKQLSETANGYPRSVCVNTRQNGFSGGVGALGIMNNRLAETSASR

SEQ ID NO: 58576 - protein, 408 aa, Homo sapiens
MAGRGFSWGPGHLNEDNARFLLLAALIVLYLLGGAAVFSALELAHERQAKQRWEERLANFSRGHNLSRDELRGFLRHYEEATRAGIRVDNVRPRWDFTGAFYFVGTVVSTIGFGMTTPATVGGKIFLIFYGLVGCSSTILFFNLFLERLITIIAYIMKSCHQRQLRRRGALPQESLKDAGQCEVDSLAGWKPSVYYVMLILCTASILISCCASAMYTPIEGWSYFDSLYFCFVAFSTIGFGDLVSSQNAHYESQGLYRFANFVFILMGVCCIYSLFNVISILIKQSLNWILRKMDSGCCPQCQRGLLRSRRNVVMPGSVRNRCNISIETDGVAESDTDGRRLSGEMISMKDLLAANKASLAILQKQLSEMANGCPHQTSTLARDNEFSGGVGAFAIMNNRLAETSGDR

SEQ ID NO: 58577 - protein, 330 aa, Homo sapiens
MRRPSVRAAGLVLCTLCYLLVGAAVFDALESEAESGRQRLLVQKRGALRRKFGFSAEDYRELERLALQAEPHRAGRQWKFPGSFYFAITVITTIEYGHAAPGTDSGKVFCMFYALLGIPLTLVTFQSLGERLNAVVRRLLLAAKCCLGLRWTCVSTENLVVAGLLACAATLALGAVAFSHFEGWTFFHAYYYCFITLTTIGFGDFVALQSGEALQRKLPYVAFSFLYILLGLTVIGAFLNLVVLRFLVASADWPERAARTPSPRPPGAPESRGLWLPRRPARSVGSASVFCHVHKLERCARDNLGFSPPSSPGVVRGGQAPRLGARWKSI

SEQ ID NO: 58578 - protein, 262 aa, Homo sapiens
MPSAGLCSCWGGRVLPLLLAYVCYLLLGATIFQLLERQAEAQSRDQFQLEKLRFLENYTCLDQWAMEQFVQVIMEAWVKGVNPKGNSTNPSNWDFGSSFFFAGTVVTTIGYGNLAPSTEAGQVFCVFYALLGIPLNVIFLNHLGTGLRAHLAAIERWEDRPRRSQVLQVLGLALFLTLGTLVILIFPPMVFSHVEGWSFSEGFYFAFITLSTIGFGDYVVGLRQGCGAKAAPGRRPRRGSTAARGVQVTPQDFPISKKGLGS

SEQ ID NO: 58579 - protein, 309 aa, Homo sapiens
MPSAGLCSCWGGRVLPLLLAYVCYLLLGATIFQLLERQAEAQSRDQFQLEKLRFLENYTCLDQWAMEQFVQVIMEAWVKGVNPKGNSTNPSNWDFGSSFFFAGTVVTTIGYGNLAPSTEAGQVFCVFYALLGIPLNVIFLNHLGTGLRAHLAAIERWEDRPRRSQVLQVLGLALFLTLGTLVILIFPPMVFSHVEGWSFSEGFYFAFITLSTIGFGDYVVGTDPSKHYISVYRSLAAIWILLGLAWLALILPLGPLLLHRCCQLWLLSLRQGCGAKAAPGRRPRRGSTAARGVQVTPQDFPISKKGLGS

SEQ ID NO: 58580 - protein, 322 aa, Homo sapiens
MPSAGLCSCWGGRVLPLLLAYVCYLLLGATIFQLLERQAEAQSRDQFQLEKLRFLENYTCLDQWAMEQFVQVIMEAWVKGVNPKGNSTNPSNWDFGSSFFFAGTVVTTIGYGNLAPSTEAGQVFCVFYALLGIPLNVIFLNHLGTGLRAHLAAIERWEDRPRRSQVLQVLGLALFLTLGTLVILIFPPMVFSHVEGWSFSEGFYFAFITLSTIGFGDYVVGHPLNFITPSGLLPSQEPFQTPHGKPESQQIPGSFQKVSSMNVWPLSGMHSPGLAFPLPDCNIPDQERFRPLHPGAWKFWPLPLPSSNSKWAPMWLGSSAQV

SEQ ID NO: 58581 - protein, 294 aa, Homo sapiens
MPSAGLCSCWGGRVLPLLLAYVCYLLLGATIFQLLERQAEAQSRDQFQLEKLRFLENYTCLDQWAMEQFVQVIMEAWVKGVNPKGNSTNPSNWDFGSSFFFAGTVVTTIGYGNLAPSTEAGQVFCVFYALLGIPLNVIFLNHLGTGLRAHLAAIERWEDRPRRSQVLQVLGLALFLTLGTLVILIFPPMVFSHVEGWSFSEGFYFAFITLSTIGFGDYVVGTDPSKHYISVYRSLAAIWILLGLAWLALILPLGPLLLHRCCQLWLLSRGLGVKDGAASDPSGLPRPQKIPISA

SEQ ID NO: 58582 - protein, 197 aa, Homo sapiens
MEQFVQVIMEAWVKGVNPKGNSTNPSNWDFGSSFFFAGTVVTTIGYGNLAPSTEAGQVFCVFYALLGIPLNVIFLNHLGTGLRAHLAAIERWEDRPRRSQVLQVLGLALFLTLGTLVILIFPPMVFSHVEGWSFSEGFYFAFITLSTIGFGDYVVGLRQGCGAKAAPGRRPRRGSTAARGVQVTPQDFPISKKGLGS

SEQ ID NO: 58583 - protein, 332 aa, Homo sapiens
MYRPRARAAPEGRVRGCAVPSTVLLLLAYLAYLALGTGVFWTLEGRAAQDSSRSFQRDKWELLQNFTCLDRPALDSLIRDVVQAYKNGASLLSNTTSMGRWELVGSFFFSVSTITTIGYGNLSPNTMAARLFCIFFALVGIPLNLVVLNRLGHLMQQGVNHWASRLGGTWQDPDKARWLAGSGALLSGLLLFLLLPPLLFSHMEGWSYTEGFYFAFITLSTVGFGDYVIGMNPSQRYPLWYKNMVSLWILFGMAWLALIIKLILSQLETPGRVCSCCHHSSKEDFKSQSWRQGPDREPESHSPQQGCYPEGPMGIIQHLEPSAHAAGCGKDS

SEQ ID NO: 58584 - protein, 271 aa, Homo sapiens
MYRPRARAAPEGRVRGCAVPSTVLLLLAYLAYLALGTGVFWTLEGRAAQDSSRSFQRDKWELLQNFTCLDRPALDSLIRDVVQAYKNGASLLSNTTSMGRWELVGSFFFSVSTITTIGYGNLSPNTMAARLFCIFFALVGIPLNLVVLNRLGHLMQQGVNHWASRLGGTWQDPDKARWLAGSGALLSGLLLFLLLPPLLFSHMEGWSYTEGFYFAFITLSTVGFGDYVIASCLISDTRKPNRDWQTLERTSKSSGGLLKYRFLAGHGGSHL

SEQ ID NO: 58585 - protein, 384 aa, Homo sapiens
MEVSGHPQARRCCPEALGKLFPGLCFLCFLVTYALVGAVVFSAIEDGQVLVAADDGEFEKFLEELCRILNCSETVVEDRKQDLQGHLQKVKPQWFNRTTHWSFLSSLFFCCTVFSTVGYGYIYPVTRLGKYLCMLYALFGIPLMFLVLTDTGDILATILSTSYNRFRKFPFFTRPLLSKWCPKSLFKKKPDPKPADEAVPQIIISAEELPGPKLGTCPSRPSCSMELFERSHALEKQNTLQLPPQAMERSNSCPELVLGRLSYSIISNLDEVGQQVERLDIPLPIIALIVFAYISCAAAILPFWETQLDFENAFYFCFVTLTTIGFGDTVLEHPNFFLFFSIYIIVGMEIVFIAFKLVQNRLIDIYKNVMLFFAKGKFYHLVKK

SEQ ID NO: 58586 - protein, 152 aa, Homo sapiens
MMNPRAKRDFYLAAPDLLDPKSAAQNSKPRLSFSTKPTVLASRVESDTTINVMKWKTVSTIFLVVVLYLIIGATVFKALEQPHEISQRTTIVIQKQTFISQHSCVNSTELDELIQDLETSHHAQKAAKYSVSSMPYWEFPSLVFSWLELEIS

SEQ ID NO: 58587 - protein, 411 aa, Homo sapiens
MAAPDLLDPKSAAQNSKPRLSFSTKPTVLASRVESDTTINVMKWKTVSTIFLVVVLYLIIGATVFKALEQPHEISQRTTIVIQKQTFISQHSCVNSTELDELIQQIVAAINAGIIPLGNTSNQISHWDLGSSFFFAGTVITTIGFGNISPRTEGGKIFCIIYALLGIPLFGFLLAGVGDQLGTIFGKGIAKVEDTFIKWNVSQTKIRIISTIIFILFGCVLFVALPAIIFKHIEGWSALDAIYFVVITLTTIGFGDYVAGGSDIEYLDFYKPVVWFWILVGLAYFAAVLSMIGDWLRVISKKTKEEVGEFRAHAAEWTANVTAEFKETRRRLSVEIYDKFQRATSIKRKLSAELAGNHNQELTPCRRTLSVNHLTSERDVLPPLLKTESIYLNGLTPHCAGEEIAVIENIK

SEQ ID NO: 58588 - protein, 422 aa, Homo sapiens
MMNPRAKRDFYLAAPDLLDPKSAAQNSKPRLSFSTKPTVLASRVESDTTINVMKWKTVSTIFLVVVLYLIIGATVFKALEQPHEISQRTTIVIQKQTFISQHSCVNSTELDELIQQIVAAINAGIIPLGNTSNQISHWDLGSSFFFAGTVITTIGFGNISPRTEGGKIFCIIYALLGIPLFGFLLAGVGDQLGTIFGKGIAKVEDTFIKWNVSQTKIRIISTIIFILFGCVLFVALPAIIFKHIEGWSALDAIYFVVITLTTIGFGDYVAGGSDIEYLDFYKPVVWFWILVGLAYFAAVLSMIGDWLRVISKKTKEEVGEFRAHAAEWTANVTAEFKETRRRLSVEIYDKFQRATSIKRKLSAELAGNHNQELTPCRRTLSVNHLTSERDVLPPLLKTESIYLNGLTPHCAGEEIAVIENIK

SEQ ID NO: 58589 - protein, 426 aa, Homo sapiens
MLPSASRERPGYRAGVAAPDLLDPKSAAQNSKPRLSFSTKPTVLASRVESDTTINVMKWKTVSTIFLVVVLYLIIGATVFKALEQPHEISQRTTIVIQKQTFISQHSCVNSTELDELIQQIVAAINAGIIPLGNTSNQISHWDLGSSFFFAGTVITTIGFGNISPRTEGGKIFCIIYALLGIPLFGFLLAGVGDQLGTIFGKGIAKVEDTFIKWNVSQTKIRIISTIIFILFGCVLFVALPAIIFKHIEGWSALDAIYFVVITLTTIGFGDYVAGGSDIEYLDFYKPVVWFWILVGLAYFAAVLSMIGDWLRVISKKTKEEVGEFRAHAAEWTANVTAEFKETRRRLSVEIYDKFQRATSIKRKLSAELAGNHNQELTPCRRTLSVNHLTSERDVLPPLLKTESIYLNGLTPHCAGEEIAVIENIK

SEQ ID NO: 58590 - protein, 228 aa, Homo sapiens
MMNPRAKRDFYLAAPDLLDPKSAAQNSKPRLSFSTKPTVLASRVESDTTINVMKWKTVSTIFLVVVLYLIIGATVFKALEQPHEISQRTTIVIQKQTFISQHSCVNSTELDELIQQIVAAINAGIIPLGNTSNQISHWDLGSSFFFAGTVITTIGFGNISPRTEGGKIFCIIYALLGIPLFGFLLAGVGDQLGTIFGKGIAKVEDTFIVDPILNIWTSISLSCGSGSL

SEQ ID NO: 58591 - protein, 156 aa, Homo sapiens
MLPSASRERPGYRAGVAAPDLLDPKSAAQNSKPRLSFSTKPTVLASRVESDTTINVMKWKTVSTIFLVVVLYLIIGATVFKALEQPHEISQRTTIVIQKQTFISQHSCVNSTELDELIQDLETSHHAQKAAKYSVSSMPYWEFPSLVFSWLELEIS

SEQ ID NO: 58592 - protein, 152 aa, Homo sapiens; identical to SEQ ID NO: 58586

SEQ ID NO: 58593 - protein, 394 aa, Homo sapiens
MKRQNVRTLALIVCTFTYLLVGAAVFDALESEPELIERQRLELRQQELRARYNLSQGGYEELERVVLRLKPHKAGVQWRFAGSFYFAITVITTIGYGHAAPSTDGGKVFCMFYALLGIPLTLVMFQSLGERINTLVRYLLHRAKKGLGMRRADVSMANMVLIGFFSCISTLCIGAAAFSHYEHWTFFQAYYYCFITLTTIGFGDYVALQKDQALQTQPQYVAFSFVYILTGLTVIGAFLNLVVLRFMTMNAEDEKRDAEHRALLTRNGQAGGGGGGGSAHTTDTASSTAAAGGGGFRNVYAEVLHFQSMCSCLWYKSREKLQYSIPMIIPRDLSTSDTCVEQSHSSPGGGGRYSDTPSRRCLCSGAPRSAISSVSTGLHSLSTFRGLMKRRSSV

SEQ ID NO: 58594 - protein, 271 aa, Homo sapiens
MFQSLGERINTLVRYLLHRAKKGLGMRRADVSMANMVLIGFFSCISTLCIGAAAFSHYEHWTFFQAYYYCFITLTTIGFGDYVALQKDQALQTQPQYVAFSFVYILTGLTVIGAFLNLVVLRFMTMNAEDEKRDAEHRALLTRNGQAGGGGGGGSAHTTDTASSTAAAGGGGFRNVYAEVLHFQSMCSCLWYKSREKLQYSIPMIIPRDLSTSDTCVEQSHSSPGGGGRYSDTPSRRCLCSGAPRSAISSVSTGLHSLSTFRGLMKRRSSV

SEQ ID NO: 58595 - protein, 393 aa, Homo sapiens
MRSTTLLALLALVLLYLVSGALVFRALEQPHEQQAQRELGEVREKFLRAHPCVSDQELGLLIKEVADALGGGADPETNSTSNSSHSAWDLGSAFFFSGTIITTIGYGNVALRTDAGRLFCIFYALVGIPLFGILLAGVGDRLGSSLRHGIGHIEAIFLKWHVPPELVRVLSAMLFLLIGCLLFVLTPTFVFCYMEDWSKLEAIYFVIVTLTTVGFGDYVAGADPRQDSPAYQPLVWFWILLGLAYFASVLTTIGNWLRVVSRRTRAEMGGLTAQAASWTGTVTARVTQRAGPAAPPPEKEQPLLPPPPCPAQPLGRPRSPSPPEKAQPPSPPTASALDYPSENLAFIDESSDTQSERGCPLPRAPRGRRRPNPPRKPVRPRGPGRPRDKGVPV

SEQ ID NO: 58596 - protein, 393 aa, Homo sapiens; identical to SEQ ID NO: 58595

SEQ ID NO: 58597 - protein, 393 aa, Homo sapiens; identical to SEQ ID NO: 58595

SEQ ID NO: 58598 - protein, 418 aa, Homo sapiens
TTAPQEPPARPLQAGSGAGPAPGRAMRSTTLLALLALVLLYLVSGALVFRALEQPHEQQAQRELGEVREKFLRAHPCVSDQELGLLIKEVADALGGGADPETNSTSNSSHSAWDLGSAFFFSGTIITTIGYGNVALRTDAGRLFCIFYALVGIPLFGILLAGVGDRLGSSLRHGIGHIEAIFLKWHVPPELVRVLSAMLFLLIGCLLFVLTPTFVFCYMEDWSKLEAIYFVIVTLTTVGFGDYVAGADPRQDSPAYQPLVWFWILLGLAYFASVLTTIGNWLRVVSRRTRAEMGGLTAQAASWTGTVTARVTQRAGPAAPPPEKEQPLLPPPPCPAQPLGRPRSPSPPEKAQPPSPPTASALDYPSENLAFIDESSDTQSERGCPLPRAPRGRRRPNPPRKPVRPRGPGRPRDKGVPV

SEQ ID NO: 58599 - protein, 455 aa, Homo sapiens
VHASVHTRVRGLWVPWRGRHAHGGRGCRGVCGECRWVTTAPQEPPARPLQAGSGAGPAPGRAMRSTTLLALLALVLLYLVSGALVFRALEQPHEQQAQRELGEVREKFLRAHPCVSDQELGLLIKEVADALGGGADPETNSTSNSSHSAWDLGSAFFFSGTIITTIGYGNVALRTDAGRLFCIFYALVGIPLFGILLAGVGDRLGSSLRHGIGHIEAIFLKWHVPPELVRVLSAMLFLLIGCLLFVLTPTFVFCYMEDWSKLEAIYFVIVTLTTVGFGDYVAGADPRQDSPAYQPLVWFWILLGLAYFASVLTTIGNWLRVVSRRTRAEMGGLTAQAASWTGTVTARVTQRAGPAAPPPEKEQPLLPPPPCPAQPLGRPRSPSPPEKAQPPSPPTASALDYPSENLAFIDESSDTQSERGCPLPRAPRGRRRPNPPRKPVRPRGPGRPRDKGVPV

SEQ ID NO: 58600 - protein, 499 aa, Homo sapiens
MVDRGPLLTSAIIFYLAIGAAIFEVLEEPHWKEAKKNYYTQKLHLLKEFPCLGQEGLDKILEVVSDAAGQGVAITGNQTFNNWNWPNAMIFAATVITTIGYGNVAPKTPAGRLFCVFYGLFGVPLCLTWISALGKFFGGRAKRLGQFLTKRGVSLRKAQITCTVIFIVWGVLVHLVIPPFVFMVTEGWNYIEGLYYSFITISTIGFGDFVAGVNPSANYHALYRYFVELWIYLGLAWLSLFVNWKVSMFVEVHKAIKKRRRRRKESFESSPHSRKALQVKGSTASKDVNIFSFLSKKEETYNDLIKQIGKKAMKTSGGGETGPGPGLGPQGGGLPALPPSLVPLVVYSKNRVPTLEEVSQTLRSKGHVSRSPDEEAVARAPEDSSPAPEVFMNQLDRISEECEPWDAQDYHPLIFQDASITFVNTEAGLSDEETSKSSLEDNLAGEESPQQGAEAKAPLNMGEFPSSSESTFTSTESELSVPYEQLMNEYNKANSPKGT

SEQ ID NO: 58601 - protein, 313 aa, Homo sapiens
MRRGALLAGALAAYAAYLVLGALLVARLEGPHEARLRAELETLRAQLLQRSPCVAAPALDAFVERVLAAGRLGRVVLANASGSANASDPAWDFASALFFASTLITTVGYGYTTPLTDAGKAFSIAFALLGVPTTMLLLTASAQRLSLLLTHVPLSWLSMRWGWDPRRAACWHLVALLGVVVTVCFLVPAVIFAHLEEAWSFLDAFYFCFISLSTIGLGDYVPGEAPGQPYRALYKVLVTVYLFLGLVAMVLVLQTFRHVSDLHGLTELILLPPPCPASFNADEDDRVDILGPQPESHQQLSASSHTDYASIPR

SEQ ID NO: 58602 - protein, 307 aa, Homo sapiens
MGGLRPWSRYGLLVVAHLLALGLGAVVFQALEGPPACRLQAELRAELAAFQAEHRACLPPGALEELLGTALATQAHGVSTLGNSSEGRTWDLPSALLFAASILTTTGYGHMAPLSPGGKAFCMVYAALGLPASLALVATLRHCLLPVLSRPRAWVAVHWQLSPARAALLQAVALGLLVASSFVLLPALVLWGLQGDCSLLGAVYFCFSSLSTIGLEDLLPGRGRSLHPVIYHLGQLALLGYLLLGLLAMLLAVETFSELPQVRAMGKFFRPSGPVTAEDQGGILGQDELALSTLPPAAPASGQAPAC

SEQ ID NO: 58603 - protein, 252 aa, Homo sapiens
MGGLRPWSRYGLLVVAHLLALGLGAVVFQALEGPPACRLQAELRAELAAFQAEHRACLPPGALEELLGTALATQAHGVSTLGNSSEGRTWDLPSALLFAASILTTTGYGHMAPLSPGGKAFCMVYAALGLPASLALVATLRHCLLPVLSRPRAWVAVHWQLSPARAALLQAVALGLLVASSFVLLPALVLWGLQGDCSLLGAVYFCFSSLSTIGLEDLLPGRGRSLHPVIYHLGQLALLGGGTSLQGTAWEG

SEQ ID NO: 58604 - protein, 257 aa, Homo sapiens
MGGLRPWSRYGLLVVAHLLALGLGAVVFQALEGPPACRLQAELRAELAAFQAEHRACLPPGALEELLGTALATQAHGVSTLGNSSEGRTWDLPSALLFAASILTTTGYGHMAPLSPGGKAFCMVYAALGLPASLALVATLRHCLLPVLSRPRAWVAVHWQLSPARAALLQAVALGLLVASSFVLLPALVLWGLQGDCSLLGAVYFCFSSLSTIGLEDLLPGRGRSLHPVIYHLGQLALLGKSSHLTACGGRGKRSLD

SEQ ID NO: 58605 - protein, 252 aa, Homo sapiens; identical to SEQ ID NO: 58603

SEQ ID NO: 58606 - protein, 28 aa, Homo sapiens
  VARIANT 1: note = MOD_RES - Any amino acid
XLHPVIYHLGQLALLGGGTSLQGTAWEG

SEQ ID NO: 58607 - protein, 374 aa, Homo sapiens
MKRQNVRTLSLIVCTFTYLLVGAAVFDALESDHEMREEEKLKAEEIRIKGKYNISSEDYRQLELVILQSEPHRAGVQWKFAGSFYFAITVITTIGYGHAAPGTDAGKAFCMFYAVLGIPLTLVMFQSLGERMNTFVRYLLKRIKKCCGMRNTDVSMENMVTVGFFSCMGTLCIGAAAFSQCEEWSFFHAYYYCFITLTTIGFGDYVALQTKGALQKKPLYVAFSFMYILVGLTVIGAFLNLVVLRFLTMNSEDERRDAEERASLAGNRNSMVIHIPEEPRPSRPRYKADVPDLQSVCSCTCYRSQDYGGRSVAPQNSFSAKLAPHYFHSISYKIEEISPSTLKNSLFPSPISSISPGLHSFTDHQRLMKRRKSV

SEQ ID NO: 58608 - protein, 374 aa, Homo sapiens; identical to SEQ ID NO: 58607

SEQ ID NO: 58609 - protein, 374 aa, Homo sapiens; identical to SEQ ID NO: 58607

SEQ ID NO: 58610 - protein, 1230 aa, Homo sapiens
MARAKLPRSPSEGKAGPGGAPAGAAAPEEPHGLSPLLPARGGGSVGSDVGQRLPVEDFSLDSSLSQVQVEFYVNENTFKERLKLFFIKNQRSSLRIRLFNFSLKLLTCLLYIVRVLLDDPALGIGCWGCPKQNYSFNDSSSEINWAPILWVERKMTLWAIQVIVAIISFLETMLLIYLSYKGNIWEQIFRVSFVLEMINTLPFIITIFWPPLRNLFIPVFLNCWLAKHALENMINDFHRAILRTQSAMFNQVLILFCTLLCLVFTGTCGIQHLERAGENLSLLTSFYFCIVTFSTVGYGDVTPKIWPSQLLVVIMICVALVVLPLQFEELVYLWMERQKSGGNYSRHRAQTEKHVVLCVSSLKIDLLMDFLNEFYAHPRLQDYYVVILCPTEMDVQVRRVLQIPLWSQRVIYLQGSALKDQDLMRAKMDNGEACFILSSRNEVDRTAADHQTILRAWAVKDFAPNCPLYVQILKPENKFHVKFADHVVCEEECKYAMLALNCICPATSTLITLLVHTSRGQEGQESPEQWQRMYGRCSGNEVYHIRMGDSKFFREYEGKSFTYAAFHAHKKYGVCLIGLKREDNKSILLNPGPRHILAASDTCFYINITKEENSAFIFKQEEKRKKRAFSGQGLHEGPARLPVHSIIASMGTVAMDLQGTEHRPTQSGGGGGGSKLALPTENGSGSRRPSIAPVLELADSSALLPCDLLSDQSEDEVTPSDDEGLSVVEYVKGYPPNSPYIGSSPTLCHLLPVKAPFCCLRLDKGCKHNSYEDAKAYGFKNKLIIVSAETAGNGLYNFIVPLRAYYRSRKELNPIVLLLDNKPDHHFLEAICCFPMVYYMEGSVDNLDSLLQCGIIYADNLVVVDKESTMSAEEDYMADAKTIVNVQTMFRLFPSLSITTELTHPSNMRFMQFRAKDSYSLALSKLEKRERENGSNLAFMFRLPFAAGRVFSISMLDTLLYQSFVKDYMITITRLLLGLDTTPGSGYLCAMKITEGDLWIRTYGRLFQKLCSSSAEIPIGIYRTESHVFSTSESQISVNVEDCEDTREVKGPWGSRAGTGGSSQGRHTGGGDPAEHPLLRRKSLQWARRLSRKAPKQAGRAAAAEWISQQRLSLYRRSERQELSELVKNRMKHLGLPTTGYEDVANLTASDVMNRVNLGYLQDEMNDHQNTLSYVLINPPPDTRLEPSDIVYLIRSDPLAHVASSSQSRKSSCSHKLSSCNPETRDETQL

SEQ ID NO: 58611 - protein, 1256 aa, Homo sapiens
MPLPDGARTPGGVCREARGGGYTNRTFEFDDGQCAPRRPCAGDGALLDTAGFKMSDLDSEVLPLPPRYRFRDLLLGDPSFQNDDRVQVEFYVNENTFKERLKLFFIKNQRSSLRIRLFNFSLKLLTCLLYIVRVLLDDPALGIGCWGCPKQNYSFNDSSSEINWAPILWVERKMTLWAIQVIVAIISFLETMLLIYLSYKGNIWEQIFRVSFVLEMINTLPFIITIFWPPLRNLFIPVFLNCWLAKHALENMINDFHRAILRTQSAMFNQVLILFCTLLCLVFTGTCGIQHLERAGENLSLLTSFYFCIVTFSTVGYGDVTPKIWPSQLLVVIMICVALVVLPLQFEELVYLWMERQKSGGNYSRHRAQTEKHVVLCVSSLKIDLLMDFLNEFYAHPRLQDYYVVILCPTEMDVQVRRVLQIPLWSQRVIYLQGSALKDQDLMRAKMDNGEACFILSSRNEVDRTAADHQTILRAWAVKDFAPNCPLYVQILKPENKFHVKFADHVVCEEECKYAMLALNCICPATSTLITLLVHTSRGQEGQESPEQWQRMYGRCSGNEVYHIRMGDSKFFREYEGKSFTYAAFHAHKKYGVCLIGLKREDNKSILLNPGPRHILAASDTCFYINITKEENSAFIFKQEEKRKKRAFSGQGLHEGPARLPVHSIIASMGTVAMDLQGTEHRPTQSGGGGGGSKLALPTENGSGSRRPSIAPVLELADSSALLPCDLLSDQSEDEVTPSDDEGLSVVEYVKGYPPNSPYIGSSPTLCHLLPVKAPFCCLRLDKGCKHNSYEDAKAYGFKNKLIIVSAETAGNGLYNFIVPLRAYYRSRKELNPIVLLLDNKPDHHFLEAICCFPMVYYMEGSVDNLDSLLQCGIIYADNLVVVDKESTMSAEEDYMADAKTIVNVQTMFRLFPSLSITTELTHPSNMRFMQFRAKDSYSLALSKLEKRERENGSNLAFMFRLPFAAGRVFSISMLDTLLYQSFVKDYMITITRLLLGLDTTPGSGYLCAMKITEGDLWIRTYGRLFQKLCSSSAEIPIGIYRTESHVFSTSEPHDLRAQSQISVNVEDCEDTREVKGPWGSRAGTGGSSQGRHTGGGDPAEHPLLRRKSLQWARRLSRKAPKQAGRAAAAEWISQQRLSLYRRSERQELSELVKNRMKHLGLPTTGYEDVANLTASDVMNRVNLGYLQDEMNDHQNTLSYVLINPPPDTRLEPSDIVYLIRSDPLAHVASSSQSRKSSCSHKLSSCNPETRDETQL

SEQ ID NO: 58612 - protein, 1235 aa, Homo sapiens
MPLPDGARTPGGVCREARGGGYTNRTFEFDDGQCAPRRPCAGDGALLDTAGFKMSDLDSEVLPLPPRYRFRDLLLGDPSFQNDDRVQVEFYVNENTFKERLKLFFIKNQRSSLRIRLFNFSLKLLTCLLYIVRVLLDDPALGIGCWGCPKQNYSFNDSSSEINWAPILWVERKMTLWAIQVIVAIISFLETMLLIYLSYKGNIWEQIFRVSFVLEMINTLPFIITIFWPPLRNLFIPVFLNCWLAKHALENMINDFHRAILRTQSAMFNQVLILFCTLLCLVFTGTCGIQHLERAGENLSLLTSFYFCIVTFSTVGYGDVTPKIWPSQLLVVIMICVALVVLPLQFEELVYLWMERQKSGGNYSRHRAQTEKHVVLCVSSLKIDLLMDFLNEFYAHPRLQDYYVVILCPTEMDVQVRRVLQIPLWSQRVIYLQGSALKDQDLMRAKMDNGEACFILSSRNEVDRTAADHQTILRAWAVKDFAPNCPLYVQILKPENKFHVKFADHVVCEEECKYAMLALNCICPATSTLITLLVHTSRGQEGQESPEQWQRMYGRCSGNEVYHIRMGDSKFFREYEGKSFTYAAFHAHKKYGVCLIGLKREDNKSILLNPGPRHILAASDTCFYINITKEENSAFIFKQEEKRKKRAFSGQGLHEGPARLPVHSIIASMGTVAMDLQGTEHRPTQSGGGGGGSKLALPTENGSGSRRPSIAPVLELADSSALLPCDLLSDQSEDEVTPSDDEGLSVVEYVKGYPPNSPYIGSSPTLCHLLPVKAPFCCLRLDKGCKHNSYEDAKAYGFKNKLIIVSAETAGNGLYNFIVPLRAYYRSRKELNPIVLLLDNKPDHHFLEAICCFPMVYYMEGSVDNLDSLLQCGIIYADNLVVVDKESTMSAEEDYMADAKTIVNVQTMFRLFPSLSITTELTHPSNMRFMQFRAKDSYSLALSKLEKRERENGSNLAFMFRLPFAAGRVFSISMLDTLLYQSFVKDYMITITRLLLGLDTTPGSGYLCAMKITEGDLWIRTYGRLFQKLCSSSAEIPIGIYRTESHVFSTSEPHDLRAQSQISVNVEDCEDTREVKGPWGSRAGTGGSSQGRHTGGGDPAEHPLLRRKSLQWARRLSRKAPKQAGRAAAAEWISQQRLSLYRRSERQELSELVKNRMKHLGLPTTGYDEMNDHQNTLSYVLINPPPDTRLEPSDIVYLIRSDPLAHVASSSQSRKSSCSHKLSSCNPETRDETQL

SEQ ID NO: 58613 - protein, 1135 aa, Homo sapiens
MVDLESEVPPLPPRYRFRDLLLGDQGWQNDDRVQVEFYMNENTFKERLKLFFIKNQRSSLRIRLFNFSLKLLSCLLYIIRVLLENPSQGNEWSHIFWVNRSLPLWGLQVSVALISLFETILLGYLSYKGNIWEQILRIPFILEIINAVPFIISIFWPSLRNLFVPVFLNCWLAKHALENMINDLHRAIQRTQSAMFNQVLILISTLLCLIFTCICGIQHLERIGKKLNLFDSLYFCIVTFSTVGFGDVTPETWSSKLFVVAMICVALVVLPIQFEQLAYLWMERQKSGGNYSRHRAQTEKHVVLCVSSLKIDLLMDFLNEFYAHPRLQDYYVVILCPTEMDVQVRRVLQIPMWSQRVIYLQGSALKDQDLLRAKMDDAEACFILSSRCEVDRTSSDHQTILRAWAVKDFAPNCPLYVQILKPENKFHIKFADHVVCEEEFKYAMLALNCICPATSTLITLLVHTSRGQEGQQSPEQWQKMYGRCSGNEVYHIVLEESTFFAEYEGKSFTYASFHAHKKFGVCLIGVRREDNKNILLNPGPRYIMNSTDICFYINITKEENSAFKNQDQQRKSNVSRSFYHGPSRLPVHSIIASMGTVAIDLQDTSCRSASGPTLSLPTEGSKEIRRPSIAPVLEVADTSSIQTCDLLSDQSEDETTPDEEMSSNLEYAKGYPPYSPYIGSSPTFCHLLHEKVPFCCLRLDKSCQHNYYEDAKAYGFKNKLIIVAAETAGNGLYNFIVPLRAYYRPKKELNPIVLLLDNPPDMHFLDAICWFPMVYYMVGSIDNLDDLLRCGVTFAANMVVVDKESTMSAEEDYMADAKTIVNVQTLFRLFSSLSIITELTHPANMRFMQFRAKDCYSLALSKLEKKERERGSNLAFMFRLPFAAGRVFSISMLDTLLYQSFVKDYMISITRLLLGLDTTPGSGFLCSMKITADDLWIRTYARLYQKLCSSTGDVPIGIYRTESQKLTTSESQISISVEEWEDTKDSKEQGHHRSNHRNSTSSDQSDHPLLRRKSMQWARRLSRKGPKHSGKTAEKITQQRLNLYRRSERQELAELVKNRMKHLGLSTVGYDEMNDHQSTLSYILINPSPDTRIELNDVVYLIRPDPLAYLPNSEPSRRNSICNVTGQDSREETQL

SEQ ID NO: 58614 - protein, 1069 aa, Homo sapiens
MVDLESEVPPLPPRYRFRDLLLGDQGWQNDDRVQVEFYMNENTFKERLKLFFIKNQRSSLRIRLFNFSLKLLSCLLYIIRVLLENPSQGNEWSHIFWVNRSLPLWGLQVSVALISLFETILLGYLSYKGNIWEQILRIPFILEIINAVPFIISIFWPSLRNLFVPVFLNCWLAKHALENMINDLHRAIQRTQSAMFNQVLILISTLLCLIFTCICGIQHLERIGKKLNLFDSLYFCIVTFSTVGFGDVTPETWSSKLFVVAMICVALVVLPIQFEQLAYLWMERQKSGGNYSRHRAQTEKHVVLCVSSLKIDLLMDFLNEFYAHPRLQDYYVVILCPTEMDVQVRRVLQIPMWSQRVIYLQGSALKDQDLLRAKMDDAEACFILSSRCEVDRTSSDHQTILRAWAVKDFAPNCPLYVQILKPENKFHIKFADHVVCEEEFKYAMLALNCICPATSTLITLLVHTSRGQFGVCLIGVRREDNKNILLNPGPRYIMNSTDICFYINITKEENSAFKNQDQQRKSNVSRSFYHGPSRLPVHSIIASMGTVAIDLQDTSCRSASGPTLSLPTEGSKEIRRPSIAPVLEVADTSSIQTCDLLSDQSEDETTPDEEMSSNLEYAKGYPPYSPYIGSSPTFCHLLHEKVPFCCLRLDKSCQHNYYEDAKAYGFKNKLIIVAAETAGNGLYNFIVPLRAYYRPKKELNPIVLLLDNPLDDLLRCGVTFAANMVVVDKESTMSAEEDYMADAKTIVNVQTLFRLFSSLSIITELTHPANMRFMQFRAKDCYSLALSKLEKKERERGSNLAFMFRLPFAAGRVFSISMLDTLLYQSFVKDYMISITRLLLGLDTTPGSGFLCSMKITADDLWIRTYARLYQKLCSSTGDVPIGIYRTESQKLTTSEETYILIFLSQISISVEEWEDTKDSKEQGHHRSNHRNSTSSDQSDHPLLRRKSMQWARRLSRKGPKHSGKTAEKITQQRLNLYRRSERQELAELVKNRMKHLGLSTVGYDEMNDHQSTLSYILINPSPDTRIELNDVVYLIRPDPLAYLPNSEPSRRNSICNVTGQDSREETQL

SEQ ID NO: 58615 - protein, 1111 aa, Homo sapiens
MVDLESEVPPLPPRYRFRDLLLGDQGWQNDDRVQVEFYMNENTFKERLKLFFIKNQRSSLRIRLFNFSLKLLSCLLYIIRVLLENPSQGNEWSHIFWVNRSLPLWGLQVSVALISLFETILLGYLSYKGNIWEQILRIPFILEIINAVPFIISIFWPSLRNLFVPVFLNCWLAKHALENMINDLHRAIQRTQSAMFNQVLILISTLLCLIFTCICGIQHLERIGKKLNLFDSLYFCIVTFSTVGFGDVTPETWSSKLFVVAMICVALVVLPIQFEQLAYLWMERQKSGGNYSRHRAQTEKHVVLCVSSLKIDLLMDFLNEFYAHPRLQDYYVVILCPTEMDVQVRRVLQIPMWSQRVIYLQGSALKDQDLLRAKMDDAEACFILSSRCEVDRTSSDHQTILRAWAVKDFAPNCPLYVQILKPENKFHIKFADHVVCEEEFKYAMLALNCICPATSTLITLLVHTSRGQEGQQSPEQWQKMYGRCSGNEVYHIVLEESTFFAEYEGKSFTYASFHAHKKFGVCLIGVRREDNKNILLNPGPRYIMNSTDICFYINITKEENSAFKNQDQQRKSNVSRSFYHGPSRLPVHSIIASMGTVAIDLQDTSCRSASGPTLSLPTEGSKEIRRPSIAPVLEVADTSSIQTCDLLSDQSEDETTPDEEMSSNLEYAKGYPPYSPYIGSSPTFCHLLHEKVPFCCLRLDKSCQHNYYEDAKAYGFKNKLIIVAAETAGNGLYNFIVPLRAYYRPKKELNPIVLLLDNPLDDLLRCGVTFAANMVVVDKESTMSAEEDYMADAKTIVNVQTLFRLFSSLSIITELTHPANMRFMQFRAKDCYSLALSKLEKKERERGSNLAFMFRLPFAAGRVFSISMLDTLLYQSFVKDYMISITRLLLGLDTTPGSGFLCSMKITADDLWIRTYARLYQKLCSSTGDVPIGIYRTESQKLTTSESQISISVEEWEDTKDSKEQGHHRSNHRNSTSSDQSDHPLLRRKSMQWARRLSRKGPKHSGKTAEKITQQRLNLYRRSERQELAELVKNRMKHLGLSTVGYDEMNDHQSTLSYILINPSPDTRIELNDVVYLIRPDPLAYLPNSEPSRRNSICNVTGQDSREETQL

SEQ ID NO: 58616 - protein, 370 aa, Homo sapiens
MPYLHLDHQTILRAWAVKDFAPNCPLYVQILKPENKFHIKFADHVVCEEEFKYAMLALNCICPATSTLITLLVHTSRGQEGQQSPEQWQKMYGRCSGNEVYHIVLEESTFFAEYEGKSFTYASFHAHKKFGVCLIGVRREDNKNILLNPGPRYIMNSTDICFYINITKEENSAFKNQDQQRKSNVSRSFYHGPSRLPVHSIIASMGTVAIDLQDTSCRSASGPTLSLPTEGSKEIRRPSIAPVLEVADTSSIQTCDLLSDQSEDETTPDEEMSSNLEYAKGYPPYSPYIGSSPTFCHLLHEKVPFCCLRLDKSCQHNYYEDAKAYGFKNKLIIVAAETAGNGLYNFIVPLRAYYRPKKELNPIVLLLDNP

SEQ ID NO: 58617 - protein, 523 aa, Homo sapiens
IINDLHRAIQRTQSAMFNQVLILISTLLCLIFTCICGIQHLERIGKKLNLFDSLYFCIVTFSTVGFGDVTPETWSSKLFVVAMICVALVVLPIQFEQLAYLWMERQKSGGNYSRHRAQTEKHVVLCVSSLKIDLLMDFLNEFYAHPRLQDYYVVILCPTEMDVQVRRVLQIPMWSQRVIYLQGSALKDQDLLRAKMDDAEACFILSSRCEVDRTSSDHQTILRAWAVKDFAPNCPLYVQILKPENKFHIKFADHVVCEEEFKYAMLALNCICPATSTLITLLVHTSRGQEGQQSPEQWQKMYGRCSGNEVYHIVLEESTFFAEYEGKSFTYASFHAHKKFGVCLIGVRREDNKNILLNPGPRYIMNSTDICFYINITKEENSAFKNQDQQRKSNVSRSFYHGPSRLPVHSIIASMGTVAIDLQDTSCRSASGPTLSLPTEGSKEIRRPSIAPVLEVADTSSIQTCDLLSDQSEDETTPDEEMSSNLEYAKGYPPYSPYIGSSPTFCHLLHEKVPFCCLRLDKF

SEQ ID NO: 58618 - protein, 500 aa, Homo sapiens
MPSSGRALLDSPLDSGSLTSLDSSVFCSEGEGEPLALGDCFTVNVGGSRFVLSQQALSCFPHTRLGKLAVVVASYRRPGALAAVPSPLELCDDANPVDNEYFFDRSSQAFRYVLHYYRTGRLHVMEQLCALSFLQEIQYWGIDELSIDSCCRDRYFRRKELSETLDFKKDTEDQESQHESEQDFSQGPCPTVRQKLWNILEKPGSSTAARIFGVISIIFVVVSIINMALMSAELSWLDLQLLEILEYVCISWFTGEFVLRFLCVRDRCRFLRKVPNIIDLLAILPFYITLLVESLSGSQTTQELENVGRIVQVLRLLRALRMLKLGRHSTGLRSLGMTITQCYEEVGLLLLFLSVGISIFSTVEYFAEQSIPDTTFTSVPCAWWWATTSMTTVGYGDIRPDTTTGKIVAFMCILSGILVLALPIAIINDRFSACYFTLKLKEAAVRQREALKKLTKNIATDSYISVNLRDVYARSIMEMLRLKGRERASTRSSGGDDFWF

SEQ ID NO: 58619 - protein, 500 aa, Homo sapiens; identical to SEQ ID NO: 58618

SEQ ID NO: 58620 - protein, 376 aa, Homo sapiens
MEQLCALSFLQEIQYWGIDELSIDSCCRDRYFRRKELSETLDFKKDTEDQESQHESEQDFSQGPCPTVRQKLWNILEKPGSSTAARIFGVISIIFVVVSIINMALMSAELSWLDLQLLEILEYVCISWFTGEFVLRFLCVRDRCRFLRKVPNIIDLLAILPFYITLLVESLSGSQTTQELENVGRIVQVLRLLRALRMLKLGRHSTGLRSLGMTITQCYEEVGLLLLFLSVGISIFSTVEYFAEQSIPDTTFTSVPCAWWWATTSMTTVGYGDIRPDTTTGKIVAFMCILSGILVLALPIAIINDRFSACYFTLKLKEAAVRQREALKKLTKNIATDSYISVNLRDVYARSIMEMLRLKGRERASTRSSGGDDFWF

SEQ ID NO: 58621 - protein, 545 aa, Homo sapiens
MLKQSERRRSWSYRPWNTTENEGSQHRRSICSLGARSGSQASIHGWTEGNYNYYIEEDEDGEEEDQWKDDLAEEDQQAGEVTTAKPEGPSDPPALLSTLNVNVGGHSYQLDYCELAGFPKTRLGRLATSTSRSRQLSLCDDYEEQTDEYFFDRDPAVFQLVYNFYLSGVLLVLDGLCPRRFLEELGYWGVRLKYTPRCCRICFEERRDELSERLKIQHELRAQAQVEEAEELFRDMRFYGPQRRRLWNLMEKPFSSVAAKAIGVASSTFVLVSVVALALNTVEEMQQHSGQGEGGPDLRPILEHVEMLCMGFFTLEYLLRLASTPDLRRFARSALNLVDLVAILPLYLQLLLECFTGEGHQRGQTVGSVGKVGQVLRVMRLMRIFRILKLARHSTGLRAFGFTLRQCYQQVGCLLLFIAMGIFTFSAAVYSVEHDVPSTNFTTIPHSWWWAAVSISTVGYGDMYPETHLGRFFAFLCIAFGIILNGMPISILYNKFSDYYSKLKAYEYTTIRRERGEVNFMQRARKKIAECLLGSNPQLTPRQEN

SEQ ID NO: 58622 - protein, 320 aa, Homo sapiens
MLKQSERRRSWSYRPWNTTENEGSQHRRSICSLGARSGSQASIHGWTEGNYNYYIEEDEDGEEEDQWKDDLAEEDQQAGEVTTAKPEGPSDPPALLSTLNVNVGGHSYQLDYCELAGFPKTRLGRLATSTSRSRQLSLCDDYEEQTDEYFFDRDPAVFQLVYNFYLSGVLLVLDGLCPRRFLEELGYWGVRLKYTPRCCRICFEERRDELSERLKIQHLRARLRGGAGAQHRGGDAAALGAGRGRPRPAAHPGARGDAVHGLLHARVPAAPSLHARPEALRAQRPQPGGPGGHPAALPSAAARVLHGRGPPTRPDGGQRG

SEQ ID NO: 58623 - protein, 579 aa, Homo sapiens
MSSCRYNGGVMRPLSNLSASRRNLHEMDSEAQPLQPPASVGGGGGASSPSAAAAAAAAVSSSAPEIVVSKPEHNNSNNLALYGTGGGGSTGGGGGGGGSGHGSSSGTKSSKKKNQNIGYKLGHRRALFEKRKRLSDYALIFGMFGIVVMVIETELSWGAYDKASLYSLALKCLISLSTIILLGLIIVYHAREIQLFMVDNGADDWRIAMTYERIFFICLEILVCAIHPIPGNYTFTWTARLAFSYAPSTTTADVDIILSIPMFLRLYLIARVMLLHSKLFTDASSRSIGALNKINFNTRFVMKTLMTICPGTVLLVFSISLWIIAAWTVRACERYHDQQDVTSNFLGAMWLISITFLSIGYGDMVPNTYCGKGVCLLTGIMGAGCTALVVAVVARKLELTKAEKHVHNFMMDTQLTKRVKNAAANVLRETWLIYKNTKLVKKIDHAKVRKHQRKFLQAIHQLRSVKMEQRKLNDQANTLVDLAKTQNIMYDMISDLNERSEDFEKRIVTLETKLETLIGSIHALPGLISQTIRQQQRDFIEAQMESYDKHVTYNAERSRSSSRRRRSSSTAPPTSSESS

SEQ ID NO: 58624 - protein, 231 aa, Homo sapiens
MWLISITFLSIGYGDMVPNTYCGKGVCLLTGIMGAGCTALVVAVVARKLELTKAEKHVHNFMMDTQLTKRVKNAAANVLRETWLIYKNTKLVKKIDHAKVRKHQRKFLQAIHQLRSVKMEQRKLNDQANTLVDLAKTQNIMYDMISDLNERSEDFEKRIVTLETKLETLIGSIHALPGLISQTIRQQQRDFIEAQMESYDKHVTYNAERSRSSSRRRRSSSTAPPTSSESS

SEQ ID NO: 58625 - protein, 441 aa, Homo sapiens
MSSCRYNGGVMRPLSNLSASRRNLHEMDSEAQPLQPPASVGGGGGASSPSAAAAAAAAVSSSAPEIVVSKPEHNNSNNLALYGTGGGGSTGGGGGGGGSGHGSSSGTKSSKKKNQNIGYKLGHRRALFEKRKRLSDYALIFGMFGIVVMVIETELSWGAYDKASLYSLALKCLISLSTIILLGLIIVYHAREIQLFMVDNGADDWRIAMTYERIFFICLEILVCAIHPIPGNYTFTWTARLAFSYAPSTTTADVDIILSIPMFLRLYLIARVMLLHSKLFTDASSRSIGALNKINFNTRFVMKTLMTICPGTVLLVFSISLWIIAAWTVRACERYHDQQDVTSNFLGAMWLISITFLSIGYGDMVPNTYCGKGVCLLTGIMGAGCTALVVAVVARKLELTKAEKHVHNFMMDTQLTKRVSYYPYIFKENIIVIFSVLGNMA

SEQ ID NO: 58626 - protein, 731 aa, Homo sapiens
MDTSGHFHDSGVGDLDEDPKCPCPSSGDEQQQQQQQQQQQQPPPPAPPAAPQQPLGPSLQPQPPQLQQQQQQQQQQQQQQPPHPLSQLAQLQSQPVHPGLLHSSPTAFRAPPSSNSTAILHPSSRQGSQLNLNDHLLGHSPSSTATSGPGGGSRHRQASPLVHRRDSNPFTEIAMSSCKYSGGVMKPLSRLSASRRNLIEAETEGQPLQLFSPSNPPEIVISSREDNHAHQTLLHHPNATHNHQHAGTTASSTTFPKANKRKNQNIGYKLGHRRALFEKRKRLSDYALIFGMFGIVVMVIETELSWGLYSKDSMFSLALKCLISLSTIILLGLIIAYHTREVQLFVIDNGADDWRIAMTYERILYISLEMLVCAIHPIPGEYKFFWTARLAFSYTPSRAEADVDIILSIPMFLRLYLIARVMLLHSKLFTDASSRSIGALNKINFNTRFVMKTLMTICPGTVLLVFSISLWIIAAWTVRVCERYHDQQDVTSNFLGAMWLISITFLSIGYGDMVPHTYCGKGVCLLTGIMGAGCTALVVAVVARKLELTKAEKHVHNFMMDTQLTKRIKNAAANVLRETWLIYKHTKLLKKIDHAKVRKHQRKFLQAIHQLRSVKMEQRKLSDQANTLVDLSKMQNVMYDLITELNDRSEDLEKQIGSLESKLEHLTASFNSLPLLIADTLRQQQQQLLSAIIEARGVSVAVGTTHTPISDSPIGVSSTSFPTPYTSSSSC

SEQ ID NO: 58627 - protein, 418 aa, Homo sapiens
MFSLALKCLISLSTIILLGLIIAYHTREVQLFVIDNGADDWRIAMTYERILYISLEMLVCAIHPIPGEYKFFWTARLAFSYTPSRAEADVDIILSIPMFLRLYLIARVMLLHSKLFTDASSRSIGALNKINFNTRFVMKTLMTICPGTVLLVFSISLWIIAAWTVRVCERYHDQQDVTSNFLGAMWLISITFLSIGYGDMVPHTYCGKGVCLLTGIMGAGCTALVVAVVARKLELTKAEKHVHNFMMDTQLTKRIKNAAANVLRETWLIYKHTKLLKKIDHAKVRKHQRKFLQAIHQLRSVKMEQRKLSDQANTLVDLSKMQNVMYDLITELNDRSEDLEKQIGSLESKLEHLTASFNSLPLLIADTLRQQQQQLLSAIIEARGVSVAVGTTHTPISDSPIGVSSTSFPTPYTSSSSC

SEQ ID NO: 58628 - protein, 426 aa, Homo sapiens
MERPIKDSMFSLALKCLISLSTIILLGLIIAYHTREVQLFVIDNGADDWRIAMTYERILYISLEMLVCAIHPIPGEYKFFWTARLAFSYTPSRAEADVDIILSIPMFLRLYLIARVMLLHSKLFTDASSRSIGALNKINFNTRFVMKTLMTICPGTVLLVFSISLWIIAAWTVRVCERYHDQQDVTSNFLGAMWLISITFLSIGYGDMVPHTYCGKGVCLLTGIMGAGCTALVVAVVARKLELTKAEKHVHNFMMDTQLTKRIKNAAANVLRETWLIYKHTKLLKKIDHAKVRKHQRKFLQAIHQLRSVKMEQRKLSDQANTLVDLSKMQNVMYDLITELNDRSEDLEKQIGSLESKLEHLTASFNSLPLLIADTLRQQQQQLLSAIIEARGVSVAVGTTHTPISDSPIGVSSTSFPTPYTSSSSC

SEQ ID NO: 58629 - protein, 227 aa, Homo sapiens
PHTLLEDHLLREFFHPLFFLQAPLLLSLPAQYNAFLSGSVWTPGSPREPKQAKERTGAKILVGEIGCLAFFEDIFGARVALGWGLVLQGIQPGPKMDTSGHFHDSGVGDLDEDPKCPCPSSGDEQQQQQQQQQQQQPPPPAPPAAPQQPLGPSLQPQPPQLQQQQQQQQQQQQQQPPHPLSQLAQLQSQPVHPGLLHSSPTAFRPPFVQLHRHPPPFLQARQPAQSQ

SEQ ID NO: 58630 - protein, 427 aa, Homo sapiens
MGGDLVLGLGALRRRKRLLEQEKSLAGWALVLAGTGIGLMVLHAEMLWFGGCSWALYLFLVKCTISISTFLLLCLIVAFHAKEVQLFMTDNGLRDWRVALTGRQAAQIVLELVVCGLHPAPVRGPPCVQDLGAPLTSPQPWPGFLGQGEALLSLAMLLRLYLVPRAVLLRSGVLLNASYRSIGALNQVRFRHWFVAKLYMNTHPGRLLLGLTLGLWLTTAWVLSVAERQAVNATGHLSDTLWLIPITFLTIGYGDVVPGTMWGKIVCLCTGVMGVCCTALLVAVVARKLEFNKAEKHVHNFMMDIQYTKEMKESAARVLQEAWMFYKHTRRKESHAARRHQRKLLAAINAFRQVRLKHRKLREQVNSMVDISKMHMILYDLQQNLSSSHRALEKQIDTLAGKLDALTELLSTALGPRQLPEPSQQSK

SEQ ID NO: 58631 - protein, 295 aa, Homo sapiens
MHDQHFHLLTPLPHRGLSCQRGPAVHDRQRAAGLARGADRAAGNASYRSIGALNQVRFRHWFVAKLYMNTHPGRLLLGLTLGLWLTTAWVLSVAERQAVNATGHLSDTLWLIPITFLTIGYGDVVPGTMWGKIVCLCTGVMGVCCTALLVAVVARKLEFNKAEKHVHNFMMDIQYTKEMKESAARVLQEAWMFYKHTRRKESHAARRHQRKLLAAINAFRQVRLKHRKLREQVNSMVDISKMHMILYDLQQNLSSSHRALEKQIDTLAGKLDALTELLSTALGPRQLPEPSQQSK

SEQ ID NO: 58632 - protein, 372 aa, Homo sapiens
MFKHLRKWVVTRFFGHSRQRARLVSKDGRCNIEFGNVEAQSRFIFFVDIWTTVLDLKWRYKMTIFITAFLGSWFFFGLLWYAVAYIHKDLPEFHPSANHTPCVENINGLTSAFLFSLETQVTIGYGFRCVTEQCATAIFLLIFQSILGVIINSFMCGAILAKISRPKKRAKTITFSKNAVISKRGGKLCLLIRVANLRKSLLIGSHIYGKLLKTTVTPEGETIILDQININFVVDAGNENLFFISPLTIYHVIDHNSPFFHMAAETLLQQDFELVVFLDGTVESTSATCQVRTSYVPEEVLWGYRFAPIVSKTKEGKYRVDFHNFSKTVEVETPHCAMCLYNEKDVRARMKRGYDNPNFILSEVNETDDTKM

SEQ ID NO: 58633 - protein, 372 aa, Homo sapiens; identical to SEQ ID NO: 58632

SEQ ID NO: 58634 - protein, 303 aa, Homo sapiens
MAWWLIAFAHGDLAPSEGTAEPCVTSIHSFSSAFLFSIEVQVTIGFGGRMVTEECPLAILILIVQNIVGLMINAIMLGCIFMKTAQAHRRAETLIFSKHAVIALRHGRLCFMLRVGDLRKSMIISATIHMQVVRKTTSPEGEVVPLHQVDIPMENGVGGNSIFLVAPLIIYHVIDANSPLYDLAPSDLHHHQDLEIIVILEGVVETTGITTQARTSYLADEILWGQRFVPIVAEEDGRYSVDYSKFGNTVKVPTPLCTARQLDEDHSLLEALTLASARGPLRKRSVPMAKAKPKFSISPDSLS

SEQ ID NO: 58635 - protein, 433 aa, Homo sapiens
MTAASRANPYSIVSSEEDGLHLVTMSGANGFGNGKVHTRRRCRNRFVKKNGQCNIEFANMDEKSQRYLADMFTTCVDIRWRYMLLIFSLAFLASWLLFGIIFWVIAVAHGDLEPAEGRGRTPCVMQVHGFMAAFLFSIETQTTIGYGLRCVTEECPVAVFMVVAQSIVGCIIDSFMIGAIMAKMARPKKRAQTLLFSHNAVVALRDGKLCLMWRVGNLRKSHIVEAHVRAQLIKPRVTEEGEYIPLDQIDIDVGFDKGLDRIFLVSPITILHEIDEASPLFGISRQDLETDDFEIVVILEGMVEATAMTTQARSSYLANEILWGHRFEPVLFEEKNQYKIDYSHFHKTYEVPSTPRCSAKDLVENKFLLPSANSFCYENELAFLSRDEEDEADGDQDGRSRDGLSPQARHDFDRLQAGGGVLEQRPYRRESEI

SEQ ID NO: 58636 - protein, 418 aa, Homo sapiens
MSYYGSSYHIINADAKYPGYPPEHIIAEKRRARRRLLHKDGSCNVYFKHIFGEWGSYVVDIFTTLVDTKWRHMFVIFSLSYILSWLIFGSVFWLIAFHHGDLLNDPDITPCVDNVHSFTGAFLFSLETQTTIGYGYRCVTEECSVAVLMVILQSILSCIINTFIIGAALAKMATARKRAQTIRFSYFALIGMRDGKLCLMWRIGDFRPNHVVEGTVRAQLLRYTEDSEGRMTMAFKDLKLVNDQIILVTPVTIVHEIDHESPLYALDRKAVAKDNFEILVTFIYTGDSTGTSHQSRSSYVPREILWGHRFNDVLEVKRKYYKVNCLQFEGSVEVYAPFCSAKQLDWKDQQLHIEKAPPVRESCTSDTKARRRSFSAVAIVSSCENPEETTTSATHEYRETPYQKALLTLNRISVESQM

SEQ ID NO: 58637 - protein, 372 aa, Homo sapiens; identical to SEQ ID NO: 58632

SEQ ID NO: 58638 - protein, 391 aa, Homo sapiens
MNASSRNVFDTLIRVLTESMFKHLRKWVVTRFFGHSRQRARLVSKDGRCNIEFGNVEAQSRFIFFVDIWTTVLDLKWRYKMTIFITAFLGSWFFFGLLWYAVAYIHKDLPEFHPSANHTPCVENINGLTSAFLFSLETQVTIGYGFRCVTEQCATAIFLLIFQSILGVIINSFMCGAILAKISRPKKRAKTITFSKNAVISKRGGKLCLLIRVANLRKSLLIGSHIYGKLLKTTVTPEGETIILDQININFVVDAGNENLFFISPLTIYHVIDHNSPFFHMAAETLLQQDFELVVFLDGTVESTSATCQVRTSYVPEEVLWGYRFAPIVSKTKEGKYRVDFHNFSKTVEVETPHCAMCLYNEKDVRARMKRGYDNPNFILSEVNETDDTKM

SEQ ID NO: 58639 - protein, 372 aa, Homo sapiens; identical to SEQ ID NO: 58632

SEQ ID NO: 58640 - protein, 379 aa, Homo sapiens
MTSVAKVYYSQTTQTESRPLMGPGIRRRRVLTKDGRSNVRMEHIADKRFLYLKDLWTTFIDMQWRYKLLLFSATFAGTWFLFGVVWYLVAVAHGDLLELDPPANHTPCVVQVHTLTGAFLFSLESQTTIGYGFRYISEECPLAIVLLIAQLVLTTILEIFITGTFLAKIARPKKRAETIRFSQHAVVASHNGKPCLMIRVANMRKSLLIGCQVTGKLLQTHQTKEGENIRLNQVNVTFQVDTASDSPFLILPLTFYHVVDETSPLKDLPLRSGEGDFELVLILSGTVESTSATCQVRTSYLPEEILWGYEFTPAISLSASGKYIADFSLFDQVVKVASPSGLRDSTVRYGDPEKLKLEESLREQAEKEGSALSVRISNV

SEQ ID NO: 58641 - protein, 390 aa, Homo sapiens
MLSRKGIIPEEYVLTRLAEDPAKPRYRARQRRARFVSKKGNCNVAHKNIREQGRFLQDVFTTLVDLKWPHTLLIFTMSFLCSWLLFAMAWWLIAFAHGDLAPSEGTAEPCVTSIHSFSSAFLFSIEVQVTIGFGGRMVTEECPLAILILIVQNIVGLMINAIMLGCIFMKTAQAHRRAETLIFSKHAVIALRHGRLCFMLRVGDLRKSMIISATIHMQVVRKTTSPEGEVVPLHQVDIPMENGVGGNSIFLVAPLIIYHVIDANSPLYDLAPSDLHHHQDLEIIVILEGVVETTGITTQARTSYLADEILWGQRFVPIVAEEDGRYSVDYSKFGNTVKVPTPLCTARQLDEDHSLLEALTLASARGPLRKRSVPMAKAKPKFSISPDSLS

SEQ ID NO: 58642 - protein, 433 aa, Homo sapiens; identical to SEQ ID NO: 58635

SEQ ID NO: 58643 - protein, 360 aa, Homo sapiens
MDSSNCKVIAPLLSQRYRRMVTKDGHSTLQMDGAQRGLAYLRDAWGILMDMRWRWMMLVFSASFVVHWLVFAVLWYVLAEMNGDLELDHDAPPENHTICVKYITSFTAAFSFSLETQLTIGYGTMFPSGDCPSAIALLAIQMLLGLMLEAFITGAFVAKIARPKNRAFSIRFTDTAVVAHMDGKPNLIFQVANTRPSPLTSVRVSAVLYQERENGKLYQTSVDFHLDGISSDECPFFIFPLTYYHSITPSSPLATLLQHENPSHFELVVFLSAMQEGTGEICQRRTSYLPSEIMLHHCFASLLTRGSKGEYQIKMENFDKTVPEFPTPLVSKSPNRTDLDIHINGQSIDNFQISETGLTE

SEQ ID NO: 58644 - protein, 94 aa, Homo sapiens
MDSSNCKVIAPLLSQRYRRMVTKDGHSTLQMDGAQRGLAYLRDAWGILMDMRWRWMMLVFSASFVVHWLVFAVLWCFCGEDCPAKKSSFFNSLY

SEQ ID NO: 58645 - protein, 360 aa, Homo sapiens; identical to SEQ ID NO: 58643

SEQ ID NO: 58646 - protein, 375 aa, Homo sapiens
MDAIHIGMSSTPLVKHTAGAGLKANRPRVMSKSGHSNVRIDKVDGIYLLYLQDLWTTVIDMKWRYKLTLFAATFVMTWFLFGVIYYAIAFIHGDLEPGEPISNHTPCIMKVDSLTGAFLFSLESQTTIGYGVRSITEECPHAIFLLVAQLVITTLIEIFITGTFLAKIARPKKRAETIKFSHCAVITKQNGKLCLVIQVANMRKSLLIQCQLSGKLLQTHVTKEGERILLNQATVKFHVDSSSESPFLILPMTFYHVLDETSPLRDLTPQNLKEKEFELVVLLNATVESTSAVCQSRTSYIPEEIYWGFEFVPVVSLSKNGKYVADFSQFEQIRKSPDCTFYCADSEKQQLEEKYRQEDQRERELRTLLLQQSNV

SEQ ID NO: 58647 - protein, 61 aa, Homo sapiens
MDAIHIGMSSTPLVKHTAGAGLKANRPRVMSKSGHSNVRIDKVDGIYLLYLQDLWTTVIDM

SEQ ID NO: 58648 - protein, 156 aa, Homo sapiens
MDAIHIGMSSTPLVKHTAGAGLKANRPRVMSKSGHSNVRIDKVDGIYLLYLQDLWTTVIDMKWRYKLTLFAATFVMTWFLFGVIYYAIAFIHGDLEPGEPISNHTPCIMKVDSLTGAFLFSLESQTTIGYGVRSITEECPHAIFLLVAQLVITTLI

SEQ ID NO: 58649 - protein, 156 aa, Homo sapiens; identical to SEQ ID NO: 58648

SEQ ID NO: 58650 - protein, 375 aa, Homo sapiens; identical to SEQ ID NO: 58646

SEQ ID NO: 58651 - protein, 375 aa, Homo sapiens; identical to SEQ ID NO: 58646

SEQ ID NO: 58652 - protein, 375 aa, Homo sapiens; identical to SEQ ID NO: 58646

SEQ ID NO: 58653 - protein, 375 aa, Homo sapiens; identical to SEQ ID NO: 58646

SEQ ID NO: 58654 - protein, 19 aa, Homo sapiens
MDAIHIGMSSTPLVKHTAG

SEQ ID NO: 58655 - protein, 139 aa, Homo sapiens
MDAIHIGMSSTPLVKHTAGAGLKANRPRVMSKSGHSNVRIDKVDGIYLLYLQDLWTTVIDMKWRYKLTLFAATFVMTWFLFGVIYYAIAFIHGDLEPGEPISNHTPCIMKVDSLTGAFLFSLESQTTIGYGVRSITEEC

SEQ ID NO: 58656 - protein, 245 aa, Homo sapiens
MDAIHIGMSSTPLVKHTAGAGLKANRPRVMSKSGHSNVRIDKVDGIYLLYLQDLWTTVIDMKWRYKLTLFAATFVMTWFLFGVIYYAIAFIHGDLEPGEPISNHTPCIMKVDSLTGAFLFSLESQTTIGYGVRSITEECPHAIFLLVAQLVITTLIEIFITGTFLAKIARPKKRAETIKFSHCAVITKQNGKLCLVIQVANMRKSLLIQCQLSGKLLQTHVTKEGERILLNQATVKFHVDSSSES

SEQ ID NO: 58657 - protein, 39 aa, Homo sapiens
MDAIHIGMSSTPLVKHTAGAGLKANRPRVMSKSGHSNVR

SEQ ID NO: 58658 - protein, 48 aa, Homo sapiens
MDAIHIGMSSTPLVKHTAGAGLKANRPRVMSKSGHSNVRIDKVDGIYL

SEQ ID NO: 58659 - protein, 48 aa, Homo sapiens; identical to SEQ ID NO: 58658

SEQ ID NO: 58660 - protein, 48 aa, Homo sapiens; identical to SEQ ID NO: 58658

SEQ ID NO: 58661 - protein, 25 aa, Homo sapiens
MDAIHIGMSSTPLVKHTAGAGLKAN

SEQ ID NO: 58662 - protein, 48 aa, Homo sapiens; identical to SEQ ID NO: 58658

SEQ ID NO: 58663 - protein, 48 aa, Homo sapiens; identical to SEQ ID NO: 58658

SEQ ID NO: 58664 - protein, 48 aa, Homo sapiens; identical to SEQ ID NO: 58658

SEQ ID NO: 58665 - protein, 418 aa, Homo sapiens; identical to SEQ ID NO: 58636

SEQ ID NO: 58666 - protein, 418 aa, Homo sapiens; identical to SEQ ID NO: 58636

SEQ ID NO: 58667 - protein, 418 aa, Homo sapiens; identical to SEQ ID NO: 58636

SEQ ID NO: 58668 - protein, 427 aa, Homo sapiens
MGSVRTNRYSIVSSEEDGMKLATMAVANGFGNGKSKVHTRQQCRSRFVKKDGHCNVQFINVGEKGQRYLADIFTTCVDIRWRWMLVIFCLAFVLSWLFFGCVFWLIALLHGDLDASKEGKACVSEVNSFTAAFLFSIETQTTIGYGFRCVTDECPIAVFMVVFQSIVGCIIDAFIIGAVMAKMAKPKKRNETLVFSHNAVIAMRDGKLCLMWRVGNLRKSHLVEAHVRAQLLKSRITSEGEYIPLDQIDINVGFDSGIDRIFLVSPITIVHEIDEDSPLYDLSKQDIDNADFEIVVILEGMVEATAMTTQCRSSYLANEILWGHRYEPVLFEEKHYYKVDYSRFHKTYEVPNTPLCSARDLAEKKYILSNANSFCYENEVALTSKEEDDSENGVPESTSTDTPPDIDLHNQASVPLEPRPLRRESEI

SEQ ID NO: 58669 - protein, 427 aa, Homo sapiens; identical to SEQ ID NO: 58668

SEQ ID NO: 58670 - protein, 501 aa, Homo sapiens
MSALRRKFGDDYQVVTTSSSGSGLQPQGPGQDPQQQLVPKKKRQRFVDKNGRCNVQHGNLGSETSRYLSDLFTTLVDLKWRWNLFIFILTYTVAWLFMASMWWVIAYTRGDLNKAHVGNYTPCVANVYNFPSAFLFFIETEATIGYGYRYITDKCPEGIILFLFQSILGSIVDAFLIGCMFIKMSQPKKRAETLMFSEHAVISMRDGKLTLMFRVGNLRNSHMVSAQIRCKLLKSRQTPEGEFLPLDQLELDVGFSTGADQLFLVSPLTICHVIDAKSPFYDLSQRSMQTEQFEIVVILEGIVETTGMTCQARTSYTEDEVLWGHRFFPVISLEEGFFKVDYSQFHATFEVPTPPYSVKEQEEMLLMSSPLIAPAITNSKERHNSVECLDGLDDITTKLPSKLQKITGREDFPKKLLRMSSTTSEKAYSLGDLPMKLQRISSVPGNSEEKLVSKTTKMLSDPMSQSVADLPPKLQKMAGGAARMEGNLPAKLRKMNSDRFT

SEQ ID NO: 58671 - protein, 235 aa, Homo sapiens
MSALRRKFGDDYQVVTTSSSGSGLQPQGPGQDPQQQLVPKKKRQRFVDKNGRCNVQHGNLGSETSRYLSDLFTTLVDLKWRWNLFIFILTYTVAWLFMASMWWVIAYTRGDLNKAHVGNYTPCVANVYNFPSAFLFFIETEATIGYGYRYITDKCPEGIILFLFQSILGSIVDAFLIGCMFIKMSQPKKRAETLMFSEHAVISMRDGKLTLMFRVGNLRNSHMVSAQIRCKLLKG

SEQ ID NO: 58672 - protein, 445 aa, Homo sapiens
MHGHSRNGQAHVPRRKRRNRFVKKNGQCNVYFANLSNKSQRYMADIFTTCVDTRWRYMLMIFSAAFLVSWLFFGLLFWCIAFFHGDLEASPGVPAAGGPAAGGGGAAPVAPKPCIMHVNGFLGAFLFSVETQTTIGYGFRCVTEECPLAVIAVVVQSIVGCVIDSFMIGTIMAKMARPKKRAQTLLFSHHAVISVRDGKLCLMWRVGNLRKSHIVEAHVRAQLIKPYMTQEGEYLPLDQRDLNVGYDIGLDRIFLVSPIIIVHEIDEDSPLYGMGKEELESEDFEIVVILEGMVEATAMTTQARSSYLASEILWGHRFEPVVFEEKSHYKVDYSRFHKTYEVAGTPCCSARELQESKITVLPAPPPPPSAFCYENELALMSQEEEEMEEEAAAAAAVAAGLGLEAGSKEEAGIIRMLEFGSHLDLERMQASLPLDNISYRRESAI

SEQ ID NO: 58673 - protein, 419 aa, Homo sapiens
MAGDSRNAMNQDMEIGVTPWDPKKIPKQARDYVPIATDRTRLLAEGKKPRQRYMEKSGKCNVHHGNVQETYRYLSDLFTTLVDLKWRFNLLVFTMVYTVTWLFFGFIWWLIAYIRGDLDHVGDQEWIPCVENLSGFVSAFLFSIETETTIGYGFRVITEKCPEGIILLLVQAILGSIVNAFMVGCMFVKISQPKKRAETLMFSNNAVISMRDEKLCLMFRVGDLRNSHIVEASIRAKLIKSRQTKEGEFIPLNQTDINVGFDTGDDRLFLVSPLIISHEINQKSPFWEMSQAQLHQEEFEVVVILEGMVEATGMTCQARSSYMDTEVLWGHRFTPVLTLEKGFYEVDYNTFHDTYETNTPSCCAKELAEMKREGRLLQYLPSPPLLGGCAEAGLDAEAEQNEEDEPKGLGGSREARGSV

SEQ ID NO: 58674 - protein, 419 aa, Homo sapiens; identical to SEQ ID NO: 58673

SEQ ID NO: 58675 - protein, 419 aa, Homo sapiens; identical to SEQ ID NO: 58673

SEQ ID NO: 58676 - protein, 423 aa, Homo sapiens
MAKLTESMTNVLEGDSMDQDVESPVAIHQPKLPKQARDDLPRHISRDRTKRKIQRYVRKDGKCNVHHGNVRETYRYLTDIFTTLVDLKWRFNLLIFVMVYTVTWLFFGMIWWLIAYIRGDMDHIEDPSWTPCVTNLNGFVSAFLFSIETETTIGYGYRVITDKCPEGIILLLIQSVLGSIVNAFMVGCMFVKISQPKKRAETLVFSTHAVISMRDGKLCLMFRVGDLRNSHIVEASIRAKLIKSKQTSEGEFIPLNQTDINVGYYTGDDRLFLVSPLIISHEINQQSPFWEISKAQLPKEELEIVVILEGMVEATGMTCQARSSYITSEILWGYRFTPVLTLEDGFYEVDYNSFHETYETSTPSLSAKELAELASRAELPLSWSVSSKLNQHAELETEEEEKNLEEQTERNGDVANLENESKV

SEQ ID NO: 58677 - protein, 423 aa, Homo sapiens; identical to SEQ ID NO: 58676

SEQ ID NO: 58678 - protein, 424 aa, Homo sapiens
MLARKSIIPEEYVLARIAAENLRKPRIRDRLPKARFIAKSGACNLAHKNIREQGRFLQDIFTTLVDLKWRHTLVIFTMSFLCSWLLFAIMWWLVAFAHGDIYAYMEKSGMEKSGLESTVCVTNVRSFTSAFLFSIEVQVTIGFGGRMMTEECPLAITVLILQNIVGLIINAVMLGCIFMKTAQAHRRAETLIFSRHAVIAVRNGKLCFMFRVGDLRKSMIISASVRIQVVKKTTTPEGEVVPIHQLDIPVDNPIESNNIFLVAPLIICHVIDKRSPLYDISATDLANQDLEVIVILEGVVETTGITTQARTSYIAEEIQWGHRFVSIVTEEEGVYSVDYSKFGNTVKVAAPRCSARELDEKPSILIQTLQKSELSHQNSLRKRNSMRRNNSMRRNNSIRRNNSSLMVPKVQFMTPEGNQNTSES

SEQ ID NO: 58679 - protein, 114 aa, Homo sapiens
MLARKSIIPEEYVLARIAAENLRKPRIRDRLPKARFIAKSGACNLAHKNIREQGRFLQDIFTTLVDLKWRHTLVIFTMSFLCSWLLFAIMWWLVAFAHGDIYAYMEKSGMEKSG

SEQ ID NO: 58680 - protein, 424 aa, Homo sapiens; identical to SEQ ID NO: 58678

SEQ ID NO: 58681 - protein, 257 aa, Homo sapiens
MTAFPASGKKRETDYSDGDPLDVHKRLPSSAGEDRAVMLGFAMMGFSVLMFFLLGTTILKPFMLSIQREESTCTAIHTDIMDDWLDCAFTCGVHCHGQGKYPCLQVFVNLSHPGQKALLHYNEEAVQINPKCFYTPKCHQDRNDLLNSALDIKEFFDHKNGTPFSCFYSPASQSEDVILIKKYDQMAIFHCLFWPSLTLLGGALIVGMVRLTQHLSLLCEKYSTVVRDEVGGKVPYIEQHQFKLCIMRRSKGRAEKS

SEQ ID NO: 58682 - protein, 173 aa, Homo sapiens
MQPFSIPVQITLQGSRRRQGRTAFPASGKKRETDYSDGDPLDVHKRLPSSAGEDRAVMLGFAMMGFSVLMFFLLGTTILKPFMLSIQREESTCTAIHTDIMDDWLDCAFTCGVHCHGQGKYPCLQVFVNLSHPGQKALLHYNEEAVQINPKRDVTDCRVKEKQTLTVSDEHKQ

SEQ ID NO: 58683 - protein, 279 aa, Homo sapiens
MDFSPSSELGFHFVAFILLTRHRTAFPASGKKRETDYSDGDPLDVHKRLPSSAGEDRAVMLGFAMMGFSVLMFFLLGTTILKPFMLSIQREESTCTAIHTDIMDDWLDCAFTCGVHCHGQGKYPCLQVFVNLSHPGQKALLHYNEEAVQINPKCFYTPKCHQDRNDLLNSALDIKEFFDHKNGTPFSCFYSPASQSEDVILIKKYDQMAIFHCLFWPSLTLLGGALIVGMVRLTQHLSLLCEKYSTVVRDEVGGKVPYIEQHQFKLCIMRRSKGRAEKS

SEQ ID NO: 58684 - protein, 277 aa, Homo sapiens
MQPFSIPVQITLQGSRRRQGRTAFPASGKKRETDYSDGDPLDVHKRLPSSAGEDRAVMLGFAMMGFSVLMFFLLGTTILKPFMLSIQREESTCTAIHTDIMDDWLDCAFTCGVHCHGQGKYPCLQVFVNLSHPGQKALLHYNEEAVQINPKCFYTPKCHQDRNDLLNSALDIKEFFDHKNGTPFSCFYSPASQSEDVILIKKYDQMAIFHCLFWPSLTLLGGALIVGMVRLTQHLSLLCEKYSTVVRDEVGGKVPYIEQHQFKLCIMRRSKGRAEKS

SEQ ID NO: 58685 - protein, 275 aa, Homo sapiens
MFPLLYELTAVSPSPFPQRTAFPASGKKRETDYSDGDPLDVHKRLPSSAGEDRAVMLGFAMMGFSVLMFFLLGTTILKPFMLSIQREESTCTAIHTDIMDDWLDCAFTCGVHCHGQGKYPCLQVFVNLSHPGQKALLHYNEEAVQINPKCFYTPKCHQDRNDLLNSALDIKEFFDHKNGTPFSCFYSPASQSEDVILIKKYDQMAIFHCLFWPSLTLLGGALIVGMVRLTQHLSLLCEKYSTVVRDEVGGKVPYIEQHQFKLCIMRRSKGRAEKS

SEQ ID NO: 58686 - protein, 257 aa, Homo sapiens; identical to SEQ ID NO: 58681

SEQ ID NO: 58687 - protein, 1178 aa, Homo sapiens
MANGGGGGGGSSGGGGGGGGSSLRMSSNIHANHLSLDASSSSSSSSSSSSSSSSSSSSSSVHEPKMDALIIPVTMEVPCDSRGQRMWWAFLASSMVTFFGGLFIILLWRTLKYLWTVCCHCGGKTKEAQKINNGSSQADGTLKPVDEKEEAVAAEVGWMTSVKDWAGVMISAQTLTGRVLVVLVFALSIGALVIYFIDSSNPIESCQNFYKDFTLQIDMAFNVFFLLYFGLRFIAANDKLWFWLEVNSVVDFFTVPPVFVSVYLNRSWLGLRFLRALRLIQFSEILQFLNILKTSNSIKLVNLLSIFISTWLTAAGFIHLVENSGDPWENFQNNQALTYWECVYLLMVTMSTVGYGDVYAKTTLGRLFMVFFILGGLAMFASYVPEIIELIGNRKKYGGSYSAVSGRKHIVVCGHITLESVSNFLKDFLHKDRDDVNVEIVFLHNISPNLELEALFKRHFTQVEFYQGSVLNPHDLARVKIESADACLILANKYCADPDAEDASNIMRVISIKNYHPKIRIITQMLQYHNKAHLLNIPSWNWKEGDDAICLAELKLGFIAQSCLAQGLSTMLANLFSMRSFIKIEEDTWQKYYLEGVSNEMYTEYLSSAFVGLSFPTVCELCFVKLKLLMIAIEYKSANRESRILINPGNHLKIQEGTLGFFIASDAKEVKRAFFYCKACHDDITDPKRIKKCGCKRLEDEQPSTLSPKKKQRNGGMRNSPNTSPKLMRHDPLLIPGNDQIDNMDSNVKKYDSTGMFHWCAPKEIEKVILTRSEAAMTVLSGHVVVCIFGDVSSALIGLRNLVMPLRASNFHYHELKHIVFVGSIEYLKREWETLHNFPKVSILPGTPLSRADLRAVNINLCDMCVILSANQNNIDDTSLQDKECILASLNIKSMQFDDSIGVLQANSQGFTPPGMDRSSPDNSPVHGMLRQPSITTGVNIPIITELVNDTNVQFLDQDDDDDPDTELYLTQPFACGTAFAVSVLDSLMSATYFNDNILTLIRTLVTGGATPELEALIAEENALRGGYSTPQTLANRDRCRVAQLALLDGPFADLGDGGCYGDLFCKALKTYNMLCFGIYRLRDAHLSTPSQCTKRYVITNPPYEFELVPTDLIFCLMQFDHNAGQSRASLSHSSHSSQSSSKKSSSVHSIPSTANRQNRPKSRESRDKQKYVQEERL

SEQ ID NO: 58688 - protein, 1210 aa, Homo sapiens
SNIHANHLSLDASSSSSSSSSSSSSSSSSSSSSSVHEPKMDALIIPVTMEVPCDSRGQRMWWAFLASSMVTFFGGLFIILLWRTLKYLWTVCCHCGGKTKEAQKINNGSSQADGTLKPVDEKEEAVAAEVGWMTSVKDWAGVMISAQTLTGRVLVVLVFALSIGALVIYFIDSSNPIESCQNFYKDFTLQIDMAFNVFFLLYFGLRFIAANDKLWFWLEVNSVVDFFTVPPVFVSVYLNRSWLGLRFLRALRLIQFSEILQFLNILKTSNSIKLVNLLSIFISTWLTAAGFIHLVENSGDPWENFQNNQALTYWECVYLLMVTMSTVGYGDVYAKTTLGRLFMVFFILGGLAMFASYVPEIIELIGNRKKYGGSYSAVSGRKHIVVCGHITLESVSNFLKDFLHKDRDDVNVEIVFLHNISPNLELEALFKRHFTQVEFYQGSVLNPHDLARVKIESADACLILANKYCADPDAEDASNIMRVISIKNYHPKIRIITQMLQYHNKAHLLNIPSWNWKEGDDAICLAELKLGFIAQSCLAQGLSTMLANLFSMRSFIKIEEDTWQKYYLEGVSNEMYTEYLSSAFVGLSFPTVCELCFVKLKLLMIAIEYKSANRESRILINPGNHLKIQEGTLGFFIASDAKEVKRAFFYCKACHDDITDPKRIKKCGCKRPKMSIYKRMRRACCFDCGRSERDCSCMSGRVRGNVDTLERAFPLSSVSVNDCSTSFRAFEDEQPSTLSPKKKQRNGGMRNSPNTSPKLMRHDPLLIPGNDQIDNMDSNVKKYDSTGMFHWCAPKEIEKVILTRSEAAMTVLSGHVVVCIFGDVSSALIGLRNLVMPLRASNFHYHELKHIVFVGSIEYLKREWETLHNFPKVSILPGTPLSRADLRAVNINLCDMCVILSANQNNIDDTSLQDKECILASLNIKSMQFDDSIGVLQANSQGFTPPGMDRSSPDNSPVHGMLRQPSITTGVNIPIITELVNDTNVQFLDQDDDDDPDTELYLTQPFACGTAFAVSVLDSLMSATYFNDNILTLIRTLVTGGATPELEALIAEENALRGGYSTPQTLANRDRCRVAQLALLDGPFADLGDGGCYGDLFCKALKTYNMLCFGIYRLRDAHLSTPSQCTKRYVITNPPYEFELVPTDLIFCLMQFDHNAGQSRASLSHSSHSSQSSSKKSSSVHSIPSTANRQNRPKSRESRDKQKYVQEERL

SEQ ID NO: 58689 - protein, 1239 aa, Homo sapiens
MANGGGGGGGSSGGGGGGGGSSLRMSSNIHANHLSLDASSSSSSSSSSSSSSSSSSSSSSVHEPKMDALIIPVTMEVPCDSRGQRMWWAFLASSMVTFFGGLFIILLWRTLKYLWTVCCHCGGKTKEAQKINNGSSQADGTLKPVDEKEEAVAAEVGWMTSVKDWAGVMISAQTLTGRVLVVLVFALSIGALVIYFIDSSNPIESCQNFYKDFTLQIDMAFNVFFLLYFGLRFIAANDKLWFWLEVNSVVDFFTVPPVFVSVYLNRSWLGLRFLRALRLIQFSEILQFLNILKTSNSIKLVNLLSIFISTWLTAAGFIHLVENSGDPWENFQNNQALTYWECVYLLMVTMSTVGYGDVYAKTTLGRLFMVFFILGGLAMFASYVPEIIELIGNRKKYGGSYSAVSGRKHIVVCGHITLESVSNFLKDFLHKDRDDVNVEIVFLHNISPNLELEALFKRHFTQVEFYQGSVLNPHDLARVKIESADACLILANKYCADPDAEDASNIMRVISIKNYHPKIRIITQMLQYHNKAHLLNIPSWNWKEGDDAICLAELKLGFIAQSCLAQGLSTMLANLFSMRSFIKIEEDTWQKYYLEGVSNEMYTEYLSSAFVGLSFPTVCELCFVKLKLLMIAIEYKSANRESRILINPGNHLKIQEGTLGFFIASDAKEVKRAFFYCKACHDDITDPKRIKKCGCKRRWEEHCSLWRLESKGNVRRLNYCRGQQTFSVKVKVAARSRYSKDPFEFKKETPNSRLVTEPVEDEQPSTLSPKKKQRNGGMRNSPNTSPKLMRHDPLLIPGNDQIDNMDSNVKKYDSTGMFHWCAPKEIEKVILTRSEAAMTVLSGHVVVCIFGDVSSALIGLRNLVMPLRASNFHYHELKHIVFVGSIEYLKREWETLHNFPKVSILPGTPLSRADLRAVNINLCDMCVILSANQNNIDDTSLQDKECILASLNIKSMQFDDSIGVLQANSQGFTPPGMDRSSPDNSPVHGMLRQPSITTGVNIPIITELVNDTNVQFLDQDDDDDPDTELYLTQPFACGTAFAVSVLDSLMSATYFNDNILTLIRTLVTGGATPELEALIAEENALRGGYSTPQTLANRDRCRVAQLALLDGPFADLGDGGCYGDLFCKALKTYNMLCFGIYRLRDAHLSTPSQCTKRYVITNPPYEFELVPTDLIFCLMQFDHNAGQSRASLSHSSHSSQSSSKKSSSVHSIPSTANRQNRPKSRESRDKQKYVQEERL

SEQ ID NO: 58690 - protein, 1182 aa, Homo sapiens
  VARIANT 1: note = MOD_RES - Any amino acid
XSSSSSSSSSSVHEPKMDALIIPVTMEVPCDSRGQRMWWAFLASSMVTFFGGLFIILLWRTLKYLWTVCCHCGGKTKEAQKINNGSSQADGTLKPVDEKEEAVAAEVGWMTSVKDWAGVMISAQTLTGRVLVVLVFALSIGALVIYFIDSSNPIESCQNFYKDFTLQIDMAFNVFFLLYFGLRFIAANDKLWFWLEVNSVVDFFTVPPVFVSVYLNRSWLGLRFLRALRLIQFSEILQFLNILKTSNSIKLVNLLSIFISTWLTAAGFIHLVENSGDPWENFQNNQALTYWECVYLLMVTMSTVGYGDVYAKTTLGRLFMVFFILGGLAMFASYVPEIIELIGNRKKYGGSYSAVSGRKHIVVCGHITLESVSNFLKDFLHKDRDDVNVEIVFLHNISPNLELEALFKRHFTQVEFYQGSVLNPHDLARVKIESADACLILANKYCADPDAEDASNIMRVISIKNYHPKIRIITQMLQYHNKAHLLNIPSWNWKEGDDAICLAELKLGFIAQSCLAQGLSTMLANLFSMRSFIKIEEDTWQKYYLEGVSNEMYTEYLSSAFVGLSFPTVCELCFVKLKLLMIAIEYKSANRESRILINPGNHLKIQEGTLGFFIASDAKEVKRAFFYCKACHDDITDPKRIKKCGCKRLEDEQPSTLSPKKKQRNGGMRNSPNTSPKLMRHDPLLIPGNDQIDNMDSNVKKYDSTGMFHWCAPKEIEKVILTRSEAAMTVLSGHVVVCIFGDVSSALIGLRNLVMPLRASNFHYHELKHIVFVGSIEYLKREWETLHNFPKVSILPGTPLSRADLRAVNINLCDMCVILSANQNNIDDTSLQDKECILASLNIKSMQFDDSIGVLQANSQGFTPPGMDRSSPDNSPVHGMLRQPSITTGVNIPIITELVNDTNVQFLDQDDDDDPDTELYLTQPFACGTAFAVSVLDSLMSATYFNDNILTLIRTLVTGGATPELEALIAEENALRGGYSTPQTLANRDRCRVAQLALLDGPFADLGDGGCYGDLFCKALKTYNMLCFGIYRLRDAHLSTPSQCTKRYVITNPPYEFELVPTDLIFCLMQFDHNAGQSRASLSHSSHSSQSSSKKSSSVHSIPSTANRQNRPKSRESRDKQNATRMNRMGQAEKKWFTDEPDNAYPRNIQIKPMSTHMANQINQYKSTSSLIPPIREVEDEC

SEQ ID NO: 58691 - protein, 1167 aa, Homo sapiens
PKMDALIIPVTMEVPCDSRGQRMWWAFLASSMVTFFGGLFIILLWRTLKYLWTVCCHCGGKTKEAQKINNGSSQADGTLKPVDEKEEAVAAEVGWMTSVKDWAGVMISAQTLTGRVLVVLVFALSIGALVIYFIDSSNPIESCQNFYKDFTLQIDMAFNVFFLLYFGLRFIAANDKLWFWLEVNSVVDFFTVPPVFVSVYLNRSWLGLRFLRALRLIQFSEILQFLNILKTSNSIKLVNLLSIFISTWLTAAGFIHLVENSGDPWENFQNNQALTYWECVYLLMVTMSTVGYGDVYAKTTLGRLFMVFFILGGLAMFASYVPEIIELIGNRKKYGGSYSAVSGRKHIVVCGHITLESVSNFLKDFLHKDRDDVNVEIVFLHNISPNLELEALFKRHFTQVEFYQGSVLNPHDLARVKIESADACLILANKYCADPDAEDASNIMRVISIKNYHPKIRIITQMLQYHNKAHLLNIPSWNWKEGDDAICLAELKLGFIAQSCLAQGLSTMLANLFSMRSFIKIEEDTWQKYYLEGVSNEMYTEYLSSAFVGLSFPTVCELCFVKLKLLMIAIEYKSANRESRILINPGNHLKIQEGTLGFFIASDAKEVKRAFFYCKACHDDITDPKRIKKCGCKRLEDEQPSTLSPKKKQRNGGMRNSPNTSPKLMRHDPLLIPGNDQIDNMDSNVKKYDSTGMFHWCAPKEIEKVILTRSEAAMTVLSGHVVVCIFGDVSSALIGLRNLVMPLRASNFHYHELKHIVFVGSIEYLKREWETLHNFPKVSILPGTPLSRADLRAVNINLCDMCVILSANQNNIDDTSLQDKECILASLNIKSMQFDDSIGVLQANSQGFTPPGMDRSSPDNSPVHGMLRQPSITTGVNIPIITELVNDTNVQFLDQDDDDDPDTELYLTQPFACGTAFAVSVLDSLMSATYFNDNILTLIRTLVTGGATPELEALIAEENALRGGYSTPQTLANRDRCRVAQLALLDGPFADLGDGGCYGDLFCKALKTYNMLCFGIYRLRDAHLSTPSQCTKRYVITNPPYEFELVPTDLIFCLMQFDHNAGQSRASLSHSSHSSQSSSKKSSSVHSIPSTANRQNRPKSRESRDKQNATRMNRMGQEKKWFTDEPDNAYPRNIQIKPMSTHMANQINQYKSTSSLIPPIREVEDEC

SEQ ID NO: 58692 - protein, 1167 aa, Homo sapiens
  VARIANT 1: note = MOD_RES - Any amino acid
XGGGGGGGGSSLRMSSNIHANHLSLDASSSSSSSSSSSSSSSSSSSSSSVHEPKMDALIIPVTMEVPCDSRGQRMWWAFLASSMVTFFGGLFIILLWRTLKYLWTVCCHCGGKTKEAQKINNGSSQADGTLKPVDEKEEAVAAEVGWMTSVKDWAGVMISAQTLTGRVLVVLVFALSIGALVIYFIDSSNPIESCQNFYKDFTLQIDMAFNVFFLLYFGLRFIAANDKLWFWLEVNSVVDFFTVPPVFVSVYLNRSWLGLRFLRALRLIQFSEILQFLNILKTSNSIKLVNLLSIFISTWLTAAGFIHLVENSGDPWENFQNNQALTYWECVYLLMVTMSTVGYGDVYAKTTLGRLFMVFFILGGLAMFASYVPEIIELIGNRKKYGGSYSAVSGRKHIVVCGHITLESVSNFLKDFLHKDRDDVNVEIVFLHNISPNLELEALFKRHFTQVEFYQGSVLNPHDLARVKIESADACLILANKYCADPDAEDASNIMRVISIKNYHPKIRIITQMLQYHNKAHLLNIPSWNWKEGDDAICLAELKLGFIAQSCLAQGLSTMLANLFSMRSFIKIEEDTWQKYYLEGVSNEMYTEYLSSAFVGLSFPTVCELCFVKLKLLMIAIEYKSANRESRILINPGNHLKIQEGTLGFFIASDAKEVKRAFFYCKACHDDITDPKRIKKCGCKRLEDEQPSTLSPKKKQRNGGMRNSPNTSPKLMRHDPLLIPGNDQIDNMDSNVKKYDSTGMFHWCAPKEIEKVILTRSEAAMTVLSGHVVVCIFGDVSSALIGLRNLVMPLRASNFHYHELKHIVFVGSIEYLKREWETLHNFPKVSILPGTPLSRADLRAVNINLCDMCVILSANQNNIDDTSLQDKECILASLNIKSMQFDDSIGVLQANSQGFTPPGMDRSSPDNSPVHGMLRQPSITTGVNIPIITELVNDTNVQFLDQDDDDDPDTELYLTQPFACGTAFAVSVLDSLMSATYFNDNILTLIRTLVTGGATPELEALIAEENALRGGYSTPQTLANRDRCRVAQLALLDGPFADLGDGGCYGDLFCKALKTYNMLCFGIYRLRDAHLSTPSQCTKRYVITNPPYEFELVPTDLIFCLMQFDHNAGQSRASLSHSSHSSQSSSKKSSSVHSIPSTANRQNRPKSRESRDKQNRKEMVYR

SEQ ID NO: 58693 - protein, 1171 aa, Homo sapiens
MDALIIPVTMEVPCDSRGQRMWWAFLASSMVTFFGGLFIILLWRTLKYLWTVCCHCGGKTKEAQKINNGSSQADGTLKPVDEKEEAVAAEVGWMTSVKDWAGVMISAQTLTGRVLVVLVFALSIGALVIYFIDSSNPIESCQNFYKDFTLQIDMAFNVFFLLYFGLRFIAANDKLWFWLEVNSVVDFFTVPPVFVSVYLNRSWLGLRFLRALRLIQFSEILQFLNILKTSNSIKLVNLLSIFISTWLTAAGFIHLVENSGDPWENFQNNQALTYWECVYLLMVTMSTVGYGDVYAKTTLGRLFMVFFILGGLAMFASYVPEIIELIGNRKKYGGSYSAVSGRKHIVVCGHITLESVSNFLKDFLHKDRDDVNVEIVFLHNISPNLELEALFKRHFTQVEFYQGSVLNPHDLARVKIESADACLILANKYCADPDAEDASNIMRVISIKNYHPKIRIITQMLQYHNKAHLLNIPSWNWKEGDDAICLAELKLGFIAQSCLAQGLSTMLANLFSMRSFIKIEEDTWQKYYLEGVSNEMYTEYLSSAFVGLSFPTVCELCFVKLKLLMIAIEYKSANRESRILINPGNHLKIQEGTLGFFIASDAKEVKRAFFYCKACHDDITDPKRIKKCGCKRPKMSIYKRMRRACCFDCGRSERDCSCMSGRVRGNVDTLERAFPLSSVSVNDCSTSFRAFEDEQPSTLSPKKKQRNGGMRNSPNTSPKLMRHDPLLIPGNDQIDNMDSNVKKYDSTGMFHWCAPKEIEKVILTRSEAAMTVLSGHVVVCIFGDVSSALIGLRNLVMPLRASNFHYHELKHIVFVGSIEYLKREWETLHNFPKVSILPGTPLSRADLRAVNINLCDMCVILSANQNNIDDTSLQDKECILASLNIKSMQFDDSIGVLQANSQGFTPPGMDRSSPDNSPVHGMLRQPSITTGVNIPIITELVNDTNVQFLDQDDDDDPDTELYLTQPFACGTAFAVSVLDSLMSATYFNDNILTLIRTLVTGGATPELEALIAEENALRGGYSTPQTLANRDRCRVAQLALLDGPFADLGDGGCYGDLFCKALKTYNMLCFGIYRLRDAHLSTPSQCTKRYVITNPPYEFELVPTDLIFCLMQFDHNAGQSRASLSHSSHSSQSSSKKSSSVHSIPSTANRQNRPKSRESRDKQNRKEMVYR

SEQ ID NO: 58694 - protein, 1177 aa, Homo sapiens
MANGGGGGGGSSGGGGGGGGSSLRMSSNIHANHLSLDASSSSSSSSSSSSSSSSSSSSSSVHEPKMDALIIPVTMEVPCDSRGQRMWWAFLASSMVTFFGGLFIILLWRTLKYLWTVCCHCGGKTKEAQKINNGSSQADGTLKPVDEKEEAVAAEVGWMTSVKDWAGVMISAQTLTGRVLVVLVFALSIGALVIYFIDSSNPIESCQNFYKDFTLQIDMAFNVFFLLYFGLRFIAANDKLWFWLEVNSVVDFFTVPPVFVSVYLNRSWLGLRFLRALRLIQFSEILQFLNILKTSNSIKLVNLLSIFISTWLTAAGFIHLVENSGDPWENFQNNQALTYWECVYLLMVTMSTVGYGDVYAKTTLGRLFMVFFILGGLAMFASYVPEIIELIGNRKKYGGSYSAVSGRKHIVVCGHITLESVSNFLKDFLHKDRDDVNVEIVFLHNISPNLELEALFKRHFTQVEFYQGSVLNPHDLARVKIESADACLILANKYCADPDAEDASNIMRVISIKNYHPKIRIITQMLQYHNKAHLLNIPSWNWKEGDDAICLAELKLGFIAQSCLAQGLSTMLANLFSMRSFIKIEEDTWQKYYLEGVSNEMYTEYLSSAFVGLSFPTVCELCFVKLKLLMIAIEYKSANRESRILINPGNHLKIQEGTLGFFIASDAKEVKRAFFYCKACHDDITDPKRIKKCGCKRLEDEQPSTLSPKKKQRNGGMRNSPNTSPKLMRHDPLLIPGNDQIDNMDSNVKKYDSTGMFHWCAPKEIEKVILTRSEAAMTVLSGHVVVCIFGDVSSALIGLRNLVMPLRASNFHYHELKHIVFVGSIEYLKREWETLHNFPKVSILPGTPLSRADLRAVNINLCDMCVILSANQNNIDDTSLQDKECILASLNIKSMQFDDSIGVLQANSQGFTPPGMDRSSPDNSPVHGMLRQPSITTGVNIPIITELVNDTNVQFLDQDDDDDPDTELYLTQPFACGTAFAVSVLDSLMSATYFNDNILTLIRTLVTGGATPELEALIAEENALRGGYSTPQTLANRDRCRVAQLALLDGPFADLGDGGCYGDLFCKALKTYNMLCFGIYRLRDAHLSTPSQCTKRYVITNPPYEFELVPTDLIFCLMQFDHNAGQSRASLSHSSHSSQSSSKKSSSVHSIPSTANRQNRPKSRESRDKQKKEMVYR

SEQ ID NO: 58695 - protein, 1205 aa, Homo sapiens
MANGGGGGGGSSGGGGGGGGSSLRMSSNIHANHLSLDASSSSSSSSSSSSSSSSSSSSSSVHEPKMDALIIPVTMEVPCDSRGQRMWWAFLASSMVTFFGGLFIILLWRTLKYLWTVCCHCGGKTKEAQKINNGSSQADGTLKPVDEKEEAVAAEVGWMTSVKDWAGVMISAQTLTGRVLVVLVFALSIGALVIYFIDSSNPIESCQNFYKDFTLQIDMAFNVFFLLYFGLRFIAANDKLWFWLEVNSVVDFFTVPPVFVSVYLNRSWLGLRFLRALRLIQFSEILQFLNILKTSNSIKLVNLLSIFISTWLTAAGFIHLVENSGDPWENFQNNQALTYWECVYLLMVTMSTVGYGDVYAKTTLGRLFMVFFILGGLAMFASYVPEIIELIGNRKKYGGSYSAVSGRKHIVVCGHITLESVSNFLKDFLHKDRDDVNVEIVFLHNISPNLELEALFKRHFTQVEFYQGSVLNPHDLARVKIESADACLILANKYCADPDAEDASNIMRVISIKNYHPKIRIITQMLQYHNKAHLLNIPSWNWKEGDDAICLAELKLGFIAQSCLAQGLSTMLANLFSMRSFIKIEEDTWQKYYLEGVSNEMYTEYLSSAFVGLSFPTVCELCFVKLKLLMIAIEYKSANRESRILINPGNHLKIQEGTLGFFIASDAKEVKRAFFYCKACHDDITDPKRIKKCGCKRLEDEQPSTLSPKKKQRNGGMRNSPNTSPKLMRHDPLLIPGNDQIDNMDSNVKKYDSTGMFHWCAPKEIEKVILTRSEAAMTVLSGHVVVCIFGDVSSALIGLRNLVMPLRASNFHYHELKHIVFVGSIEYLKREWETLHNFPKVSILPGTPLSRADLRAVNINLCDMCVILSANQNNIDDTSLQDKECILASLNIKSMQFDDSIGVLQANSQGFTPPGMDRSSPDNSPVHGMLRQPSITTGVNIPIITELAKPGKLPLVSVNQEKNSGTHILMITELVNDTNVQFLDQDDDDDPDTELYLTQPFACGTAFAVSVLDSLMSATYFNDNILTLIRTLVTGGATPELEALIAEENALRGGYSTPQTLANRDRCRVAQLALLDGPFADLGDGGCYGDLFCKALKTYNMLCFGIYRLRDAHLSTPSQCTKRYVITNPPYEFELVPTDLIFCLMQFDHNAGQSRASLSHSSHSSQSSSKKSSSVHSIPSTANRQNRPKSRESRDKQNRKEMVYR

SEQ ID NO: 58696 - protein, 1225 aa, Homo sapiens
PKMDALIIPVTMEVPCDSRGQRMWWAFLASSMVTFFGGLFIILLWRTLKYLWTVCCHCGGKTKEAQKINNGSSQADGTLKPVDEKEEAVAAEVGWMTSVKDWAGVMISAQTLTGRVLVVLVFALSIGALVIYFIDSSNPIESCQNFYKDFTLQIDMAFNVFFLLYFGLRFIAANDKLWFWLEVNSVVDFFTVPPVFVSVYLNRSWLGLRFLRALRLIQFSEILQFLNILKTSNSIKLVNLLSIFISTWLTAAGFIHLVENSGDPWENFQNNQALTYWECVYLLMVTMSTVGYGDVYAKTTLGRLFMVFFILGGLAMFASYVPEIIELIGNRKKYGGSYSAVSGRKHIVVCGHITLESVSNFLKDFLHKDRDDVNVEIVFLHNISPNLELEALFKRHFTQVEFYQGSVLNPHDLARVKIESADACLILANKYCADPDAEDASNIMRVISIKNYHPKIRIITQMLQYHNKAHLLNIPSWNWKEGDDAICLAELKLGFIAQSCLAQGLSTMLANLFSMRSFIKIEEDTWQKYYLEGVSNEMYTEYLSSAFVGLSFPTVCELCFVKLKLLMIAIEYKSANRESRILINPGNHLKIQEGTLGFFIASDAKEVKRAFFYCKACHDDITDPKRIKKCGCKRPKMSIYKRMRRACCFDCGRSERDCSCMSGRVRGNVDTLERAFPLSSVSVNDCSTSFRAFEDEQPSTLSPKKKQRNGGMRNSPNTSPKLMRHDPLLIPGNDQIDNMDSNVKKYDSTGMFHWCAPKEIEKVILTRSEAAMTVLSGHVVVCIFGDVSSALIGLRNLVMPLRASNFHYHELKHIVFVGSIEYLKREWETLHNFPKVSILPGTPLSRADLRAVNINLCDMCVILSANQNNIDDTSLQDKECILASLNIKSMQFDDSIGVLQANSQGFTPPGMDRSSPDNSPVHGMLRQPSITTGVNIPIITELVNDTNVQFLDQDDDDDPDTELYLTQPFACGTAFAVSVLDSLMSATYFNDNILTLIRTLVTGGATPELEALIAEENALRGGYSTPQTLANRDRCRVAQLALLDGPFADLGDGGCYGDLFCKALKTYNMLCFGIYRLRDAHLSTPSQCTKRYVITNPPYEFELVPTDLIFCLMQFDHNAGQSRASLSHSSHSSQSSSKKSSSVHSIPSTANRQNRPKSRESRDKQNATRMNRMGQEKKWFTDEPDNAYPRNIQIKPMSTHMANQINQYKSTSSLIPPIREVEDEC

SEQ ID NO: 58697 - protein, 1219 aa, Homo sapiens
MANGGGGGGGSSGGGGGGGGSSLRMSSNIHANHLSLDASSSSSSSSSSSSSSSSSSSSSSVHEPKMDALIIPVTMEVPCDSRGQRMWWAFLASSMVTFFGGLFIILLWRTLKYLWTVCCHCGGKTKEAQKINNGSSQADGTLKPVDEKEEAVAAEVGWMTSVKDWAGVMISAQTLTGRVLVVLVFALSIGALVIYFIDSSNPIESCQNFYKDFTLQIDMAFNVFFLLYFGLRFIAANDKLWFWLEVNSVVDFFTVPPVFVSVYLNRSWLGLRFLRALRLIQFSEILQFLNILKTSNSIKLVNLLSIFISTWLTAAGFIHLVENSGDPWENFQNNQALTYWECVYLLMVTMSTVGYGDVYAKTTLGRLFMVFFILGGLAMFASYVPEIIELIGNRKKYGGSYSAVSGRKHIVVCGHITLESVSNFLKDFLHKDRDDVNVEIVFLHNISPNLELEALFKRHFTQVEFYQGSVLNPHDLARVKIESADACLILANKYCADPDAEDASNIMRVISIKNYHPKIRIITQMLQYHNKAHLLNIPSWNWKEGDDAICLAELKLGFIAQSCLAQGLSTMLANLFSMRSFIKIEEDTWQKYYLEGVSNEMYTEYLSSAFVGLSFPTVCELCFVKLKLLMIAIEYKSANRESRILINPGNHLKIQEGTLGFFIASDAKEVKRAFFYCKACHDDITDPKRIKKCGCKRLEDEQPSTLSPKKKQRNGGMRNSPNTSPKLMRHDPLLIPGNDQIDNMDSNVKKYDSTGMFHWCAPKEIEKVILVTGWMPYLGPRVLMTCLDIGVVCMPTDIQSTSPASIKKFKETRSEAAMTVLSGHVVVCIFGDVSSALIGLRNLVMPLRASNFHYHELKHIVFVGSIEYLKREWETLHNFPKVSILPGTPLSRADLRAVNINLCDMCVILSANQNNIDDTSLQDKECILASLNIKSMQFDDSIGVLQANSQGFTPPGMDRSSPDNSPVHGMLRQPSITTGVNIPIITELVNDTNVQFLDQDDDDDPDTELYLTQPFACGTAFAVSVLDSLMSATYFNDNILTLIRTLVTGGATPELEALIAEENALRGGYSTPQTLANRDRCRVAQLALLDGPFADLGDGGCYGDLFCKALKTYNMLCFGIYRLRDAHLSTPSQCTKRYVITNPPYEFELVPTDLIFCLMQFDHNAGQSRASLSHSSHSSQSSSKKSSSVHSIPSTANRQNRPKSRESRDKQKYVQEERL

SEQ ID NO: 58698 - protein, 1240 aa, Homo sapiens
MANGGGGGGGSSGGGGGGGGSSLRMSSNIHANHLSLDASSSSSSSSSSSSSSSSSSSSSSVHEPKMDALIIPVTMEVPCDSRGQRMWWAFLASSMVTFFGGLFIILLWRTLKYLWTVCCHCGGKTKEAQKINNGSSQADGTLKPVDEKEEAVAAEVGWMTSVKDWAGVMISAQTLTGRVLVVLVFALSIGALVIYFIDSSNPIESCQNFYKDFTLQIDMAFNVFFLLYFGLRFIAANDKLWFWLEVNSVVDFFTVPPVFVSVYLNRSWLGLRFLRALRLIQFSEILQFLNILKTSNSIKLVNLLSIFISTWLTAAGFIHLVENSGDPWENFQNNQALTYWECVYLLMVTMSTVGYGDVYAKTTLGRLFMVFFILGGLAMFASYVPEIIELIGNRKKYGGSYSAVSGRKHIVVCGHITLESVSNFLKDFLHKDRDDVNVEIVFLHNISPNLELEALFKRHFTQVEFYQGSVLNPHDLARVKIESADACLILANKYCADPDAEDASNIMRVISIKNYHPKIRIITQMLQYHNKAHLLNIPSWNWKEGDDAICLAELKLGFIAQSCLAQGLSTMLANLFSMRSFIKIEEDTWQKYYLEGVSNEMYTEYLSSAFVGLSFPTVCELCFVKLKLLMIAIEYKSANRESRGRLSILINPGNHLKIQEGTLGFFIASDAKEVKRAFFYCKACHDDITDPKRIKKCGCKRPKMSIYKRMRRACCFDCGRSERDCSCMSGRVRGNVDTLERAFPLSSVSVNDCSTSFRAFEDEQPSTLSPKKKQRNGGMRNSPNTSPKLMRHDPLLIPGNDQIDNMDSNVKKYDSTGMFHWCAPKEIEKVILTRSEAAMTVLSGHVVVCIFGDVSSALIGLRNLVMPLRASNFHYHELKHIVFVGSIEYLKREWETLHNFPKVSILPGTPLSRADLRAVNINLCDMCVILSANQNNIDDTSLQDKECILASLNIKSMQFDDSIGVLQANSQGFTPPGMDRSSPDNSPVHGMLRQPSITTGVNIPIITELVNDTNVQFLDQDDDDDPDTELYLTQPFACGTAFAVSVLDSLMSATYFNDNILTLIRTLVTGGATPELEALIAEENALRGGYSTPQTLANRDRCRVAQLALLDGPFADLGDGGCYGDLFCKALKTYNMLCFGIYRLRDAHLSTPSQCTKRYVITNPPYEFELVPTDLIFCLMQFDHNAGQSRASLSHSSHSSQSSSKKSSSVHSIPSTANRQNRPKSRESRDKQKYVQEERL

SEQ ID NO: 58699 - protein, 989 aa, Homo sapiens [sequence omitted]

SEQ ID NO: 58700 - protein, 180 aa, Homo sapiens
  VARIANT 1: note = MOD_RES - Any amino acid
XKIRIITQMLQYHNKAHLLNIPSWNWKEGDDAICLAELKLGFIAQSCLAQGLSTMLANLFSMRSFIKIEEDTWQKYYLEGVSNEMYTEYLSSAFVGLSFPTVCELCFVKLKLLMIAIEYKSANRESRILINPGNHLKIQEGTLGFFIASDAKEVKRPPQLCLPLAAQKRCFQSDKLDIFI

SEQ ID NO: 58701 - protein, 886 aa, Homo sapiens
  VARIANT 1: note = MOD_RES - Any amino acid
XNSGDPWENFQNNQALTYWECVYLLMVTMSTVGYGDVYAKTTLGRLFMVFFILGGLAMFASYVPEIIELIGNRKKYGGSYSAVSGRKHIVVCGHITLESVSNFLKDFLHKDRDDVNVEIVFLHNISPNLELEALFKRHFTQVEFYQGSVLNPHDLARVKIESADACLILANKYCADPDAEDASNIMRVISIKNYHPKIRIITQMLQYHNKAHLLNIPSWNWKEGDDAICLAELKLGFIAQSCLAQGLSTMLANLFSMRSFIKIEEDTWQKYYLEGVSNEMYTEYLSSAFVGLSFPTVCELCFVKLKLLMIAIEYKSANRESRILINPGNHLKIQEGTLGFFIASDAKEVKRAFFYCKACHDDITDPKRIKKCGCKRLKVAARSRYSKDPFEFKKETPNSRLVTEPVEDEQPSTLSPKKKQRNGGMRNSPNTSPKLMRHDPLLIPGNDQIDNMDSNVKKYDSTGMFHWCAPKEIEKVILTRSEAAMTVLSGHVVVCIFGDVSSALIGLRNLVMPLRASNFHYHELKHIVFVGSIEYLKREWETLHNFPKVSILPGTPLSRADLRAVNINLCDMCVILSANQNNIDDTSLQDKECILASLNIKSMQFDDSIGVLQANSQGFTPPGMDRSSPDNSPVHGMLRQPSITTGVNIPIITELVNDTNVQFLDQDDDDDPDTELYLTQPFACGTAFAVSVLDSLMSATYFNDNILTLIRTLVTGGATPELEALIAEENALRGGYSTPQTLANRDRCRVAQLALLDGPFADLGDGGCYGDLFCKALKTYNMLCFGIYRLRDAHLSTPSQCTKRYVITNPPYEFELVPTDLIFCLMQFDHNAGQSRASLSHSSHSSQSSSKKSSSVHSIPSTANRQNRPKSRESRDKQKYVQEERL

SEQ ID NO: 58702 - protein, 264 aa, Homo sapiens
  VARIANT 1: note = MOD_RES - Any amino acid
XVISIKNYHPKIRIITQMLQYHNKAHLLNIPSWNWKEGDDAICLAELKLGFIAQSCLAQGLSTMLANLFSMRSFIKIEEDTWQKYYLEGVSNEMYTEYLSSAFVGLSFPTVCELCFVKLKLLMIAIEYKSANRESRILINPGNHLKIQEGTLGFFIASDAKEVKRAFFYCKACHDDITDPKRIKKCGCKRLAGSQDTHPDSFYHQAVNASSYLHGGGQMWPVSSSSSILLHYLRRQMPGPARLPLELSCQGSALSPNPDLYCMK

SEQ ID NO: 58703 - protein, 1209 aa, Homo sapiens
SNIHANHLSLDASSSSSSSSSSSSSSSSSSSSSSVHEPKMDALIIPVTMEVPCDSRGQRMWWAFLASSMVTFFGGLFIILLWRTLKYLWTVCCHCGGKTKEAQKINNGSSQADGTLKPVDEKEEAVAAEVGWMTSVKDWAGVMISAQTLTGRVLVVLVFALSIGALVIYFIDSSNPIESCQNFYKDFTLQIDMAFNVFFLLYFGLRFIAANDKLWFWLEVNSVVDFFTVPPVFVSVYLNRSWLGLRFLRALRLIQFSEILQFLNILKTSNSIKLVNLLSIFISTWLTAAGFIHLVENSGDPWENFQNNQALTYWECVYLLMVTMSTVGYGDVYAKTTLGRLFMVFFILGGLAMFASYVPEIIELIGNRKKYGGSYSAVSGRKHIVVCGHITLESVSNFLKDFLHKDRDDVNVEIVFLHNISPNLELEALFKRHFTQVEFYQGSVLNPHDLARVKIESADACLILANKYCADPDAEDASNIMRVISIKNYHPKIRIITQMLQYHNKAHLLNIPSWNWKEGDDAICLAELKLGFIAQSCLAQGLSTMLANLFSMRSFIKIEEDTWQKYYLEGVSNEMYTEYLSSAFVGLSFPTVCELCFVKLKLLMIAIEYKSANRESRILINPGNHLKIQEGTLGFFIASDAKEVKRAFFYCKACHDDITDPKRIKKCGCKRPKMSIYKRMRRACCFDCGRSERDCSCMSGRVRGNVDTLERAFPLSSVSVNDCSTSFRAFEDEQPSTLSPKKKQRNGGMRNSPNTSPKLMRHDPLLIPGNDQIDNMDSNVKKYDSTGMFHWCAPKEIEKVILTRSEAAMTVLSGHVVVCIFGDVSSALIGLRNLVMPLRASNFHYHELKHIVFVGSIEYLKREWETLHNFPKVSILPGTPLSRADLRAVNINLCDMCVILSANQNNIDDTSLQDKECILASLNIKSMQFDDSIGVLQANSQGFTPPGMDRSSPDNSPVHGMLRQPSITTGVNIPIITELVNDTNVQFLDQDDDDDPDTELYLTQPFACGTAFAVSVLDSLMSATYFNDNILTLIRTLVTGGATPELEALIAEENALRGGYSTPQTLANRDRCRVAQLALLDGPFADLGDGGCYGDLFCKALKTYNMLCFGIYRLRDAHLSTPSQCTKRYVITNPPYEFELVPTDLIFCLMQFDHNAGQSRASLSHSSHSSQSSSKKSSSVHSIPSTANRQNRPKSRESRDKQKKEMVYR

SEQ ID NO: 58704 - protein, 191 aa, Homo sapiens
MVKKLVMAQKRGETRALCLGVTMVVCAVITYYILVTTVLPLYQKSVWTQESKCHLIETNIRDQEELKGKKVPQYPCLWVNVSAAGRWAVLYHTEDTRDQNQQCSYIPGSVDNYQTARADVEKVRAKFQEQQVFYCFSAPRGNETSVLFQRLYGPQALLFSLFWPTFLLTGGLLIIAMVKSNQYLSILAAQK

SEQ ID NO: 58705 - protein, 130 aa, Homo sapiens
MVKKLVMAQKRGETRALCLGVTMVVCAVITYYILVTTVLPLYQKSVWTQESKCHLIETNIRDQEELKGKKVPQYPCLWVNVSAAGRWAVLYHTEDTRDQNQQVLNWRDGDTSLYPCQVCEPVPNCPCPRG

SEQ ID NO: 58706 - protein, 210 aa, Homo sapiens
MAKLRVAYEYTEAEDKSIRLGLFLIISGVVSLFIFGFCWLSPALQDLQATEANCTVLSVQQIGEVFECTFTCGADCRGTSQYPCVQVYVNNSESNSRALLHSDEHQLLTNPKCSYIPPCKRENQKNLESVMNWQQYWKDEIGSQPFTCYFNQHQRPDDVLLHRTHDEIVLLHCFLWPLVTFVVGVLIVVLTICAKSLAVKAEAMKKRKFS

SEQ ID NO: 58707 - protein, 752 aa, Homo sapiens
MKPAEHATMFLIVLGCLILAVLTTFKEYETVSGDWLLLLETFAIFIFGAEFALRIWAAGCCCRYKGWRGRLKFARKPLCMLDIFVLIASVPVVAVGNQGNVLATSLRSLRFLQILRMLRMDRRGGTWKLLGSAICAHSKELITAWYIGFLTLILSSFLVYLVEKDVPEVDAQGEEMKEEFETYADALWWGLITLATIGYGDKTPKTWEGRLIAATFSLIGVSFFALPAGILGSGLALKVQEQHRQKHFEKRRKPAAELIQAAWRYYATNPNRIDLVATWRFYESVVSFPFFRKEQLEAASSQKLGLLDRVRLSNPRGSNTKGKLFTPLNVDAIEESPSKEPKPVGLNNKERFRTAFRMKAYAFWQSSEDAGTGDPMAEDRGYGNDFPIEDMIPTLKAAIRAVRILQFRLYKKKFKETLRPYDVKDVIEQYSAGHLDMLSRIKYLQTRIDMIFTPGPPSTPKHKKSQKGSAFTFPSQQSPRNEPYVARPSTSEIEDQSMMGKFVKVERQVQDMGKKLDFLVDMHMQHMERLQVQVTEYYPTKGTSSPAEAEKKEDNRYSDLKTIICNYSETGPPEPPYSFHQVTIDKVSPYGFFAHDPVNLPRGGPSSGKVQATPPSSATTYVERPTVLPILTLLDSRVSCHSQADLQGPYSDRISPRQRRSITRDSDTPLSLMSVNHEELERSPSGFSISQDRDDYVFGPNGGSSWMREKRYLAEGETDTDTDPFTPSGSMPLSSTGDGISDSVWTPSNKPI

SEQ ID NO: 58708 - protein, 477 aa, Homo sapiens
MTGQSLWDVSEANVEDGEIRINVGGFKRRLRSHTLLRFPETRLGRLLLCHSREAILELCDDYDDVQREFYFDRNPELFPYVLHFYHTGKLHVMAELCVFSFSQEIEYWGINEFFIDSCCSYSYHGRKVEPEQEKWDEQSDQESTTSSFDEILAFYNDASKFDGQPLGNFRRQLWLALDNPGYSVLSRVFSILSILVVMGSIITMCLNSLPDFQIPDSQGNPGEDPRFEIVEHFGIAWFTFELVARFAVAPDFLKFFKNALNLIDLMSIVPFYITLVVNLVVESTPTLANLGRVAQVLRLMRIFRILKLARHSTGLRSLGATLKYSYKEVGLLLLYLSVGISIFSVVAYTIEKEENEGLATIPACWWWATVSMTTVGYGDVVPGTTAGKLTASACILAGILVVVLPITLIFNKFSHFYRRQKQLESAMRSCDFGDGMKEVPSVNLRDYYAHKVKSLMASLTNMSRSSPSELSLNDSLR

SEQ ID NO: 58709 - protein, 477 aa, Homo sapiens; identical to SEQ ID NO: 58708

SEQ ID NO: 58710 - protein, 491 aa, Homo sapiens
MVFGEFFHRPGQDEELVNLNVGGFKQSVDQSTLLRFPHTRLGKLLTCHSEEAILELCDDYSVADKEYYFDRNPSLFRYVLNFYYTGKLHVMEELCVFSFCQEIEYWGINELFIDSCCSNRYQERKEENHEKDWDQKSHDVSTDSSFEESSLFEKELEKFDTLRFGQLRKKIWIRMENPAYCLSAKLIAISSLSVVLASIVAMCVHSMSEFQNEDGEVDDPVLEGVEIACIAWFTGELAVRLAAAPCQKKFWKNPLNIIDFVSIIPFYATLAVDTKEEESEDIENMGKVVQILRLMRIFRILKLARHSVGLRSLGATLRHSYHEVGLLLLFLSVGISIFSVLIYSVEKDDHTSSLTSIPICWWWATISMTTVGYGDTHPVTLAGKLIASTCIICGILVVALPITIIFNKFSKYYQKQKDIDVDQCSEDAPEKCHELPYFNIRDIYAQRMHTFITSLSSVGIVVSDPDSTDASSIEDNEDICNTTSLENCTAK

SEQ ID NO: 58711 - protein, 491 aa, Homo sapiens; identical to SEQ ID NO: 58710

SEQ ID NO: 58712 - protein, 74 aa, Homo sapiens
MVFGEFFHRPGQDEELVNLNVGGFKQSVDQSTLLRFPHTRLGKLLTCHSEEAILELCDDYSVADKEYYFDRNPS

SEQ ID NO: 58713 - protein, 129 aa, Homo sapiens
MILSNTTAVTPFLTKLWQETVQQGGNMSGLARRSPRSSDGKLEALYVLMVLGFFGFFTLGIMLSYIRSKKLEHSNDPFNVYIESDAWQEKDKAYVQARVLESYRSCYVVENHLAIEQPNTHLPETKPSP

SEQ ID NO: 58714 - protein, 129 aa, Homo sapiens; identical to SEQ ID NO: 58713

SEQ ID NO: 58715 - protein, 129 aa, Homo sapiens; identical to SEQ ID NO: 58713

SEQ ID NO: 58716 - protein, 129 aa, Homo sapiens; identical to SEQ ID NO: 58713

SEQ ID NO: 58717 - protein, 129 aa, Homo sapiens; identical to SEQ ID NO: 58713

SEQ ID NO: 58718 - protein, 129 aa, Homo sapiens; identical to SEQ ID NO: 58713

SEQ ID NO: 58719 - protein, 123 aa, Homo sapiens
MSTLSNFTQTLEDVFRRIFITYMDNWRQNTTAEQEALQAKVDAENFYYVILYLMVMIGMFSFIIVAILVSTVKSKRREHSNDPYHQYIVEDWQEKYKSQILNLEESKATIHENIGAAGFKMSP

SEQ ID NO: 58720 - protein, 103 aa, Homo sapiens
METTNGTETWYESLHAVLKALNATLHSNLLCRPGPGLGPDNQTEERRASLPGRDDNSYMYILFVMFLFAVTVGSLILGYTRSRKVDKRSDPYHVYIKNRVSMI

SEQ ID NO: 58721 - protein, 103 aa, Homo sapiens; identical to SEQ ID NO: 58720

SEQ ID NO: 58722 - protein, 12 aa, Homo sapiens
METTNGTETWYE

SEQ ID NO: 58723 - protein, 50 aa, Homo sapiens
METTNGTETWYESLHAVLKALNATLHSNLLCRPGPGLGPDNQTEERRASL

SEQ ID NO: 58724 - protein, 53 aa, Homo sapiens
METTNGTETWYESLHAVLKALNATLHSNLLCRPGPGLGPDNQTEERRASLPGR

SEQ ID NO: 58725 - protein, 99 aa, Homo sapiens
METTNGTETWYESLHAVLKALNATLHSNLLCRPGPGLGPDNQTEERRASLPGRDDNSYMYILFVMFLFAVTVGSLILGYTRSRKVDKRSDPYHVYIKNR

SEQ ID NO: 58726 - protein, 170 aa, Homo sapiens
MLKMEPLNSTHPGTAASSSPLESRAAGGGSGNGNEYFYILVVMSFYGIFLIGIMLGYMKSKRREKKSSLLLLYKDEERLWGEAMKPLPVVSGLRSVQVPLMLNMLQESVAPALSCTLCSMEGDSVSSESSSPDVHLTIQEEGADDELEETSETPLNESSEGSSENIHQNS

SEQ ID NO: 58727 - protein, 676 aa, Homo sapiens [sequence omitted]

SEQ ID NO: 58728 - protein, 549 aa, Homo sapiens
MDFLIVLVCLIFSVLSTIEQYAALATGTLFWMEIVLVVFFGTEYVVRLWSAGCRSKYVGLWGRLRFARKPISIIDLIVVVASMVVLCVGSKGQVFATSAIRGIRFLQILRMLHVDRQGGTWRLLGSVVFIHRQELITTLYIGFLGLIFSSYFVYLAEKDAVNESGRVEFGSYADALWWGVVTVTTIGYGDKVPQTWVGKTIASCFSVFAISFFALPAGILGSGFALKVQQKQRQKHFNRQIPAAASLIQTAWRCYAAENPDSSTWKIYIRKAPRSHTLLSPSPKPKKSVVVKKKKFKLDKDNGVTPGEKMLTVPHITCDPPEERRLDHFSVDGYDSSVRKSPTLLEVSMPHFMRTNSFAEDLDLEGETLLTPITHISQLREHHRATIKVIRRMQYFVAKKKFQQARKPYDVRDVIEQYSQGHLNLMVRIKELQRRLDQSIGKPSLFISVSEKSKDRGSNTIGARLNRVEDKVTQLDQRLALITDMLHQLLSLHGGSTPGSGGPPREGGAHITQPCGSGGSVDPELFLPSNTLPTYEQLTVPRRGPDEGS

SEQ ID NO: 58729 - protein, 393 aa, Homo sapiens
MVQKSRNGGVYPGPSGEKKLKVGFVGLDPGAPDSTRDGALLIAGSEAPKRGSILSKPRAGGAGAGKPPKRNAFYRKLQNFLYNVLERPRGWAFIYHAYVFLLVFSCLVLSVFSTIKEYEKSSEGALYILEIVTIVVFGVEYFVRIWAAGCCCRYRGWRGRLKFARKPFCVIDIMVLIASIAVLAAGSQGNVFATSALRSLRFLQILRMIRMDRRGGTWKLLGSVVYAHSKELVTAWYIGFLCLILASFLVYLAEKGENDHFDTYADALWWGLITLTTIGYGDKYPQTWNGRLLAATFTLIGVSFFALPAGILGSGFALKVQEQHRQKHFEKRRNPAAGLIQSAWRFYATNLSRTDLHSTWQYYERTVTVPMYRYRRRAPATKQLFHFLFSICS

SEQ ID NO: 58730 - protein, 868 aa, Homo sapiens
MVQKSRNGGVYPGPSGEKKLKVGFVGLDPGAPDSTRDGALLIAGSEAPKRGSILSKPRAGGAGAGKPPKRNAFYRKLQNFLYNVLERPRGWAFIYHAYVFLLVFSCLVLSVFSTIKEYEKSSEGALYILEIVTIVVFGVEYFVRIWAAGCCCRYRGWRGRLKFARKPFCVIDIMVLIASIAVLAAGSQGNVFATSALRSLRFLQILRMIRMDRRGGTWKLLGSVVYAHSKELVTAWYIGFLCLILASFLVYLAEKGENDHFDTYADALWWGLITLTTIGYGDKYPQTWNGRLLAATFTLIGVSFFALPAGILGSGFALKVQEQHRQKHFEKRRNPAAGLIQSAWRFYATNLSRTDLHSTWQYYERTVTVPMYRLIPPLNQLELLRNLKSKSGLAFRKDPPPEPSPSPRGVAAKGKGSPQAQTVRRSPSADQSLEDSPSKVPKSWSFGDRSRARQAFRIKGAASRQNSEEASLPGEDIVDDKSCPCEFVTEDLTPGLKVSIRAVCVMRFLVSKRKFKESLRPYDVMDVIEQYSAGHLDMLSRIKSLQSRIDMIVGPPPPSTPRHKKYPTKGPTAPPRESPQYSPRVDQIVGRGPAITDKDRTKGPAEAELPEDPSMMGRLGKVEKQVLSMEKKLDFLVNIYMQRMGIPPTETEAYFGAKEPEPAPPYHSPEDSREHVDRHGCIVKIVRSSSSTGQKNFSAPPAAPPVQCPPSTSWQPQSHPRQGHGTSPVGDHGSLVRIPPPPAHERSLSAYGGGNRASMEFLRQEDTPGCRPPEGNLRDSDTSISIPSVDHEELERSFSGFSISQSKENLDALNSCYAAVAPCAKVRPYIAEGESDTDSDLCTPCGPPPRSATGEGPFGDVGWAGPRK

SEQ ID NO: 58731 - protein, 880 aa, Homo sapiens
MVQKSRNGGVYPGPSGEKKLKVGFVGLDPGAPDSTRDGALLIAGSEAPKRGSILSKPRAGGAGAGKPPKRNAFYRKLQNFLYNVLERPRGWAFIYHAYVFLLVFSCLVLSVFSTIKEYEKSSEGALYILEIVTIVVFGVEYFVRIWAAGCCCRYRGWRGRLKFARKPFCVIDIMVLIASIAVLAAGSQGNVFATSALRSLRFLQILRMIRMDRRGGTWKLLGSVVYAHSKELVTAWYIGFLCLILASFLVYLAEKGENDHFDTYADALWWGLITLTTIGYGDKYPQTWNGRLLAATFTLIGVSFFALPAGILGSGFALKVQEQHRQKHFEKRRNPAAGLIQSAWRFYATNLSRTDLHSTWQYYERTVTVPMYRLIPPLNQLELLRNLKSKSGLAFRKDPPPEPSPSQKVSLKDRVFSSPRGVAAKGKGSPQAQTVRRSPSADQSLEDSPSKVPKSWSFGDRSRARQAFRIKGAASRQNSEEASLPGEDIVDDKSCPCEFVTEDLTPGLKVSIRAVCVMRFLVSKRKFKESLRPYDVMDVIEQYSAGHLDMLSRIKSLQTGIDMIVGPPPPSTPRHKKYPTKGPTAPPRESPQYSPRVDQIVGRGPAITDKDRTKGPAEAELPEDPSMMGRLGKVEKQVLSMEKKLDFLVNIYMQRMGIPPTETEAYFGAKEPEPAPPYHSPEDSREHVDRHGCIVKIVRSSSSTGQKNFSAPPAAPPVQCPPSTSWQPQSHPRQGHGTSPVGDHGSLVRIPPPPAHERSLSAYGGGNRASMEFLRQEDTPGCRPPEGNLRDSDTSISIPSVDHEELERSFSGFSISQSKENLDALNSCYAAVAPCAKVRPYIAEGESDTDSDLCTPCGPPPRSATGEGPFGDVGWAGPRK

SEQ ID NO: 58732 - protein, 854 aa, Homo sapiens
MVQKSRNGGVYPGPSGEKKLKVGFVGLDPGAPDSTRDGALLIAGSEAPKRGSILSKPRAGGAGAGKPPKRNAFYRKLQNFLYNVLERPRGWAFIYHAYVFLLVFSCLVLSVFSTIKEYEKSSEGALYILEIVTIVVFGVEYFVRIWAAGCCCRYRGWRGRLKFARKPFCVIDIMVLIASIAVLAAGSQGNVFATSALRSLRFLQILRMIRMDRRGGTWKLLGSVVYAHSKELVTAWYIGFLCLILASFLVYLAEKGENDHFDTYADALWWGLITLTTIGYGDKYPQTWNGRLLAATFTLIGVSFFALPAGILGSGFALKVQEQHRQKHFEKRRNPAAGLIQSAWRFYATNLSRTDLHSTWQYYERTVTVPMYSSQTQTYGASRLIPPLNQLELLRNLKSKSGLAFRKDPPPEPSPSQKVSLKDRVFSSPRGVAAKGKGSPQAQTVRRSPSADQSLEDSPSKVPKSWSFGDRSRARQAFRIKGAASRQNSEEASLPGEDIVDDKSCPCEFVTEDLTPGLKVSIRAVCVMRFLVSKRKFKESLRPYDVMDVIEQYSAGHLDMLSRIKSLQSRVDQIVGRGPAITDKDRTKGPAEAELPEDPSMMGRLGKVEKQVLSMEKKLDFLVNIYMQRMGIPPTETEAYFGAKEPEPAPPYHSPEDSREHVDRHGCIVKIVRSSSSTGQKNFSAPPAAPPVQCPPSTSWQPQSHPRQGHGTSPVGDHGSLVRIPPPPAHERSLSAYGGGNRASMEFLRQEDTPGCRPPEGNLRDSDTSISIPSVDHEELERSFSGFSISQSKENLDALNSCYAAVAPCAKVRPYIAEGESDTDSDLCTPCGPPPRSATGEGPFGDVGWAGPRK

SEQ ID NO: 58733 - protein, 872 aa, Homo sapiens [sequence omitted]

SEQ ID NO: 58734 - protein, 872 aa, Homo sapiens
MVQKSRNGGVYPGPSGEKKLKVGFVGLDPGAPDSTRDGALLIAGSEAPKRGSILSKPRAGGAGAGKPPKRNAFYRKLQNFLYNVLERPRGWAFIYHAYVFLLVFSCLVLSVFSTIKEYEKSSEGALYILEIVTIVVFGVEYFVRIWAAGCCCRYRGWRGRLKFARKPFCVIDIMVLIASIAVLAAGSQGNVFATSALRSLRFLQILRMIRMDRRGGTWKLLGSVVYAHSKELVTAWYIGFLCLILASFLVYLAEKGENDHFDTYADALWWGLITLTTIGYGDKYPQTWNGRLLAATFTLIGVSFFALPAGILGSGFALKVQEQHRQKHFEKRRNPAAGLIQSAWRFYATNLSRTDLHSTWQYYERTVTVPMYSSQTQTYGASRLIPPLNQLELLRNLKSKSGLAFRKDPPPEPSPSKGSPCRGPLCGCCPGRSSQKVSLKDRVFSSPRGVAAKGKGSPQAQTVRRSPSADQSLEDSPSKVPKSWSFGDRSRARQAFRIKGAASRQNSEEASLPGEDIVDDKSCPCEFVTEDLTPGLKVSIRAVCVMRFLVSKRKFKESLRPYDVMDVIEQYSAGHLDMLSRIKSLQSQVDQIVGRGPAITDKDRTKGPAEAELPEDPSMMGRLGKVEKQVLSMEKKLDFLVNIYMQRMGIPPTETEAYFGAKEPEPAPPYHSPEDSREHVDRHGCIVKIVRSSSSTGQKNFSAPPAAPPVQCPPSTSWQPQSHPRQGHGTSPVGDHGSLVRIPPPPAHERSLSAYGGGNRASMEFLRQEDTPGCRPPEGNLRDSDTSISIPSVDHEELERSFSGFSISQSKENLDALNSCYAAVAPCAKVRPYIAEGESDTDSDLCTPCGPPPRSATGEGPFGDVGWAGPRK

SEQ ID NO: 58735 - protein, 844 aa, Homo sapiens
MVQKSRNGGVYPGPSGEKKLKVGFVGLDPGAPDSTRDGALLIAGSEAPKRGSILSKPRAGGAGAGKPPKRNAFYRKLQNFLYNVLERPRGWAFIYHAYVFLLVFSCLVLSVFSTIKEYEKSSEGALYILEIVTIVVFGVEYFVRIWAAGCCCRYRGWRGRLKFARKPFCVIDIMVLIASIAVLAAGSQGNVFATSALRSLRFLQILRMIRMDRRGGTWKLLGSVVYAHSKELVTAWYIGFLCLILASFLVYLAEKGENDHFDTYADALWWGLITLTTIGYGDKYPQTWNGRLLAATFTLIGVSFFALPAGILGSGFALKVQEQHRQKHFEKRRNPAAGLIQSAWRFYATNLSRTDLHSTWQYYERTVTVPMYRLIPPLNQLELLRNLKSKSGLAFRKDPPPEPSPSQKVSLKDRVFSSPRGVAAKGKGSPQAQTVRRSPSADQSLEDSPSKVPKSWSFGDRSRARQAFRIKGAASRQNSEEASLPGEDIVDDKSCPCEFVTEDLTPGLKVSIRAVCVMRFLVSKRKFKESLRPYDVMDVIEQYSAGHLDMLSRIKSLQSRVDQIVGRGPAITDKDRTKGPAEAELPEDPSMMGRLGKVEKQVLSMEKKLDFLVNIYMQRMGIPPTETEAYFGAKEPEPAPPYHSPEDSREHVDRHGCIVKIVRSSSSTGQKNFSAPPAAPPVQCPPSTSWQPQSHPRQGHGTSPVGDHGSLVRIPPPPAHERSLSAYGGGNRASMEFLRQEDTPGCRPPEGNLRDSDTSISIPSVDHEELERSFSGFSISQSKENLDALNSCYAAVAPCAKVRPYIAEGESDTDSDLCTPCGPPPRSATGEGPFGDVGWAGPRK

SEQ ID NO: 58736 - protein, 436 aa, Homo sapiens
MVQKSRNGGVYPGPSGEKKLKVGFVGLDPGAPDSTRDGALLIAGSEAPKRGSILSKPRAGGAGAGKPPKRNAFYRKLQNFLYNVLERPRGWAFIYHAYVFLLVFSCLVLSVFSTIKEYEKSSEGALYILEIVTIVVFGVEYFVRIWAAGCCCRYRGWRGRLKFARKPFCVIDIMVLIASIAVLAAGSQGNVFATSALRSLRFLQILRMIRMDRRGGTWKLLGSVVYAHSKELVTAWYIGFLCLILASFLVYLAEKGENDHFDTYADALWWGLITLTTIGYGDKYPQTWNGRLLAATFTLIGVSFFALPAGILGSGFALKVQEQHRQKHFEKRRNPAAGLIQSAWRFYATNLSRTDLHSTWQYYERTVTVPMYRLIPPLNQLELLRNLKSKSGLAFRKDPPPEPSPRSVPPAATLVSAVCTAVWSLSHTCAQPVMEM

SEQ ID NO: 58737 - protein, 615 aa, Homo sapiens
MVQKSRNGGVYPGPSGEKKLKVGFVGLDPGAPDSTRDGALLIAGSEAPKRGSILSKPRAGGAGAGKPPKRNAFYRKLQNFLYNVLERPRGWAFIYHAYVFLLVFSCLVLSVFSTIKEYEKSSEGALYILEIVTIVVFGVEYFVRIWAAGCCCRYRGWRGRLKFARKPFCVIDIMVLIASIAVLAAGSQGNVFATSALRSLRFLQILRMIRMDRRGGTWKLLGSVVYAHSKELVTAWYIGFLCLILASFLVYLAEKGENDHFDTYADALWWGLITLTTIGYGDKYPQTWNGRLLAATFTLIGVSFFALPAGILGSGFALKVQEQHRQKHFEKRRNPAAGLIQSAWRFYATNLSRTDLHSTWQYYERTVTVPMYRLIPPLNQLELLRNLKSKSGLAFRKDPPPEPSPSQKVSLKDRVFSSPRGVAAKGKGSPQAQTVRRSPSADQSLEDSPSKVPKSWSFGDRSRARQAFRIKGAASRQNSEEASLPGEDIVDDKSCPCEFVTEDLTPGLKVSIRAVCVMRFLVSKRKFKESLRPYDVMDVIEQYSAGHLDMLSRIKSLQSRQEPRLPVQQGTRTGWASGTKPTVAHGGSAGGVWAGPPPHPRRPLSASVVSSQSLF

SEQ ID NO: 58738 - protein, 880 aa, Homo sapiens
MVQKSRNGGVYPGPSGEKKLKVGFVGLDPGAPDSTRDGALLIAGSEAPKRGSILSKPRAGGAGAGKPPKRNAFYRKLQNFLYNVLERPRGWAFIYHAYVFLLVFSCLVLSVFSTIKEYEKSSEGALYILEIVTIVVFGVEYFVRIWAAGCCCRYRGWRGRLKFARKPFCVIDIMVLIASIAVLAAGSQGNVFATSALRSLRFLQILRMIRMDRRGGTWKLLGSVVYAHSKELVTAWYIGFLCLILASFLVYLAEKGENDHFDTYADALWWGLITLTTIGYGDKYPQTWNGRLLAATFTLIGVSFFALPAGILGSGFALKVQEQHRQKHFEKRRNPAAGLIQSAWRFYATNLSRTDLHSTWQYYERTVTVPMYRLIPPLNQLELLRNLKSKSGLAFRKDPPPEPSPSQKVSLKDRVFSSPRGVAAKGKGSPQAQTVRRSPSADQSLEDSPSKVPKSWSFGDRSRARQAFRIKGAASRQNSEEASLPGEDIVDDKSCPCEFVTEDLTPGLKVSIRAVCVMRFLVSKRKFKESLRPYDVMDVIEQYSAGHLDMLSRIKSLQSRIDMIVGPPPPSTPRHKKYPTKGPTAPPRESPQYSPRVDQIVGRGPAITDKDRTKGPAEAELPEDPSMMGRLGKVEKQVLSMEKKLDFLVNIYMQRMGIPPTETEAYFGAKEPEPAPPYHSPEDSREHVDRHGCIVKIVRSSSSTGQKNFSAPPAAPPVQCPPSTSWQPQSHPRQGHGTSPVGDHGSLVRIPPPPAHERSLSAYGGGNRASMEFLRQEDTPGCRPPEGNLRDSDTSISIPSVDHEELERSFSGFSISQSKENLDALNSCYAAVAPCAKVRPYIAEGESDTDSDLCTPCGPPPRSATGEGPFGDVGWAGPRK

SEQ ID NO: 58739 - protein, 842 aa, Homo sapiens
MVQKSRNGGVYPGPSGEKKLKVGFVGLDPGAPDSTRDGALLIAGSEAPKRGSILSKPRAGGAGAGKPPKRNAFYRKLQNFLYNVLERPRGWAFIYHAYVFLLVFSCLVLSVFSTIKEYEKSSEGALYILEIVTIVVFGVEYFVRIWAAGCCCRYRGWRGRLKFARKPFCVIDIMVLIASIAVLAAGSQGNVFATSALRSLRFLQILRMIRMDRRGGTWKLLGSVVYAHSKELVTAWYIGFLCLILASFLVYLAEKGENDHFDTYADALWWGLITLTTIGYGDKYPQTWNGRLLAATFTLIGVSFFALPAGILGSGFALKVQEQHRQKHFEKRRNPAAGLIQSAWRFYATNLSRTDLHSTWQYYERTVTVPMYSSQTQTYGASRLIPPLNQLELLRNLKSKSGLAFRKDPPPEPSPSPRGVAAKGKGSPQAQTVRRSPSADQSLEDSPSKVPKSWSFGDRSRARQAFRIKGAASRQNSEEASLPGEDIVDDKSCPCEFVTEDLTPGLKVSIRAVCVMRFLVSKRKFKESLRPYDVMDVIEQYSAGHLDMLSRIKSLQSRVDQIVGRGPAITDKDRTKGPAEAELPEDPSMMGRLGKVEKQVLSMEKKLDFLVNIYMQRMGIPPTETEAYFGAKEPEPAPPYHSPEDSREHVDRHGCIVKIVRSSSSTGQKNFSAPPAAPPVQCPPSTSWQPQSHPRQGHGTSPVGDHGSLVRIPPPPAHERSLSAYGGGNRASMEFLRQEDTPGCRPPEGNLRDSDTSISIPSVDHEELERSFSGFSISQSKENLDALNSCYAAVAPCAKVRPYIAEGESDTDSDLCTPCGPPPRSATGEGPFGDVGWAGPRK

SEQ ID NO: 58740 - protein, 841 aa, Homo sapiens
MVQKSRNGGVYPGPSGEKKLKVGFVGLDPGAPDSTRDGALLIAGSEAPKRGSILSKPRAGGAGAGKPPKRNAFYRKLQNFLYNVLERPRGWAFIYHAYVFLLVFSCLVLSVFSTIKEYEKSSEGALYILEIVTIVVFGVEYFVRIWAAGCCCRYRGWRGRLKFARKPFCVIDIMVLIASIAVLAAGSQGNVFATSALRSLRFLQILRMIRMDRRGGTWKLLGSVVYAHSKELVTAWYIGFLCLILASFLVYLAEKGENDHFDTYADALWWGLITLTTIGYGDKYPQTWNGRLLAATFTLIGVSFFALPAGILGSGFALKVQEQHRQKHFEKRRNPAAGLIQSAWRFYATNLSRTDLHSTWQYYERTVTVPMYSSQTQTYGASRLIPPLNQLELLRNLKSKSGLAFRKDPPPEPSPSPRGVAAKGKGSPQAQTVRRSPSADQSLEDSPSKVPKSWSFGDRSRARQAFRIKGAASRQNSEASLPGEDIVDDKSCPCEFVTEDLTPGLKVSIRAVCVMRFLVSKRKFKESLRPYDVMDVIEQYSAGHLDMLSRIKSLQSRVDQIVGRGPAITDKDRTKGPAEAELPEDPSMMGRLGKVEKQVLSMEKKLDFLVNIYMQRMGIPPTETEAYFGAKEPEPAPPYHSPEDSREHVDRHGCIVKIVRSSSSTGQKNFSAPPAAPPVQCPPSTSWQPQSHPRQGHGTSPVGDHGSLVRIPPPPAHERSLSAYGGGNRASMEFLRQEDTPGCRPPEGNLRDSDTSISIPSVDHEELERSFSGFSISQSKENLDALNSCYAAVAPCAKVRPYIAEGESDTDSDLCTPCGPPPRSATGEGPFGDVGWAGPRK

SEQ ID NO: 58741 - protein, 872 aa, Homo sapiens
MGLKARRAAGAAGGGGDGGGGGGGAANPAGGDAAAAGDEERKVGLAPGDVEQVTLALGAGADKDGTLLLEGGGRDEGQRRTPQGIGLLAKTPLSRPVKRNNAKYRRIQTLIYDALERPRGWALLYHALVFLIVLGCLILAVLTTFKEYETVSGDWLLLLETFAIFIFGAEFALRIWAAGCCCRYKGWRGRLKFARKPLCMLDIFVLIASVPVVAVGNQGNVLATSLRSLRFLQILRMLRMDRRGGTWKLLGSAICAHSKELITAWYIGFLTLILSSFLVYLVEKDVPEVDAQGEEMKEEFETYADALWWGLITLATIGYGDKTPKTWEGRLIAATFSLIGVSFFALPAGILGSGLALKVQEQHRQKHFEKRRKPAAELIQAAWRYYATNPNRIDLVATWRFYESVVSFPFFRKEQLEAASSQKLGLLDRVRLSNPRGSNTKGKLFTPLNVDAIEESPSKEPKPVGLNNKERFRTAFRMKAYAFWQSSEDAGTGDPMAEDRGYGNDFPIEDMIPTLKAAIRAVRILQFRLYKKKFKETLRPYDVKDVIEQYSAGHLDMLSRIKYLQTRIDMIFTPGPPSTPKHKKSQKGSAFTFPSQQSPRNEPYVARPSTSEIEDQSMMGKFVKVERQVQDMGKKLDFLVDMHMQHMERLQVQVTEYYPTKGTSSPAEAEKKEDNRYSDLKTIICNYSETGPPEPPYSFHQVTIDKVSPYGFFAHDPVNLPRGGPSSGKVQATPPSSATTYVERPTVLPILTLLDSRVSCHSQADLQGPYSDRISPRQRRSITRDSDTPLSLMSVNHEELERSPSGFSISQDRDDYVFGPNGGSSWMREKRYLAEGETDTDTDPFTPSGSMPLSSTGDGISDSVWTPSNKPI

SEQ ID NO: 58742 - protein, 751 aa, Homo sapiens [sequence omitted]

SEQ ID NO: 58743 - protein, 849 aa, Homo sapiens
RAAAEKAKRPAGARQMGLKARRAAAGDEERKVGLAPGDVEQVTLALGAGADKDGTLLLEGGGRDEGQRRTPQGIGLLAKTPLSRPVKRNNAKYRRIQTLIYDALERPRGWALLYHALVFLIVLGCLILAVLTTFKEYETVSGDWLLLLETFAIFIFGAEFALRIWAAGCCCRYKGWRGRLKFARKPLCMLDIFVLIASVPVVAVGNQGNVLATSLRSLRFLQILRMLRMDRRGGTWKLLGSAICAHSKELITAWYIGFLTLILSSFLVYLVEKDVPEVDAQGEEMKEEFETYADALWWGLITLATIGYGDKTPKTWEGRLIAATFSLIGVSFFALPAGILGSGLALKVQEQHRQKHFEKRRKPAAELIQAAWRYYATNPNRIDLVATWRFYESVVSFPFFRKEQLEAASSQKLGLLDRVRLSNPRGSNTKGKLFTPLNVDAIEESPSKEPKPVGLNNKERFRTAFRMKAYAFWQSSEDAGTGDPMAEDRGYGNDFPIEDMIPTLKAAIRAVRILQFRLYKKKFKETLRPYDVKDVIEQYSAGHLDMLSRIKYLQTRIDMIFTPGPPSTPKHKKSQKGNEPYVARPSTSEIEDQSMMGKFVKVERQVQDMGKKLDFLVDMHMQHMERLQVQVTEYYPTKGTSSPAEAEKKEDNRYSDLKTIICNYSETGPPEPPYSFHQVTIDKVSPYGFFAHDPVNLPRGGPSSGKVQATPPSSATTYVERPTVLPILTLLDSRVSCHSQADLQGPYSDRISPRQRRSITRDSDTPLSLMSVNHEELERSPSGFSISQDRDDYVFGPNGGSSWMREKRYLAEGETDTDTDPFTPSGSMPLSSTGDGISDSVWTPSNKPI

SEQ ID NO: 58744 - protein, 695 aa, Homo sapiens [sequence omitted]

SEQ ID NO: 58745 - protein, 951 aa, Homo sapiens
MPRHHAGGEEGGAAGLWVKSGAAAAAAGGGRLGSGMKDVESGRGRVLLNSAAARGDGLLLLGTRAATLGGGGGGLRESRRGKQGARMSLLGKPLSYTSSQSCRRNVKYRRVQNYLYNVLERPRGWAFIYHAFVFLLVFGCLILSVFSTIPEHTKLASSCLLILEFVMIVVFGLEFIIRIWSAGCCCRYRGWQGRLRFARKPFCVIDTIVLIASIAVVSAKTQGNIFATSALRSLRFLQILRMVRMDRRGGTWKLLGSVVYAHSKELITAWYIGFLVLIFSSFLVYLVEKDANKEFSTYADALWWGTITLTTIGYGDKTPLTWLGRLLSAGFALLGISFFALPAGILGSGFALKVQEQHRQKHFEKRRNPAANLIQCVWRSYAADEKSVSIATWKPHLKALHTCSPTKKEQGEASSSKFCSNKQKLFRMYTSRKQSQKLSFKERVRMASPRGQSIKSRQASVGDRRSPSTDITAEGSPTKVQKSWSFNDRTRFRPSLRLKSSQPKPVIDADTALGTDDVYDEKGCQCDVSVEDLTPPLKTVIRAIRIMKFHVAKRKFKETLRPYDVKDVIEQYSAGHLDMLCRIKSLQTRVDQILGKGQITSDKKSREKITAEHETTDDLSMLGRVVKVEKQVQSIESKLDCLLDIYQQVLRKGSASALALASFQIPPFECEQTSDYQSPVDSKDLSGSAQNSGCLSRSTSANISRGLQFILTPNEFSAQTFYALSPTMHSQATQVPISQSDGSAVAATNTIANQINTAPKPAAPTTLQIPPPLPAIKHLPRPETLHPNPAGLQESISDVTTCLVASKENVQVAQSNLTKDRSMRKSFDMGGETLLSVCPMVPKDLGKSLSVQNLIRSTEELNIQLSGSESSGSRGSQDFYPKWRESKLFITDEEVGPEETETDTFDAAPQPAREAAFASDSLRTGRSRSSQSICKAGESTDALSLPHVKLK

SEQ ID NO: 58746 - protein, 932 aa, Homo sapiens [sequence omitted]

SEQ ID NO: 58747 - protein, 933 aa, Homo sapiens
MPRHHAGGEEGGAAGLWVKSGAAAAAAGGGRLGSGMKDVESGRGRVLLNSAAARGDGLLLLGTRAATLGGGGGGLRESRRGKQGARMSLLGKPLSYTSSQSCRRNVKYRRVQNYLYNVLERPRGWAFIYHAFVFLLVFGCLILSVFSTIPEHTKLASSCLLILEFVMIVVFGLEFIIRIWSAGCCCRYRGWQGRLRFARKPFCVIDTIVLIASIAVVSAKTQGNIFATSALRSLRFLQILRMVRMDRRGGTWKLLGSVVYAHSKELITAWYIGFLVLIFSSFLVYLVEKDANKEFSTYADALWWGTITLTTIGYGDKTPLTWLGRLLSAGFALLGISFFALPAGILGSGFALKVQEQHRQKHFEKRRNPAANLIQCVWRSYAADEKSVSIATWKPHLKALHTCSPTKQNQQGESQSCQKLSFKERVRMASPRGQSIKSRQASVGDRRSPSTDITAEGSPTKVQKSWSFNDRTRFRPSLRLKSSQPKPVIDADTALGTDDVYDEKGCQCDVSVEDLTPPLKTVIRAIRIMKFHVAKRKFKETLRPYDVKDVIEQYSAGHLDMLCRIKSLQTRVDQILGKGQITSDKKSREKITAEHETTDDLSMLGRVVKVEKQVQSIESKLDCLLDIYQQVLRKGSASALALASFQIPPFECEQTSDYQSPVDSKDLSGSAQNSGCLSRSTSANISRGLQFILTPNEFSAQTFYALSPTMHSQATQVPISQSDGSAVAATNTIANQINTAPKPAAPTTLQIPPPLPAIKHLPRPETLHPNPAGLQESISDVTTCLVASKENVQVAQSNLTKDRSMRKSFDMGGETLLSVCPMVPKDLGKSLSVQNLIRSTEELNIQLSGSESSGSRGSQDFYPKWRESKLFITDEEVGPEETETDTFDAAPQPAREAAFASDSLRTGRSRSSQSICKAGESTDALSLPHVKLK

SEQ ID NO: 58748 - protein, 427 aa, Homo sapiens
MPRHHAGGEEGGAAGLWVKSGAAAAAAGGGRLGSGMKDVESGRGRVLLNSAAARGDGLLLLGTRAATLGGGGGGLRESRRGKQGARMSLLGKPLSYTSSQSCRRNVKYRRVQNYLYNVLERPRGWAFIYHAFVFLLVFGCLILSVFSTIPEHTKLASSCLLILEFVMIVVFGLEFIIRIWSAGCCCRYRGWQGRLRFARKPFCVIDTIVLIASIAVVSAKTQGNIFATSALRSLRFLQILRMVRMDRRGGTWKLLGSVVYAHSKELITAWYIGFLVLIFSSFLVYLVEKDANKEFSTYADALWWGTITLTTIGYGDKTPLTWLGRLLSAGFALLGISFFALPAGILGSGFALKVQEQHRQKHFEKRRNPAANLIQCVWRSYAADEKSVSIATWKPHLKALHTCSPTKKEQGEASSRFVISLLLHVCL

SEQ ID NO: 58749 - protein, 932 aa, Homo sapiens
MPRHHAGGEEGGAAGLWVKSGAAAAAAGGGRLGSGMKDVESGRGRVLLNSAAARGDGLLLLGTRAATLGGGGGGLRESRRGKQGARMSLLGKPLSYTSSQSCRRNVKYRRVQNYLYNVLERPRGWAFIYHAFVFLLVFGCLILSVFSTIPEHTKLASSCLLILEFVMIVVFGLEFIIRIWSAGCCCRYRGWQGRLRFARKPFCVIDTIVLIASIAVVSAKTQGNIFATSALRSLRFLQILRMVRMDRRGGTWKLLGSVVYAHSKELITAWYIGFLVLIFSSFLVYLVEKDANKEFSTYADALWWGTITLTTIGYGDKTPLTWLGRLLSAGFALLGISFFALPAGILGSGFALKVQEQHRQKHFEKRRNPAANLIQCVWRSYAADEKSVSIATWKPHLKALHTCSPTKKEQGEASSSQKLSFKERVRMASPRGQSIKSRQASVGDRRSPSTDITAEGSPTKVQKSWSFNDRTRFRPSLRLKSSQPKPVIDADTALGTDDVYDEKGCQCDVSVEDLTPPLKTVIRAIRIMKFHVAKRKFKETLRPYDVKDVIEQYSAGHLDMLCRIKSLQTRVDQILGKGQITSDKKSREKITAEHETTDDLSMLGRVVKVEKQVQSIESKLDCLLDIYQQVLRKGSASALALASFQIPPFECEQTSDYQSPVDSKDLSGSAQNSGCLSRSTSANISRGLQFILTPNEFSAQTFYALSPTMHSQATQVPISQSDGSAVAATNTIANQINTAPKPAAPTTLQIPPPLPAIKHLPRPETLHPNPAGLQESISDVTTCLVASKENVQVAQSNLTKDRSMRKSFDMGGETLLSVCPMVPKDLGKSLSVQNLIRSTEELNIQLSGSESSGSRGSQDFYPKWRESKLFITDEEVGPEETETDTFDAAPQPAREAAFASDSLRTGRSRSSQSICKAGESTDALSLPHVKLK

SEQ ID NO: 58750 - protein, 942 aa, Homo sapiens
MPRHHAGGEEGGAAGLWVKSGAAAAAAGGGRLGSGMKDVESGRGRVLLNSAAARGDGLLLLGTRAATLGGGGGGLRESRRGKQGARMSLLGKPLSYTSSQSCRRNVKYRRVQNYLYNVLERPRGWAFIYHAFVFLLVFGCLILSVFSTIPEHTKLASSCLLILEFVMIVVFGLEFIIRIWSAGCCCRYRGWQGRLRFARKPFCVIDTIVLIASIAVVSAKTQGNIFATSALRSLRFLQILRMVRMDRRGGTWKLLGSVVYAHSKELITAWYIGFLVLIFSSFLVYLVEKDANKEFSTYADALWWGTITLTTIGYGDKTPLTWLGRLLSAGFALLGISFFALPAGILGSGFALKVQEQHRQKHFEKRRNPAANLIQCVWRSYAADEKSVSIATWKPHLKALHTCSPTNKFCSNKQKLFRMYTSRKQSQKLSFKERVRMASPRGQSIKSRQASVGDRRSPSTDITAEGSPTKVQKSWSFNDRTRFRPSLRLKSSQPKPVIDADTALGTDDVYDEKGCQCDVSVEDLTPPLKTVIRAIRIMKFHVAKRKFKETLRPYDVKDVIEQYSAGHLDMLCRIKSLQTRVDQILGKGQITSDKKSREKITAEHETTDDLSMLGRVVKVEKQVQSIESKLDCLLDIYQQVLRKGSASALALASFQIPPFECEQTSDYQSPVDSKDLSGSAQNSGCLSRSTSANISRGLQFILTPNEFSAQTFYALSPTMHSQATQVPISQSDGSAVAATNTIANQINTAPKPAAPTTLQIPPPLPAIKHLPRPETLHPNPAGLQESISDVTTCLVASKENVQVAQSNLTKDRSMRKSFDMGGETLLSVCPMVPKDLGKSLSVQNLIRSTEELNIQLSGSESSGSRGSQDFYPKWRESKLFITDEEVGPEETETDTFDAAPQPAREAAFASDSLRTGRSRSSQSICKAGESTDALSLPHVKLK

SEQ ID NO: 58751 - protein, 923 aa, Homo sapiens
MPRHHAGGEEGGAAGLWVKSGAAAAAAGGGRLGSGMKDVESGRGRVLLNSAAARGDGLLLLGTRAATLGGGGGGLRESRRGKQGARMSLLGKPLSYTSSQSCRRNVKYRRVQNYLYNVLERPRGWAFIYHAFVFLLVFGCLILSVFSTIPEHTKLASSCLLILEFVMIVVFGLEFIIRIWSAGCCCRYRGWQGRLRFARKPFCVIDTIVLIASIAVVSAKTQGNIFATSALRSLRFLQILRMVRMDRRGGTWKLLGSVVYAHSKELITAWYIGFLVLIFSSFLVYLVEKDANKEFSTYADALWWGTITLTTIGYGDKTPLTWLGRLLSAGFALLGISFFALPAGILGSGFALKVQEQHRQKHFEKRRNPAANLIQCVWRSYAADEKSVSIATWKPHLKALHTCSPTNQKLSFKERVRMASPRGQSIKSRQASVGDRRSPSTDITAEGSPTKVQKSWSFNDRTRFRPSLRLKSSQPKPVIDADTALGTDDVYDEKGCQCDVSVEDLTPPLKTVIRAIRIMKFHVAKRKFKETLRPYDVKDVIEQYSAGHLDMLCRIKSLQTRVDQILGKGQITSDKKSREKITAEHETTDDLSMLGRVVKVEKQVQSIESKLDCLLDIYQQVLRKGSASALALASFQIPPFECEQTSDYQSPVDSKDLSGSAQNSGCLSRSTSANISRGLQFILTPNEFSAQTFYALSPTMHSQATQVPISQSDGSAVAATNTIANQINTAPKPAAPTTLQIPPPLPAIKHLPRPETLHPNPAGLQESISDVTTCLVASKENVQVAQSNLTKDRSMRKSFDMGGETLLSVCPMVPKDLGKSLSVQNLIRSTEELNIQLSGSESSGSRGSQDFYPKWRESKLFITDEEVGPEETETDTFDAAPQPAREAAFASDSLRTGRSRSSQSICKAGESTDALSLPHVKLK

SEQ ID NO: 58752 - protein, 822 aa, Homo sapiens
MPRHHAGGEEGGAAGLWVKSGAAAAAAGGGRLGSGMKDVESGRGRVLLNSAAARGDGLLLLGTRAATLGGGGGGLRESRRGKQGARMSLLGKPLSYTSSQSCRRNVKYRRVQNYLYNVLERPRGWAFIYHAFVFLLVFGCLILSVFSTIPEHTKLASSCLLILEFVMIVVFGLEFIIRIWSAGCCCRYRGWQGRLRFARKPFCVIDTIVLIASIAVVSAKTQGNIFATSALRSLRFLQILRMVRMDRRGGTWKLLGSVVYAHSKELITAWYIGFLVLIFSSFLVYLVEKDANKEFSTYADALWWGTITLTTIGYGDKTPLTWLGRLLSAGFALLGISFFALPAGILGSGFALKVQEQHRQKHFEKRRNPAANLIQCVWRSYAADEKSVSIATWKPHLKALHTCSPTKKEQGEASSRIMKFHVAKRKFKETLRPYDVKDVIEQYSAGHLDMLCRIKSLQTRVDQILGKGQITSDKKSREKITAEHETTDDLSMLGRVVKVEKQVQSIESKLDCLLDIYQQVLRKGSASALALASFQIPPFECEQTSDYQSPVDSKDLSGSAQNSGCLSRSTSANISRGLQFILTPNEFSAQTFYALSPTMHSQATQVPISQSDGSAVAATNTIANQINTAPKPAAPTTLQIPPPLPAIKHLPRPETLHPNPAGLQESISDVTTCLVASKENVQVAQSNLTKDRSMRKSFDMGGETLLSVCPMVPKDLGKSLSVQNLIRSTEELNIQLSGSESSGSRGSQDFYPKWRESKLFITDEEVGPEETETDTFDAAPQPAREAAFASDSLRTGRSRSSQSICKAGESTDALSLPHVKLK

SEQ ID NO: 58753 - protein, 951 aa, Homo sapiens [sequence omitted]

SEQ ID NO: 58754 - protein, 858 aa, Homo sapiens [sequence omitted]

SEQ ID NO: 58755 - protein, 813 aa, Homo sapiens
RDGGEKTAVTRLGKLRDCNTHDSLLEVCDDYSLDDNEYFFDRHPGAFTSILNFYRTGRLHMMEEMCALSFSQELDYWGIDEIYLESCCQARYHQKKEQMNEELKREAETLREREGEEFDNTCCAEKRKKLWDLLEKPNSSVAAKILAIISIMFIVLSTIALSLNTLPELQSLDEFGQSTDNPQLAHVEAVCIAWFTMEYLLRFLSSPKKWKFFKGPLNAIDLLAILPYYVTIFLTESNKSVLQFQNVRRVVQIFRIMRILRILKLARHSTGLQSLGFTLRRSYNELGLLILFLAMGIMIFSSLVFFAEKDEDDTKFKSIPASFWWATITMTTVGYGDIYPKTLLGKIVGGLCCIAGVLVIALPIPIIVNNFSEFYKEQKRQEKAIKRREALERAKRNGSIVSMNMKDAFARSIEMMDIVVEKNGENMGKKDKVQDNHLSPNKWKWTKRTLSETSSSKSFETKEQGSPEKARSSSSPQHLNVQQLEDMYNKMAKTQSQPILNTKESAAQSKPKEELEMESIPSPVAPLPTRTEGVIDMRSMSSIDSFISCATDFPEATRFSHSPLTSLPSKTGGSTAPEVGWRGALGASGGRFVEANPSPDASQHSSFFIESPKSSMKTNNPLKLRALKVNFMEGDPSPLLPVLGMYHDPLRNRGSAAAAVAGLECATLLDKAVLSPESSIYTTASAKTPPRSPEKHTAIAFNFEAGVHQYIDADTDDEGQLLYSVDSSPPKSLPGSTSPKFSTGTRSEKNHFESSPLPTSPKFLRQNCIYSTEALTGKGPSGQEKCKLENHISPDVRVLPGGGAHGSTRDQSI

SEQ ID NO: 58756 - protein, 911 aa, Homo sapiens
MAEKAPPGLNRKTSRSTLSLPPEPVDIIRSKTCSRRVKINVGGLNHEVLWRTLDRLPRTRLGKLRDCNTHESLLEVCDDYNLNENEYFFDRHPGAFTSILNFYRTGKLHMMEEMCALSFGQELDYWGIDEIYLESCCQARYHQKKEQMNEELRREAETMREREGEEFDNTCCPDKRKKLWDLLEKPNSSVAAKILAIVSILFIVLSTIALSLNTLPELQETDEFGQLNDNRQLAHVEAVCIAWFTMEYLLRFLSSPNKWKFFKGPLNVIDLLAILPYYVTIFLTESNKSVLQFQNVRRVVQIFRIMRILRILKLARHSTGLQSLGFTLRRSYNELGLLILFLAMGIMIFSSLVFFAEKDEDATKFTSIPASFWWATITMTTVGYGDIYPKTLLGKIVGGLCCIAGVLVIALPIPIIVNNFSEFYKEQKRQEKAIKRREALERAKRNGSIVSMNLKDAFARSMELIDVAVEKAGESANTKDSADDNHLSPSRWKWARKALSETSSNKSFENKYQEVSQKDSHEQLNNTSSSSPQHLSAQKLEMLYNEITKTQPHSHPNPDCQEKPERPSAYEEEIEMEEVVCPQEQLAVAQTEVIVDMKSTSSIDSFTSCATDFTETERSPLPPPSASHLQMKFPTDLPGTEEHQRARGPPFLTLSREKGPAARDGTLEYAPVDITVNLDASGSQCGLHSPLQSDNATDSPKSSLKGSNPLKSRSLKVNFKENRGSAPQTPPSTARPLPVTTADFSLTTPQHISTILLEETPSQGDRPLLGTEVSAPCQGPSKGLSPRFPKQKLFPFSSRERRSFTEIDTGDDEDFLELPGAREEKQVDSSPNCFADKPSDGRDPLREEGSVGSSSPQDTGHNCRQDIYHAVSEVKKDSSQEGCKMENHLFAPEIHSNPGDTGYCPTRETSM

SEQ ID NO: 58757 - protein, 401 aa, Homo sapiens
MQVSIACTEHNLKSRNGEDRLLSKQSSTAPNVVNAARAKFRTVAIIARSLGTFTPQHHISLKESTAKQTGMKYRNLGKSGLRVSCLGLGTWVTFGGQISDEVAERLMTIAYESGVNLFDTAEVYAAGKAEVILGSIIKKKGWRRSSLVITTKLYWGGKAETERGLSRKHIIEGLKGSLQRLQLEYVDVVFANRPDSNTPMEEIVRAMTHVINQGMAMYWGTSRWSAMEIMEAYSVARQFNMIPPVCEQAEYHLFQREKVEVQLPELYHKIGVGAMTWSPLACGIISGKYGNGVPESSRASLKCYQWLKERIVSEEGRKQQNKLKDLSPIAERLGCTLPQLAVAWCLRNEGVSSVLLGSSTPEQLIENLGAIQVLPKMTSHVVNEIDNILRNKPYSKKDYRS

SEQ ID NO: 58758 - protein, 390 aa, Homo sapiens
MLAARTGAAGSQISEENTKLRRQSGFSVAGKDKSPKKASENAKDSSLSPSGESQLRARQLALLREVEMNWYLKLCDLSSEHTTVCTTGMPHRNLGKSGLRVSCLGLGTWVTFGGQISDEVAERLMTIAYESGVNLFDTAEVYAAGKAEVILGSIIKKKGWRRSSLVITTKLYWGGKAETERGLSRKHIIEEIVRAMTHVINQGMAMYWGTSRWSAMEIMEAYSVARQFNMIPPVCEQAEYHLFQREKVEVQLPELYHKIGVGAMTWSPLACGIISGKYGNGVPESSRASLKCYQWLKERIVSEEGRKQQNKLKDLSPIAERLGCTLPQLAVAWCLRNEGVSSVLLGSSTPEQLIENLGAIQVLPKMTSHVVNEIDNILRNKPYSKKDYRS

SEQ ID NO: 58759 - protein, 408 aa, Homo sapiens
MHLYKPACADIPSPKLGLPKSSESALKCRWHLAVTKTQPQAACKPVRPSGAAEQKYVEKFLRVHGISLQETTRAETGMAYRNLGKSGLRVSCLGLGTWVTFGGQISDEVAERLMTIAYESGVNLFDTAEVYAAGKAEVILGSIIKKKGWRRSSLVITTKLYWGGKAETERGLSRKHIIEGLKGSLQRLQLEYVDVVFANRPDSNTPMEEIVRAMTHVINQGMAMYWGTSRWSAMEIMEAYSVARQFNMIPPVCEQAEYHLFQREKVEVQLPELYHKIGVGAMTWSPLACGIISGKYGNGVPESSRASLKCYQWLKERIVSEEGRKQQNKLKDLSPIAERLGCTLPQLAVAWCLRNEGVSSVLLGSSTPEQLIENLGAIQVLPKMTSHVVNEIDNILRNKPYSKKDYRS

SEQ ID NO: 58760 - protein, 419 aa, Homo sapiens
MLAARTGAAGSQISEENTKLRRQSGFSVAGKDKSPKKASENAKDSSLSPSGESQLRARQLALLREVEMNWYLKLCDLSSEHTTVCTTGMPHRNLGKSGLRVSCLGLGTWVTFGGQISDEVAERLMTIAYESGVNLFDTAEVYAAGKAEVILGSIIKKKGWRRSSLVITTKLYWGGKAETERGLSRKHIIEGLKGSLQRLQLEYVDVVFANRPDSNTPMEEIVRAMTHVINQGMAMYWGTSRWSAMEIMEAYSVARQFNMIPPVCEQAEYHLFQREKVEVQLPELYHKIGVGAMTWSPLACGIISGKYGNGVPESSRASLKCYQWLKERIVSEEGRKQQNKLKDLSPIAERLGCTLPQLAVAWCLRNEGVSSVLLGSSTPEQLIENLGAIQVLPKMTSHVVNEIDNILRNKPYSKKDYRS

SEQ ID NO: 58761 - protein, 367 aa, Homo sapiens
MYPESTTGSPARLSLRQTGSPGMIYSTRYGSPKRQLQFYRNLGKSGLRVSCLGLGTWVTFGGQITDEMAEQLMTLAYDNGINLFDTAEVYAAGKAEVVLGNIIKKKGWRRSSLVITTKIFWGGKAETERGLSRKHIIEGLKASLERLQLEYVDVVFANRPDPNTPMEETVRAMTHVINQGMAMYWGTSRWSSMEIMEAYSVARQFNLTPPICEQAEYHMFQREKVEVQLPELFHKIGVGAMTWSPLACGIVSGKYDSGIPPYSRASLKGYQWLKDKILSEEGRRQQAKLKELQAIAERLGCTLPQLAIAWCLRNEGVSSVLLGASNADQLMENIGAIQVLPKLSSSIIHEIDSILGNKPYSKKDYRS

SEQ ID NO: 58762 - protein, 367 aa, Homo sapiens; identical to SEQ ID NO: 58761

SEQ ID NO: 58763 - protein, 353 aa, Homo sapiens
MYPESTTGSPARLSLRQTGSPGMIYRNLGKSGLRVSCLGLGTWVTFGGQITDEMAEQLMTLAYDNGINLFDTAEVYAAGKAEVVLGNIIKKKGWRRSSLVITTKIFWGGKAETERGLSRKHIIEGLKASLERLQLEYVDVVFANRPDPNTPMEETVRAMTHVINQGMAMYWGTSRWSSMEIMEAYSVARQFNLTPPICEQAEYHMFQREKVEVQLPELFHKIGVGAMTWSPLACGIVSGKYDSGIPPYSRASLKGYQWLKDKILSEEGRRQQAKLKELQAIAERLGCTLPQLAIAWCLRNEGVSSVLLGASNADQLMENIGAIQVLPKLSSSIIHEIDSILGNKPYSKKDYRS

SEQ ID NO: 58764 - protein, 415 aa, Homo sapiens
MLSMTYSESLRSVSSRCHSEWALHPVRQTDTLELQRLREVRAAAQARNMESFLRMHGLSLDGCTAQRTGMKYRNLGKSGLRVSCLGLGTWVTFGGQITDEMAEQLMTLAYDNGINLFDTAEVYAAGKAEVVLGNIIKKKGWRRSSLVITTKIFWGGKAETERGLSRKHIIEGLKASLERLQLEYVDVVFANRPDPNTPMEGDPFSSSKSRTFIIEETVRAMTHVINQGMAMYWGTSRWSSMEIMEAYSVARQFNLTPPICEQAEYHMFQREKVEVQLPELFHKIGVGAMTWSPLACGIVSGKYDSGIPPYSRASLKGYQWLKDKILSEEGRRQQAKLKELQAIAERLGCTLPQLAIAWCLRNEGVSSVLLGASNADQLMENIGAIQVLPKLSSSIIHEIDSILGNKPYSKKDYRS

SEQ ID NO: 58765 - protein, 173 aa, Homo sapiens
MYPESTTGSPARLSLRQTGSPGMIYSTRYGSPKRQLQFYRNLGKSGLRVSCLGLGTWVTFGGQITDEMAEQLMTLAYDNGINLFDTAEVYAAGKAEVVLGNIIKKKGWSQQGERAGQARVTPPCSLGRRARDASKSAGAGCHLQAQACVPSSTQALQTTRGRAPLKPPPPLAS

SEQ ID NO: 58766 - protein, 353 aa, Homo sapiens; identical to SEQ ID NO: 58763

SEQ ID NO: 58767 - protein, 367 aa, Homo sapiens; identical to SEQ ID NO: 58761

SEQ ID NO: 58768 - protein, 173 aa, Homo sapiens
MYPESTTGSPARLSLRQTGSPGMIYSTRYGSPKRQLQFYRNLGKSGLRVSCLGLGTWVTFGGQITDEMAEQLMTLAYDNGINLFDTAEVYAAGKAEVVLGNIIKKKGWRQRGERAGQARVTPPCSLGRRARDASKSAGAGCHLQAQACVPSSTQALQTTRGRAPLKPPPPLAS

SEQ ID NO: 58769 - protein, 253 aa, Homo sapiens
MYPESTTGSPARLSLRQTGSPGMIYSTRYGSPKRQLQFYRNLGKSGLRVSCLGLGTWVTFGGQITDEMAEQLMTLAYDNGINLFDTAEVYAAGKAEVVLGNIIKKKGWRRSSLVITTKIFWGGKAETERGLSRKHIIEGLKASLERLQLEYVDVVFANRPDPNTPMEETVRAMTHVINQGMAMYWGTSRWSSMEIMEAYSVARQFNLTPPICEQAEYHMFQREKVEVQLPELFHKIGVGAMTWSPLACGIVSG

SEQ ID NO: 58770 - protein, 254 aa, Homo sapiens
MYPESTTGSPARLSLRQTGSPGMIYRNLGKSGLRVSCLGLGTWVTFGGQITDEMAEQLMTLAYDNGINLFDTAEVYAAGKAEVVLGNIIKKKGWRRSSLVITTKIFWGGKAETERGLSRKHIIEGLKASLERLQLEYVDVVFANRPDPNTPMEETVRAMTHVINQGMAMYWGTSRWSSMEIMEAYSVARQFNLTPPICEQAEYHMFQREKVEVQLPELFHKIGVGAMTWSPLACGIVSGKYDSGIPPYSRASLK

SEQ ID NO: 58771 - protein, 95 aa, Homo sapiens
MYPESTTGSPARLSLRQTGSPGMIYRNLGKSGLRVSCLGLGTWVTFGGQITDEMAEQLMTLAYDNGINLFDTAEVYAAGKAEVVLGNIIKKKGWR

SEQ ID NO: 58772 - protein, 52 aa, Homo sapiens
MYPESTTGSPARLSLRQTGSPGMIYSTRYGSPKRQLQFYRNLGKSGLRVSCL

SEQ ID NO: 58773 - protein, 300 aa, Homo sapiens
MAEQLMTLAYDNGINLFDTAEVYAAGKAEVVLGNIIKKKGWRRSSLVITTKIFWGGKAETERGLSRKHIIEGLKASLERLQLEYVDVVFANRPDPNTPMEETVRAMTHVINQGMAMYWGTSRWSSMEIMEAYSVARQFNLTPPICEQAEYHMFQREKVEVQLPELFHKIGVGAMTWSPLACGIVSGKYDSGIPPYSRASLKGYQWLKDKILSEEGRRQQAKLKELQAIAERLGCTLPQLAIAWCLRNEGVSSVLLGASNADQLMENIGAIQVLPKLSSSIIHEIDSILGNKPYSKKDYRS

SEQ ID NO: 58774 - protein, 404 aa, Homo sapiens
MQVSIACTEQNLRSRSSEDRLCGPRPGPGGGNGGPAGGGHGNPPGGGGSGPKARAALVPRPPAPAGALRESTGRGTGMKYRNLGKSGLRVSCLGLGTWVTFGSQISDETAEDVLTVAYEHGVNLFDTAEVYAAGKAERTLGNILKSKGWRRSSYVITTKIFWGGQAETERGLSRKHIIEGLRGSLERLQLGYVDIVFANRSDPNCPMEEIVRAMTYVINQGLALYWGTSRWGAAEIMEAYSMARQFNLIPPVCEQAEHHLFQREKVEMQLPELYHKIGVGSVTWYPLACGLITSKYDGRVPDTCRASIKGYQWLKDKVQSEDGKKQQAKVMDLLPVAHQLGCTVAQLAIAWCLRSEGVSSVLLGVSSAEQLIEHLGALQVLSQLTPQTVMEIDGLLGNKPHSKK

SEQ ID NO: 58775 - protein, 495 aa, Homo sapiens
MTVMSGENVDEASAAPGHPQDGSYPRQADHDDHECCERVVINISGLRFETQLKTLAQFPNTLLGNPKKRMRYFDPLRNEYFFDRNRPSFDAILYYYQSGGRLRRPVNVPLDMFSEEIKFYELGEEAMEKFREDEGFIKEEERPLPEKEYQRQVWLLFEYPESSGPARVIAIVSVMVILISIVIFCLETLPELKDDKDFTGTVHRIDNTTVIYNSNIFTDPFFIVETLCIIWFSFELVVRFFACPSKTDFFKNIMNFIDIVAIIPYFITLGTEIAEQEGNQKGEQATSLAILRVIRLVRVFRIFKLSRHSKGLQILGQTLKASMRELGLLIFFLFIGVILFSSAVYFAEAEEAESHFSSIPDAFWWAVVSMTTVGYGDMYPVTIGGKIVGSLCAIAGVLTIALPVPVIVSNFNYFYHRETEGEEQAQLLHVSSPNLASDSDLSRRSSSTMSKSEYMEIEEDMNNSIAHYRQVNIRTANCTTANQNCVNKSKLLTDV

SEQ ID NO: 58776 - protein, 495 aa, Homo sapiens; identical to SEQ ID NO: 58775

SEQ ID NO: 58777 - protein, 511 aa, Homo sapiens
MDVCGWKEMEVALVNFDNSDEIQEEPGYATDFDSTSPKGRPGGSSFSNGKILISESTNHETAFSKLPGDYADPPGPEPVVLNEGNQRVIINIAGLRFETQLRTLSQFPETLLGDREKRMQFFDSMRNEYFFDRNRPSFDGILYYYQSGGKIRRPANVPIDIFADEISFYELGSEAMDQFREDEGFIKDPETLLPTNDIHRQFWLLFEYPESSSAARAVAVVSVLVVVISITIFCLETLPEFREDRELKVVRDPNLNMSKTVLSQTMFTDPFFMVESTCIVWFTFELVLRFVVCPSKTDFFRNIMNIIDIISIIPYFATLITELVQETEPSAQQNMSLAILRIIRLVRVFRIFKLSRHSKGLQILGQTLKASMRELGLLIFFLFIGVILFSSAVYFAEVDEPESHFSSIPDGFWWAVVTMTTVGYGDMCPTTPGGKIVGTLCAIAGVLTIALPVPVIVSNFNYFYHRETENEEKQNIPGEIERILNSVGSRMGSTDSLNKTNGGCSTEKSRK

SEQ ID NO: 58778 - protein, 575 aa, Homo sapiens
MDERLSLLRSPPPPSARHRAHPPQRPASSGGAHTLVNHGYAEPAAGRELPPDMTVVPGDHLLEPEVADGGGAPPQGGCGGGGCDRYEPLPPSLPAAGEQDCCGERVVINISGLRFETQLKTLCQFPETLLGDPKRRMRYFDPLRNEYFFDRNRPSFDAILYYYQSGGRIRRPVNVPIDIFSEEIRFYQLGEEAMEKFREDEGFLREEERPLPRRDFQRQVWLLFEYPESSGPARGIAIVSVLVILISIVIFCLETLPEFRDEKDYPASTSQDSFEAAGNSTSGSRAGASSFSDPFFVVETLCIIWFSFELLVRFFACPSKATFSRNIMNLIDIVAIIPYFITLGTELAERQGNGQQAMSLAILRVIRLVRVFRIFKLSRHSKGLQILGQTLKASMRELGLLIFFLFIGVILFSSAVYFAEADDPTSGFSSIPDAFWWAVVTMTTVGYGDMHPVTIGGKIVGSLCAIAGVLTIALPVPVIVSNFNYFYHRETEGEEQSQYMHVGSCQHLSSSAEELRKARSNSTLSKSEYMVIEEGGMNHSAFPQTPFKTGNSTATCTTNNNPNSCVNIKKIFTDV

SEQ ID NO: 58779 - protein, 653 aa, Homo sapiens
MEVAMVSAESSGCNSHMPYGYAAQARARERERLAHSRAAAAAAVAAATAAVEGSGGSGGGSHHHHQSRGACTSHDPQSSRGSRRRRRQRSEKKKAHYRQSSFPHCSDLMPSGSEEKILRELSEEEEDEEEEEEEEEEGRFYYSEDDHGDECSYTDLLPQDEGGGGYSSVRYSDCCERVVINVSGLRFETQMKTLAQFPETLLGDPEKRTQYFDPLRNEYFFDRNRPSFDAILYYYQSGGRLKRPVNVPFDIFTEEVKFYQLGEEALLKFREDEGFVREEEDRALPENEFKKQIWLLFEYPESSSPARGIAIVSVLVILISIVIFCLETLPEFRDDRDLVMALSAGGHGGLLNDTSAPHLENSGHTIFNDPFFIVETVCIVWFSFEFVVRCFACPSQALFFKNIMNIIDIVSILPYFITLGTDLAQQQGGGNGQQQQAMSFAILRIIRLVRVFRIFKLSRHSKGLQILGHTLRASMRELGLLIFFLFIGVILFSSAVYFAEADEPTTHFQSIPDAFWWAVVTMTTVGYGDMKPITVGGKIVGSLCAIAGVLTIALPVPVIVSNFNYFYHRETENEEQTQLTQNAVSCPYLPSNLLKKFRSSTSSSLGDKSEYLEMEEGVKESLCAKEEKCQGKGDDSETDKNNCSNAKAVETDV

SEQ ID NO: 58780 - protein, 613 aa, Homo sapiens
MEIALVPLENGGAMTVRGGDEARAGCGQATGGELQCPPTAGLSDGPKEPAPKGRGAQRDADSGVRPLPPLPDPGVRPLPPLPEELPRPRRPPPEDEEEEGDPGLGTVEDQALGTASLHHQRVHINISGLRFETQLGTLAQFPNTLLGDPAKRLRYFDPLRNEYFFDRNRPSFDGILYYYQSGGRLRRPVNVSLDVFADEIRFYQLGDEAMERFREDEGFIKEEEKPLPRNEFQRQVWLIFEYPESSGSARAIAIVSVLVILISIITFCLETLPEFRDERELLRHPPAPHQPPAPAPGANGSGVMAPPSGPTVAPLLPRTLADPFFIVETTCVIWFTFELLVRFFACPSKAGFSRNIMNIIDVVAIFPYFITLGTELAEQQPGGGGGGQNGQQAMSLAILRVIRLVRVFRIFKLSRHSKGLQILGKTLQASMRELGLLIFFLFIGVILFSSAVYFAEADNQGTHFSSIPDAFWWAVVTMTTVGYGDMRPITVGGKIVGSLCAIAGVLTIALPVPVIVSNFNYFYHRETDHEEPAVLKEEQGTQSQGPGLDRGVQRKVSGSRGSFCKAGGTLENADSARRGSCPLEKCNVKAKSNVDLRRSLYALCLDTSRETDL

SEQ ID NO: 58781 - protein, 456 aa, Homo sapiens
MEPRCPPPCGCCERLVLNVAGLRFETRARTLGRFPDTLLGDPARRGRFYDDARREYFFDRHRPSFDAVLYYYQSGGRLRRPAHVPLDVFLEEVAFYGLGAAALARLREDEGCPVPPERPLPRRAFARQLWLLFEFPESSQAARVLAVVSVLVILVSIVVFCLETLPDFRDDRDGTGLAAAAAAGPFPAPLNGSSQMPGNPPRLPFNDPFFVVETLCICWFSFELLVRLLVCPSKAIFFKNVMNLIDFVAILPYFVALGTELARQRGVGQQAMSLAILRVIRLVRVFRIFKLSRHSKGLQILGQTLRASMRELGLLIFFLFIGVVLFSSAVYFAEVDRVDSHFTSIPESFWWAVVTMTTVGYGDMAPVTVGGKIVGSLCAIAGVLTISLPVPVIVSNFSYFYHRETEGEEAGMFSHVDMQPCGPLEGKANGGLVDGEVPELPPPLWAPPGKHLVTEV

SEQ ID NO: 58782 - protein, 630 aa, Homo sapiens
MAAGVAAWLPFARAAAIGWMPVASGPMPAPPRQERKRTQDALIVLNVSGTRFQTWQDTLERYPDTLLGSSERDFFYHPETQQYFFDRDPDIFRHILNFYRTGKLHYPRHECISAYDEELAFFGLIPEIIGDCCYEEYKDRRRENAERLQDDADTDTAGESALPTMTARQRVWRAFENPHTSTMALVFYYVTGFFIAVSVIANVVETVPCGSSPGHIKELPCGERYAVAFFCLDTACVMIFTVEYLLRLAAAPSRYRFVRSVMSIIDVVAILPYYIGLVMTDNEDVSGAFVTLRVFRVFRIFKFSRHSQGLRILGYTLKSCASELGFLLFSLTMAIIIFATVMFYAEKGSSASKFTSIPAAFWYTIVTMTTLGYGDMVPKTIAGKIFGSICSLSGVLVIALPVPVIVSNFSRIYHQNQRADKRRAQKKARLARIRAAKSGSANAYMQSKRNGLLSNQLQSSEDEQAFVSKSGSSFETQHHHLLHCLEKTTNHEFVDEQVFEESCMEVATVNRPSSHSPSLSSQQGVTSTCCSRRHKKTFRIPNANVSGSHQGSIQELSTIQIRCVERTPLSNSRSSLNAKMEECVKLNCEQPYVTTAIISIPTPPVTTPEGDDRPESPEYSGGNIVRVSAL

SEQ ID NO: 58783 - protein, 636 aa, Homo sapiens
MAAGVAAWLPFARAAAIGWMPVANCPMPLAPADKNKRQDELIVLNVSGRRFQTWRTTLERYPDTLLGSTEKEFFFNEDTKEYFFDRDPEVFRCVLNFYRTGKLHYPRYECISAYDDELAFYGILPEIIGDCCYEEYKDRKRENAERLMDDNDSENNQESMPSLSFRQTMWRAFENPHTSTLALVFYYVTGFFIAVSVITNVVETVPCGTVPGSKELPCGERYSVAFFCLDTACVMIFTVEYLLRLFAAPSRYRFIRSVMSIIDVVAIMPYYIGLVMTNNEDVSGAFVTLRVFRVFRIFKFSRHSQGLRILGYTLKSCASELGFLLFSLTMAIIIFATVMFYAEKGSSASKFTSIPASFWYTIVTMTTLGYGDMVPKTIAGKIFGSICSLSGVLVIALPVPVIVSNFSRIYHQNQRADKRRAQKKARLARIRVAKTGSSNAYLHSKRNGLLNEALELTGTPEEEHMGKTTSLIESQHHHLLHCLEKTTNHEFIDEQMFEQNCMESSMQNYPSTRSPSLSSHPGLTTTCCSRRSKKTTHLPNSNLPATRLRSMQELSTIHIQGSEQPSLTTSRSSLNLKADDGLRPNCKTSQITTAIISIPTPPALTPEGESRPPPASPGPNTNIPSIASNVVKVSAL

SEQ ID NO: 58784 - protein, 655 aa, Homo sapiens
MAAGVAAWLPFARAAAIGWMPVANCPMPLAPADKNKRQDELIVLNVSGRRFQTWRTTLERYPDTLLGSTEKEFFFNEDTKEYFFDRDPEVFRCVLNFYRTGKLHYPRYECISAYDDELAFYGILPEIIGDCCYEEYKDRKRENAERLMDDNDSENNQESMPSLSFRQTMWRAFENPHTSTLALVFYYVTGFFIAVSVITNVVETVPCGTVPGSKELPCGERYSVAFFCLDTACVMIFTVEYLLRLFAAPSRYRFIRSVMSIIDVVAIMPYYIGLVMTNNEDVSGAFVTLRVFRVFRIFKFSRHSQGLRILGYTLKSCASELGFLLFSLTMAIIIFATVMFYAEKGSSASKFTSIPASFWYTIVTMTTLGYGDMVPKTIAGKIFGSICSLSGVLVIALPVPVIVSNFSRIYHQNQRADKRRAQKKARLARIRVAKTGSSNAYLHSKRNGLLNEALELTGTPEEEHMGKTTSLIESQHHHLLHCLEKTTGLSYLVDDPLLSVRTSTIKNHEFIDEQMFEQNCMESSMQNYPSTRSPSLSSHPGLTTTCCSRRSKKTTHLPNSNLPATRLRSMQELSTIHIQGSEQPSLTTSRSSLNLKADDGLRPNCKTSQITTAIISIPTPPALTPEGESRPPPASPGPNTNIPSIASNVVKVSAL

SEQ ID NO: 58785 - protein, 636 aa, Homo sapiens; identical to SEQ ID NO: 58783

SEQ ID NO: 58786 - protein, 585 aa, Homo sapiens
MGQGDESERIVINVGGTRHQTYRSTLRTLPGTRLAWLAEPDAHSHFDYDPRADEFFFDRHPGVFAHILNYYRTGKLHCPADVCGPLYEEELAFWGIDETDVEPCCWMTYRQHRDAEEALDSFGGAPLDNSADDADADGPGDSGDGEDELEMTKRLALSDSPDGRPGGFWRRWQPRIWALFEDPYSSRYARYVAFASLFFILVSITTFCLETHERFNPIVNKTEIENVRNGTQVRYYREAETEAFLTYIEGVCVVWFTFEFLMRVIFCPNKVEFIKNSLNIIDFVAILPFYLEVGLSGLSSKAAKDVLGFLRVVRFVRILRIFKLTRHFVGLRVLGHTLRASTNEFLLLIIFLALGVLIFATMIYYAERIGAQPNDPSASEHTHFKNIPIGFWWAVVTMTTLGYGDMYPQTWSGMLVGALCALAGVLTIAMPVPVIVNNFGMYYSLAMAKQKLPKKKKKHIPRPPQLGSPNYCKSVVNSPHHSTQSDTCPLAQEEILEINRADSKLNGEVAKAALANEDCPHIDQALTPDEGLPFTRSGTRERYGPCFLLSTGEYACPPGGGMRKDLCKESPVIAKYMPTEAVRVT

SEQ ID NO: 58787 - protein, 511 aa, Homo sapiens
MGQGDESERIVINVGGTRHQTYRSTLRTLPGTRLAWLAEPDAHSHFDYDPRADEFFFDRHPGVFAHILNYYRTGKLHCPADVCGPLYEEELAFWGIDETDVEPCCWMTYRQHRDAEEALDSFGGAPLDNSADDADADGPGDSGDGEDELEMTKRLALSDSPDGRPGGFWRRWQPRIWALFEDPYSSRYARYVAFASLFFILVSITTFCLETHERFNPIVNKTEIENVRNGTQVRYYREAETEAFLTYIEGVCVVWFTFEFLMRVIFCPNKVEFIKNSLNIIDFVAILPFYLEVGLSGLSSKAAKDVLGFLRVVRFVRILRIFKLTRHFVGLRVLGHTLRASTNEFLLLIIFLALGVLIFATMIYYAERIGAQPNDPSASEHTHFKNIPIGFWWAVVTMTTLGYGDMYPQTWSGMLVGALCALAGVLTIAMPVPVIVNNFGMYYSLAMAKQKLPKKKKKHIPRPPQLGSPNYCKSVVNSPHHSTQSDTCPLAQEEILEINRAGRKPLRGMSI

SEQ ID NO: 58788 - protein, 613 aa, Homo sapiens
MGKIENNERVILNVGGTRHETYRSTLKTLPGTRLALLASSEPPGDCLTTAGDKLQPSPPPLSPPPRAPPLSPGPGGCFEGGAGNCSSRGGRASDHPGGGREFFFDRHPGVFAYVLNYYRTGKLHCPADVCGPLFEEELAFWGIDETDVEPCCWMTYRQHRDAEEALDIFETPDLIGGDPGDDEDLAAKRLGIEDAAGLGGPDGKSGRWRRLQPRMWALFEDPYSSRAARFIAFASLFFILVSITTFCLETHEAFNIVKNKTEPVINGTSVVLQYEIETDPALTYVEGVCVVWFTFEFLVRIVFSPNKLEFIKNLLNIIDFVAILPFYLEVGLSGLSSKAAKDVLGFLRVVRFVRILRIFKLTRHFVGLRVLGHTLRASTNEFLLLIIFLALGVLIFATMIYYAERVGAQPNDPSASEHTQFKNIPIGFWWAVVTMTTLGYGDMYPQTWSGMLVGALCALAGVLTIAMPVPVIVNNFGMYYSLAMAKQKLPRKRKKHIPPAPQASSPTFCKTELNMACNSTQSDTCLGKDNRLLEHNRSVLSGDDSTGSEPPLSPPERLPIRRSSTRDKNRRGETCFLLTTGDYTCASDGGIRKDNCKEVVITGYTQAEARSLT

SEQ ID NO: 58789 - protein, 629 aa, Homo sapiens
MGKIENNERVILNVGGTRHETYRSTLKTLPGTRLALLASSEPPGDCLTTAGDKLQPSPPPLSPPPRAPPLSPGPGGCFEGGAGNCSSRGGRASDHPGGGREFFFDRHPGVFAYVLNYYRTGKLHCPADVCGPLFEEELAFWGIDETDVEPCCWMTYRQHRDAEEALDIFETPDLIGGDPGDDEDLAAKRLGIEDAAGLGGPDGKSGRWRRLQPRMWALFEDPYSSRAARFIAFASLFFILVSITTFCLETHEAFNIVKNKTEPVINGTSVVLQYEIETDPALTYVEGVCVVWFTFEFLVRIVFSPNKLEFIKNLLNIIDFVAILPFYLEVGLSGLSSKAAKDVLGFLRVVRFVRILRIFKLTRHFVGLRVLGHTLRASTNEFLLLIIFLALGVLIFATMIYYAERVGAQPNDPSASEHTQFKNIPIGFWWAVVTMTTLGYGDMYPQTWSGMLVGALCALAGVLTIAMPVPVIVNNFGMYYSLAMAKQKLPRKRKKHIPPAPQASSPTFCKTELNMACNSTQSDTCLGKDNRLLEHNRSVLSGDDSTGSEPPLSPPERLPIRRSSTRDKNRRGETCFLLTTGDYTCASDGGIRKVLYRIYHGLLTAEKGTVEFSHTKDYTGNRLLLLNVP

SEQ ID NO: 58790 - protein, 558 aa, Homo sapiens
MGKIENNERVILNVGGTRHETYRSTLKTLPGTRLALLASSEPPGDCLTTAGDKLQPSPPPLSPPPRAPPLSPGPGGCFEGGAGNCSSRGGRASDHPGGGREFFFDRHPGVFAYVLNYYRTGKLHCPADVCGPLFEEELAFWGIDETDVEPCCWMTYRQHRDAEEALDIFETPDLIGGDPGDDEDLAAKRLGIEDAAGLGGPDGKSGRWRRLQPRMWALFEDPYSSRAARFIAFASLFFILVSITTFCLETHEAFNIVKNKTEPVINGTSVVLQYEIETDPALTYVEGVCVVWFTFEFLVRIVFSPNKLEFIKNLLNIIDFVAILPFYLEVGLSGLSSKAAKDVLGFLRVVRFVRILRIFKLTRHFVGLRVLGHTLRASTNEFLLLIIFLALGVLIFATMIYYAERVGAQPNDPSASEHTQFKNIPIGFWWAVVTMTTLGYGDMYPQTWSGMLVGALCALAGVLTIAMPVPVIVNNFGMYYSLAMAKQKLPRKRKKHIPPAPQASSPTFCKTELNMACNSTQSDTCLGKDNRLLEHNRSDNCKEVVITGYTQAEARSLT

SEQ ID NO: 58791 - protein, 613 aa, Homo sapiens; identical to SEQ ID NO: 58788

SEQ ID NO: 58792 - protein, 638 aa, Homo sapiens
MGKIENNERVILNVGGTRHETYRSTLKTLPGTRLALLASSEPPGDCLTTAGDKLQPSPPPLSPPPRAPPLSPGPGGCFEGGAGNCSSRGGRASDHPGGGREFFFDRHPGVFAYVLNYYRTGKLHCPADVCGPLFEEELAFWGIDETDVEPCCWMTYRQHRDAEEALDIFETPDLIGGDPGDDEDLAAKRLGIEDAAGLGGPDGKSGRWRRLQPRMWALFEDPYSSRAARFIAFASLFFILVSITTFCLETHEAFNIVKNKTEPVINGTSVVLQYEIETDPALTYVEGVCVVWFTFEFLVRIVFSPNKLEFIKNLLNIIDFVAILPFYLEVGLSGLSSKAAKDVLGFLRVVRFVRILRIFKLTRHFVGLRVLGHTLRASTNEFLLLIIFLALGVLIFATMIYYAERVGAQPNDPSASEHTQFKNIPIGFWWAVVTMTTLGYGDMYPQTWSGMLVGALCALAGVLTIAMPVPVIVNNFGMYYSLAMAKQKLPRKRKKHIPPAPQASSPTFCKTELNMACNSTQSDTCLGKDNRLLEHNRSVLSGDDSTGSEPPLSPPERLPIRRSSTRDKNRRGETCFLLTTGDYTCASDGGIRKGYEKSRSLNNIAGLAGNALRLSPVTSPYNSPCPLRRSRSPIPSIL

SEQ ID NO: 58793 - protein, 629 aa, Homo sapiens; identical to SEQ ID NO: 58789

SEQ ID NO: 58794 - protein, 728 aa, Homo sapiens
MLSSVCVSSFRGRQGASKQQPAPPPQPPESPPPPPLPPQQQQPAQPGPAASPAGPPAPRGPGDRRAEPCPGLPAAAMGRHGGGGGDSGKIVINVGGVRHETYRSTLRTLPGTRLAGLTEPEAAARFDYDPGADEFFFDRHPGVFAYVLNYYRTGKLHCPADVCGPLFEEELGFWGIDETDVEACCWMTYRQHRDAEEALDSFEAPDPAGAANAANAAGAHDGGLDDEAGAGGGGLDGAGGELKRLCFQDAGGGAGGPPGGAGGAGGTWWRRWQPRVWALFEDPYSSRAARYVAFASLFFILISITTFCLETHEGFIHISNKTVTQASPIPGAPPENITNVEVETEPFLTYVEGVCVVWFTFEFLMRITFCPDKVEFLKSSLNIIDCVAILPFYLEVGLSGLSSKAAKDVLGFLRVVRFVRILRIFKLTRHFVGLRVLGHTLRASTNEFLLLIIFLALGVLIFATMIYYAERIGADPDDILGSNHTYFKNIPIGFWWAVVTMTTLGYGDMYPKTWSGMLVGALCALAGVLTIAMPVPVIVNNFGMYYSLAMAKQKLPKKKNKHIPRPPQPGSPNYCKPDPPPPPPPHPHHGSGGISPPPPITPPSMGVTVAGAYPAGPHTHPGLLRGGAGGLGIMGLPPLPAPGEPCPLAQEEVIEINRADPRPNGDPAAAALAHEDCPAIDQPAMSPEDKSPITPGSRGRYSRDRACFLLTDYAPSPDGSIRKALVTA

SEQ ID NO: 58795 - protein, 155 aa, Homo sapiens
MGIRQQLRLPTRTAQPLTSLPCPRKTRAPSRLEAVAAIAGTEPASSSPTMPLPLMAPSEKLLSPPETSRDFRSPPPLPPRLREIPQPQQHRGPERGVPAPRAPCHPPWLSPGRPPRSPDPALHPLALPSPLWGDSGVTGKKVKGAGGGGWGKGFF

SEQ ID NO: 58796 - protein, 542 aa, Homo sapiens
MTYRQHRDAEEALDSFEAPDPAGAANAANAAGAHDGGLDDEAGAGGGGLDGAGGELKRLCFQDAGGGAGGPPGGAGGAGGTWWRRWQPRVWALFEDPYSSRAARYVAFASLFFILISITTFCLETHEGFIHISNKTVTQASPIPGAPPENITNVEVETEPFLTYVEGVCVVWFTFEFLMRITFCPDKVEFLKSSLNIIDCVAILPFYLEVGLSGLSSKAAKDVLGFLRVVRFVRILRIFKLTRHFVGLRVLGHTLRASTNEFLLLIIFLALGVLIFATMIYYAERIGADPDDILGSNHTYFKNIPIGFWWAVVTMTTLGYGDMYPKTWSGMLVGALCALAGVLTIAMPVPVIVNNFGMYYSLAMAKQKLPKKKNKHIPRPPQPGSPNYCKPDPPPPPPPHPHHGSGGISPPPPITPPSMGVTVAGAYPAGPHTHPGLLRGGAGGLGIMGLPPLPAPGEPCPLAQEEVIEINRADPRPNGDPAAAALAHEDCPAIDQPAMSPEDKSPITPGSRGRYSRDRACFLLTDYAPSPDGSIRKALVTA

SEQ ID NO: 58797 - protein, 757 aa, Homo sapiens
MLSSVCVSSFRGRQGASKQQPAPPPQPPESPPPPPLPPQQQQPAQPGPAASPAGPPAPRGPGDRRAEPCPGLPAAAMGRHGGGGGDSGKIVINVGGVRHETYRSTLRTLPGTRLAGLTEPEAAARFDYDPGADEFFFDRHPGVFAYVLNYYRTGKLHCPADVCGPLFEEELGFWGIDETDVEACCWMTYRQHRDAEEALDSFEAPDPAGAANAANAAGAHDGGLDDEAGAGGGGLDGAGGELKRLCFQDAGGGAGGPPGGAGGAGGTWWRRWQPRVWALFEDPYSSRAARYVAFASLFFILISITTFCLETHEGFIHISNKTVTQASPIPGAPPENITNVEVETEPFLTYVEGVCVVWFTFEFLMRITFCPDKVEFLKSSLNIIDCVAILPFYLEVGLSGLSSKAAKDVLGFLRVVRFVRILRIFKLTRHFVGLRVLGHTLRASTNEFLLLIIFLALGVLIFATMIYYAERIGADPDDILGSNHTYFKNIPIGFWWAVVTMTTLGYGDMYPKTWSGMLVGALCALAGVLTIAMPVPVIVNNFGMYYSLAMAKQKLPKKKNKHIPRPPQPGSPNYCKPDPPPPPPPHPHHGSGGISPPPPITPPSMGVTVAGAYPAGPHTHPGLLRGGAGGLGIMGLPPLPAPGEPCPLAQEEVIEINRADPRPNGDPAAAALAHEDCPAIDQPAMSPEDKSPITPGSRGRYSRDRACFLLTDYAPSPDGSIRKATGAPPLPPQDWRKPGPPSFLPDLNANAAAWISP

SEQ ID NO: 58798 - protein, 635 aa, Homo sapiens
MISSVCVSSYRGRKSGNKPPSKTCLKEEMAKGEASEKIIINVGGTRHETYRSTLRTLPGTRLAWLADPDGGGRPETDGGGVGSSGSSGGGGCEFFFDRHPGVFAYVLNYYRTGKLHCPADVCGPLFEEELTFWGIDETDVEPCCWMTYRQHRDAEEALDIFESPDGGGSGAGPSDEAGDDERELALQRLGPHEGGAGHGAGSGGCRGWQPRMWALFEDPYSSRAARVVAFASLFFILVSITTFCLETHEAFNIDRNVTEILRVGNITSVHFRREVETEPILTYIEGVCVLWFTLEFLVRIVCCPDTLDFVKNLLNIIDFVAILPFYLEVGLSGLSSKAARDVLGFLRVVRFVRILRIFKLTRHFVGLRVLGHTLRASTNEFLLLIIFLALGVLIFATMIYYAERIGARPSDPRGNDHTDFKNIPIGFWWAVVTMTTLGYGDMYPKTWSGMLVGALCALAGVLTIAMPVPVIVNNFGMYYSLAMAKQKLPKKRKKHVPRPAQLESPMYCKSEETSPRDSTCSDTSPPAREEGMIERKRADSKQNGDANAVLSDEEGAGLTQPLASSPTPEERRALRRSTTRDRNKKAAACFLLSTGDYACADGSVRKGTFVLRDLPLQHSPEAACPPTAGTLFLPH

SEQ ID NO: 58799 - protein, 626 aa, Homo sapiens
MISSVCVSSYRGRKSGNKPPSKTCLKEEMAKGEASEKIIINVGGTRHETYRSTLRTLPGTRLAWLADPDGGGRPETDGGGVGSSGSSGGGGCEFFFDRHPGVFAYVLNYYRTGKLHCPADVCGPLFEEELTFWGIDETDVEPCCWMTYRQHRDAEEALDIFESPDGGGSGAGPSDEAGDDERELALQRLGPHEGGAGHGAGSGGCRGWQPRMWALFEDPYSSRAARVVAFASLFFILVSITTFCLETHEAFNIDRNVTEILRVGNITSVHFRREVETEPILTYIEGVCVLWFTLEFLVRIVCCPDTLDFVKNLLNIIDFVAILPFYLEVGLSGLSSKAARDVLGFLRVVRFVRILRIFKLTRHFVGLRVLGHTLRASTNEFLLLIIFLALGVLIFATMIYYAERIGARPSDPRGNDHTDFKNIPIGFWWAVVTMTTLGYGDMYPKTWSGMLVGALCALAGVLTIAMPVPVIVNNFGMYYSLAMAKQKLPKKRKKHVPRPAQLESPMYCKSEETSPRDSTCSDTSPPAREEGMIERKRADSKQNGDANAVLSDEEGAGLTQPLASSPTPEERRALRRSTTRDRNKKAAACFLLSTGDYACADGSVRKETCQDALSSNYAQAEVLTLS

SEQ ID NO: 58800 - protein, 635 aa, Homo sapiens; identical to SEQ ID NO: 58798

SEQ ID NO: 58801 - protein, 494 aa, Homo sapiens
MDGSGERSLPEPGSQSSAASDDIEIVVNVGGVRQVLYGDLLSQYPETRLAELINCLAGGYDTIFSLCDDYDPGKREFYFDRDPDAFKCVIEVYYFGEVHMKKGICPICFKNEMDFWKVDLKFLDDCCKSHLSEKREELEEIARRVQLILDDLGVDAAEGRWRRCQKCVWKFLEKPESSCPARVVAVLSFLLILVSSVVMCMGTIPELQVLDAEGNRVEHPTLENVETACIGWFTLEYLLRLFSSPNKLHFALSFMNIVDVLAILPFYVSLTLTHLGARMMELTNVQQAVQALRIMRIARIFKLARHSSGLQTLTYALKRSFKELGLLLMYLAVGIFVFSALGYTMEQSHPETLFKSIPQSFWWAIITMTTVGYGDIYPKTTLGKLNAAISFLCGVIAIALPIHPIINNFVRYYNKQRVLETAAKHELELMELNSSSGGEGKTGGSRSDLDNLPPEPAGKEAPSCSSRLKLSHSDTFIPLLTEEKHHRTRLQSCK

SEQ ID NO: 58802 - protein, 513 aa, Homo sapiens
MTLLPGDNSDYDYSALSCTSDASFHPAFLPQRQAIKGAFYRRAQRLRPQDEPRQGCQPEDRRRRIIINVGGIKYSLPWTTLDEFPLTRLGQLKACTNFDDILNVCDDYDVTCNEFFFDRNPGAFGTILTFLRAGKLRLLREMCALSFQEELLYWGIAEDHLDGCCKRRYLQKIEEFAEMVEREEEDDALDSEGRDSEGPAEGEGRLGRCMRRLRDMVERPHSGLPGKVFACLSVLFVTVTAVNLSVSTLPSLREEEEQGHCSQMCHNVFIVESVCVGWFSLEFLLRLIQAPSKFAFLRSPLTLIDLVAILPYYITLLVDGAAAGRRKPGAGNSYLDKVGLVLRVLRALRILYVMRLARHSLGLQTLGLTARRCTREFGLLLLFLCVAIALFAPLLYVIENEMADSPEFTSIPACYWWAVITMTTVGYGDMVPRSTPGQVVALSSILSGILLMAFPVTSIFHTFSRSYLELKQEQERVMFRRAQFLIKTKSQLSVSQDSDILFGSASSDTRDNN

SEQ ID NO: 58803 - protein, 275 aa, Homo sapiens
MTLLPGDNSDYDYSALSCTSDASFHPAFLPQRQAIKGAFYRRAQRLRPQDEPRQGCQPEDRRRRIIINVGGIKYSLPWTTLDEFPLTRLGQLKACTNFDDILNVCDDYDVTCNEFFFDRNPGAFGTILTFLRAGKLRLLREMCALSFQEELLYWGIAEDHLDGCCKRRYLQKIEEFAEMVEREEEDDALDSEGRDSEGPAEGEGRLGRCMRRLRDMVERPHSGLPGKVFACLSVLFVTVTAVNLSVSTLPSLREEEEQVRAHAPRGNAPPRGKGL

SEQ ID NO: 58804 - protein, 180 aa, Homo sapiens
MTLLPGDNSDYDYSALSCTSDASFHPAFLPQRQAIKGAFYRRAQRLRPQDEPRQGCQPEDRRRRIIINVGGIKYSLPWTTLDEFPLTRLGQLKACTNFDDILNVCDDYDVTCNEFFFDRNPGAFGTILTFLRAGKLRLLREMCALSFQEELLYWGIAEDHLDGCCKRRYLQKIEEFAEMV

SEQ ID NO: 58805 - protein, 96 aa, Homo sapiens
MTLLPGDNSDYDYSALSCTSDASFHPAFLPQRQAIKGAFYRRAQRLRPQDEPRQGCQPEDRRRRIIINVGGIKYSLPWTTLDEFPLTRLGQLKACT

SEQ ID NO: 58806 - protein, 258 aa, Homo sapiens
MTLLPGDNSDYDYSALSCTSDASFHPAFLPQRQAIKGAFYRRAQRLRPQDEPRQGCQPEDRRRRIIINVGGIKYSLPWTTLDEFPLTRLGQLKACTNFDDILNVCDDYDVTCNEFFFDRNPGAFGTILTFLRAGKLRLLREMCALSFQEELLYWGIAEDHLDGCCKRRYLQKIEEFAEMVEREEEDDALDSEGRDSEGPAEGEGRLGRCMRRLRDMVERPHSGLPGKVFACLSVLFVTVTAVNLSVSTLPSLREEEEQ

SEQ ID NO: 58807 - protein, 48 aa, Homo sapiens
MTLLPGDNSDYDYSALSCTSDASFHPAFLPQRQAIKGAFYRRAQRLRP

SEQ ID NO: 58808 - protein, 436 aa, Homo sapiens
MTFGRSGAASVVLNVGGARYSLSRELLKDFPLRRVSRLHGCRSERDVLEVCDDYDRERNEYFFDRHSEAFGFILLYVRGHGKLRFAPRMCELSFYNEMIYWGLEGAHLEYCCQRRLDDRMSDTYTFYSADEPGVLGRDEARPGGAEAAPSRRWLERMRRTFEEPTSSLAAQILASVSVVFVIVSMVVLCASTLPDWRNAAADNRSLDDRSRYSAGPGREPSGIIEAICIGWFTAECIVRFIVSKNKCEFVKRPLNIIDLLAITPYYISVLMTVFTGENSQLQRAGVTLRVLRMMRIFWVIKLARHFIGLQTLGLTLKRCYREMVMLLVFICVAMAIFSALSQLLEHGLDLETSNKDFTSIPAACWWVIISMTTVGYGDMYPITVPGRILGGVCVVSGIVLLALPITFIYHSFVQCYHELKFRSARYSRSLSTEFLN

SEQ ID NO: 58809 - protein, 425 aa, Homo sapiens
MTFGRSGAASVVLNVGGARYSLSRELLKDFPLRRVSRLHGCRSERDVLEVCDDYDRERNEYFFDRHSEAFGFILLYVRGHGKLRFAPRMCELSFYNEMIYWGLEGAHLEYCCQRRLDDRMSDTYTFYSADEPGVLGRDEARPGGAEAAPSRRWLERMRRTFEEPTSSLAAQILASVSVVFVIVSMVVLCASTLPDWRNAAADNRSLDDRSRIIEAICIGWFTAECIVRFIVSKNKCEFVKRPLNIIDLLAITPYYISVLMTVFTGENSQLQRAGVTLRVLRMMRIFWVIKLARHFIGLQTLGLTLKRCYREMVMLLVFICVAMAIFSALSQLLEHGLDLETSNKDFTSIPAACWWVIISMTTVGYGDMYPITVPGRILGGVCVVSGIVLLALPITFIYHSFVQCYHELKFRSARYSRSLSTEFLN

SEQ ID NO: 58810 - protein, 519 aa, Homo sapiens
MPMPSRDGGLHPRHHHYGSHSPWSQLLSSPMETPSIKGLYYRRVRKVGALDASPVDLKKEILINVGGRRYLLPWSTLDRFPLSRLSKLRLCRSYEEIVQLCDDYDEDSQEFFFDRSPSAFGVIVSFLAAGKLVLLQEMCALSFQEELAYWGIEEAHLERCCLRKLLRKLEELEELAKLHREDVLRQQRETRRPASHSSRWGLCMNRLREMVENPQSGLPGKVFACLSILFVATTAVSLCVSTMPDLRAEEDQGECSRKCYYIFIVETICVAWFSLEFCLRFVQAQDKCQFFQGPLNIIDILAISPYYVSLAVSEEPPEDGERPSGSSYLEKVGLVLRVLRALRILYVMRLARHSLGLQTLGLTVRRCTREFGLLLLFLAVAITLFSPLVYVAEKESGRVLEFTSIPASYWWAIISMTTVGYGDMVPRSVPGQMVALSSILSGILIMAFPATSIFHTFSHSYLELKKEQEQLQARLRHLQNTGPASECELLDPHVASEHELMNDVNDLILEGPALPIMHM

SEQ ID NO: 58811 - protein, 989 aa, Homo sapiens
MTMAGGRRGLVAPQNTFLENIVRRSNDTNFVLGNAQIVDWPIVYSNDGFCKLSGYHRAEVMQKSSTCSFMYGELTDKDTIEKVRQTFENYEMNSFEILMYKKNRTPVWFFVKIAPIRNEQDKVVLFLCTFSDITAFKQPIEDDSCKGWGKFARLTRALTSSRGVLQQLAPSVQKGENVHKHSRLAEVLQLGSDILPQYKQEAPKTPPHIILHYCVFKTTWDWIILILTFYTAILVPYNVSFKTRQNNVAWLVVDSIVDVIFLVDIVLNFHTTFVGPAGEVISDPKLIRMNYLKTWFVIDLLSCLPYDVINAFENVDEVSAFMGDPGKIGFADQIPPPLEGRESQGISSLFSSLKVVRLLRLGRVARKLDHYIEYGAAVLVLLVCVFGLAAHWMACIWYSIGDYEIFDEDTKTIRNNSWLYQLAMDIGTPYQFNGSGSGKWEGGPSKNSVYISSLYFTMTSLTSVGFGNIAPSTDIEKIFAVAIMMIGSLLYATIFGNVTTIFQQMYANTNRYHEMLNSVRDFLKLYQVPKGLSERVMDYIVSTWSMSRGIDTEKVLQICPKDMRADICVHLNRKVFKEHPAFRLASDGCLRALAMEFQTVHCAPGDLIYHAGESVDSLCFVVSGSLEVIQDDEVVAILGKGDVFGDVFWKEATLAQSCANVRALTYCDLHVIKRDALQKVLEFYTAFSHSFSRNLILTYNLRKRIVFRKISDVKREEEERMKRKNEAPLILPPDHPVRRLFQRFRQQKEARLAAERGGRDLDDLDVEKGNVLTEHASANHSLVKASVVTVRESPATPVSFQAASTSGVPDHAKLQAPGSECLGPKGGGGDCAKRKSWARFKDACGKSEDWNKVSKAESMETLPERTKASGEATLKKTDSCDSGITKSDLRLDNVGEARSPQDRSPILAEVKHSFYPIPEQTLQATVLEVRHELKEDIKALNAKMTNIEKQLSEILRILTSRRSSQSPQELFEISRPQSPESERDIFGAS

SEQ ID NO: 58812 - protein, 962 aa, Homo sapiens
MTMAGGRRGLVAPQNTFLENIVRRSNDTNFVLGNAQIVDWPIVYSNDGFCKLSGYHRAEVMQKSSTCSFMYGELTDKDTIEKVRQTFENYEMNSFEILMYKKNRTPVWFFVKIAPIRNEQDKVVLFLCTFSDITAFKQPIEDDSCKGWGKFARLTRALTSSRGVLQQLAPSVQKGENVHKHSRLAEVLQLGSDILPQYKQEAPKTPPHIILHYCVFKTTWDWIILILTFYTAILVPYNVSFKTRQNNVAWLVVDSIVDVIFLVDIVLNFHTTFVGPAGEVISDPKLIRMNYLKTWFVIDLLSCLPYDVINAFENVDEGISSLFSSLKVVRLLRLGRVARKLDHYIEYGAAVLVLLVCVFGLAAHWMACIWYSIGDYEIFDEDTKTIRNNSWLYQLAMDIGTPYQFNGSGSGKWEGGPSKNSVYISSLYFTMTSLTSVGFGNIAPSTDIEKIFAVAIMMIGSLLYATIFGNVTTIFQQMYANTNRYHEMLNSVRDFLKLYQVPKGLSERVMDYIVSTWSMSRGIDTEKVLQICPKDMRADICVHLNRKVFKEHPAFRLASDGCLRALAMEFQTVHCAPGDLIYHAGESVDSLCFVVSGSLEVIQDDEVVAILGKGDVFGDVFWKEATLAQSCANVRALTYCDLHVIKRDALQKVLEFYTAFSHSFSRNLILTYNLRKRIVFRKISDVKREEEERMKRKNEAPLILPPDHPVRRLFQRFRQQKEARLAAERGGRDLDDLDVEKGNVLTEHASANHSLVKASVVTVRESPATPVSFQAASTSGVPDHAKLQAPGSECLGPKGGGGDCAKRKSWARFKDACGKSEDWNKVSKAESMETLPERTKASGEATLKKTDSCDSGITKSDLRLDNVGEARSPQDRSPILAEVKHSFYPIPEQTLQATVLEVRHELKEDIKALNAKMTNIEKQLSEILRILTSRRSSQSPQELFEISRPQSPESERDIFGAS

SEQ ID NO: 58813 - protein, 1159 aa, Homo sapiens
MPVRRGHVAPQNTFLDTIIRKFEGQSRKFIIANARVENCAVIYCNDGFCELCGYSRAEVMQRPCTCDFLHGPRTQRRAAAQIAQALLGAEERKVEIAFYRKDGSCFLCLVDVVPVKNEDGAVIMFILNFEVVMEKDMVGSPAHDTNHRGPPTSWLAPGRAKTFRLKLPALLALTARESSVRSGGAGGAGAPGAVVVDVDLTPAAPSSESLALDEVTAMDNHVAGLGPAEERRALVGPGSPPRSAPGQLPSPRAHSLNPDASGSSCSLARTRSRESCASVRRASSADDIEAMRAGVLPPPPRHASTGAMHPLRSGLLNSTSDSDLVRYRTISKIPQITLNFVDLKGDPFLASPTSDREIIAPKIKERTHNVTEKVTQVLSLGADVLPEYKLQAPRIHRWTILHYSPFKAVWDWLILLLVIYTAVFTPYSAAFLLKETEEGPPATECGYACQPLAVVDLIVDIMFIVDILINFRTTYVNANEEVVSHPGRIAVHYFKGWFLIDMVAAIPFDLLIFGSGSEELIGLLKTARLLRLVRVARKLDRYSEYGAAVLFLLMCTFALIAHWLACIWYAIGNMEQPHMDSRIGWLHNLGDQIGKPYNSSGLGGPSIKDKYVTALYFTFSSLTSVGFGNVSPNTNSEKIFSICVMLIGSLMYASIFGNVSAIIQRLYSGTARYHTQMLRVREFIRFHQIPNPLRQRLEEYFQHAWSYTNGIDMNAVLKGFPECLQADICLHLNRSLLQHCKPFRGATKGCLRALAMKFKTTHAPPGDTLVHAGDLLTALYFISRGSIEILRGDVVVAILGKNDIFGEPLNLYARPGKSNGDVRALTYCDLHKIHRDDLLEVLDMYPEFSDHFWSSLEITFNLRDTNMIPGSPGSTELEGGFSRQRKRKLSFRRRTDKDTEQPGEVSALGPGRAGAGPSSRGRPGGPWGESPSSGPSSPESSEDEGPGRSSSPLRLVPFSSPRPPGEPPGGEPLMEDCEKSSDTCNPLSGAFSGVSNIFSFWGDSRGRQYQELPRCPAPTPSLLNIPLSSPGRRPRGDVESRLDALQRQLNRLETRLSADMATVLQLLQRQMTLVPPAYSAVTTPGPGPTSTSPLLPVSPLPTLTLDSLSQVSQFMACEELPPGAPELPQEGPTRRLSLPGQLGALTSQPLHRHGSDPGS

SEQ ID NO: 58814 - protein, 819 aa, Homo sapiens
MAAPAGKASRTGALRPRAQKGRVRRAVRISSLVAQEVLSLGADVLPEYKLQAPRIHRWTILHYSPFKAVWDWLILLLVIYTAVFTPYSAAFLLKETEEGPPATECGYACQPLAVVDLIVDIMFIVDILINFRTTYVNANEEVVSHPGRIAVHYFKGWFLIDMVAAIPFDLLIFGSGSEELIGLLKTARLLRLVRVARKLDRYSEYGAAVLFLLMCTFALIAHWLACIWYAIGNMEQPHMDSRIGWLHNLGDQIGKPYNSSGLGGPSIKDKYVTALYFTFSSLTSVGFGNVSPNTNSEKIFSICVMLIGSLMYASIFGNVSAIIQRLYSGTARYHTQMLRVREFIRFHQIPNPLRQRLEEYFQHAWSYTNGIDMNAVLKGFPECLQADICLHLNRSLLQHCKPFRGATKGCLRALAMKFKTTHAPPGDTLVHAGDLLTALYFISRGSIEILRGDVVVAILGKNDIFGEPLNLYARPGKSNGDVRALTYCDLHKIHRDDLLEVLDMYPEFSDHFWSSLEITFNLRDTNMIPGSPGSTELEGGFSRQRKRKLSFRRRTDKDTEQPGEVSALGPGRAGAGPSSRGRPGGPWGESPSSGPSSPESSEDEGPGRSSSPLRLVPFSSPRPPGEPPGGEPLMEDCEKSSDTCNPLSGAFSGVSNIFSFWGDSRGRQYQELPRCPAPTPSLLNIPLSSPGRRPRGDVESRLDALQRQLNRLETRLSADMATVLQLLQRQMTLVPPAYSAVTTPGPGPTSTSPLLPVSPLPTLTLDSLSQVSQFMACEELPPGAPELPQEGPTRRLSLPGQLGALTSQPLHRHGSDPGS

SEQ ID NO: 58815 - protein, 393 aa, Homo sapiens
MAAPAGKASRTGALRPRAQKGRVRRAVRISSLVAQEVLSLGADVLPEYKLQAPRIHRWTILHYSPFKAVWDWLILLLVIYTAVFTPYSAAFLLKETEEGPPATECGYACQPLAVVDLIVDIMFIVDILINFRTTYVNANEEVVSHPGRIAVHYFKGWFLIDMVAAIPFDLLIFGSGSEELIGLLKTARLLRLVRVARKLDRYSEYGAAVLFLLMCTFALIAHWLACIWYAIGNMEQPHMDSRIGWLHNLGDQIGKPYNSSGLGGPSIKDKYVTALYFTFSSLTSVGFGNVSPNTNSEKIFSICVMLIGSLMYASIFGNVSAIIQRLYSGTARYHTQMLRVREFIRFHQIPNPLRQCCDHPGAWPHFHIPAVARQPPPHPHLGLAFSGFPVHGV

SEQ ID NO: 58816 - protein, 1063 aa, Homo sapiens
MSSHSAGSCFLCLVDVVPVKNEDGAVIMFILNFEVVMEKDMVGSPAHDTNHRGPPTSWLAPGRAKTFRLKLPALLALTARESSVRSGGAGGAGAPGAVVVDVDLTPAAPSSESLALDEVTAMDNHVAGLGPAEERRALVGPGSPPRSAPGQLPSPRAHSLNPDASGSSCSLARTRSRESCASVRRASSADDIEAMRAGVLPPPPRHASTGAMHPLRSGLLNSTSDSDLVRYRTISKIPQITLNFVDLKGDPFLASPTSDREIIAPKIKERTHNVTEKVTQVLSLGADVLPEYKLQAPRIHRWTILHYSPFKAVWDWLILLLVIYTAVFTPYSAAFLLKETEEGPPATECGYACQPLAVVDLIVDIMFIVDILINFRTTYVNANEEVVSHPGRIAVHYFKGWFLIDMVAAIPFDLLIFGSGSEELIGLLKTARLLRLVRVARKLDRYSEYGAAVLFLLMCTFALIAHWLACIWYAIGNMEQPHMDSRIGWLHNLGDQIGKPYNSSGLGGPSIKDKYVTALYFTFSSLTSVGFGNVSPNTNSEKIFSICVMLIGSLMYASIFGNVSAIIQRLYSGTARYHTQMLRVREFIRFHQIPNPLRQRLEEYFQHAWSYTNGIDMNAVLKGFPECLQADICLHLNRSLLQHCKPFRGATKGCLRALAMKFKTTHAPPGDTLVHAGDLLTALYFISRGSIEILRGDVVVAILGKNDIFGEPLNLYARPGKSNGDVRALTYCDLHKIHRDDLLEVLDMYPEFSDHFWSSLEITFNLRDTNMIPGSPGSTELEGGFSRQRKRKLSFRRRTDKDTEQPGEVSALGPGRAGAGPSSRGRPGGPWGESPSSGPSSPESSEDEGPGRSSSPLRLVPFSSPRPPGEPPGGEPLMEDCEKSSDTCNPLSGAFSGVSNIFSFWGDSRGRQYQELPRCPAPTPSLLNIPLSSPGRRPRGDVESRLDALQRQLNRLETRLSADMATVLQLLQRQMTLVPPAYSAVTTPGPGPTSTSPLLPVSPLPTLTLDSLSQVSQFMACEELPPGAPELPQEGPTRRLSLPGQLGALTSQPLHRHGSDPGS

SEQ ID NO: 58817 - protein, 888 aa, Homo sapiens
MPVRRGHVAPQNTFLDTIIRKFEGQSRKFIIANARVENCAVIYCNDGFCELCGYSRAEVMQRPCTCDFLHGPRTQRRAAAQIAQALLGAEERKVEIAFYRKDGSCFLCLVDVVPVKNEDGAVIMFILNFEVVMEKDMVGSPAHDTNHRGPPTSWLAPGRAKTFRLKLPALLALTARESSVRSGGAGGAGAPGAVVVDVDLTPAAPSSESLALDEVTAMDNHVAGLGPAEERRALVGPGSPPRSAPGQLPSPRAHSLNPDASGSSCSLARTRSRESCASVRRASSADDIEAMRAGVLPPPPRHASTGAMHPLRSGLLNSTSDSDLVRYRTISKIPQITLNFVDLKGDPFLASPTSDREIIAPKIKERTHNVTEKVTQVLSLGADVLPEYKLQAPRIHRWTILHYSPFKAVWDWLILLLVIYTAVFTPYSAAFLLKETEEGPPATECGYACQPLAVVDLIVDIMFIVDILINFRTTYVNANEEVVSHPGRIAVHYFKGWFLIDMVAAIPFDLLIFGSGSEELIGLLKTARLLRLVRVARKLDRYSEYGAAVLFLLMCTFALIAHWLACIWYAIGNMEQPHMDSRIGWLHNLGDQIGKPYNSSGLGGPSIKDKYVTALYFTFSSLTSVGFGNVSPNTNSEKIFSICVMLIGSLMYASIFGNVSAIIQRLYSGTARYHTQMLRVREFIRFHQIPNPLRQRLEEYFQHAWSYTNGIDMNAVLKGFPECLQADICLHLNRSLLQHCKPFRGATKGCLRALAMKFKTTHAPPGDTLVHAGDLLTALYFISRGSIEILRGDVVVAILGMGWGAGTGLEMPSAASRGASLLNMQSLGLWTWDCLQGHWAPLIHLNSGPPSGAMERSPTWGEAAELWGSHILLPFRIRHKQTLFASLK

SEQ ID NO: 58818 - protein, 1083 aa, Homo sapiens
MPAMRGLLAPQNTFLDTIATRFDGTHSNFVLGNAQVAGLFPVVYCSDGFCDLTGFSRAEVMQRGCACSFLYGPDTSELVRQQIRKALDEHKEFKAELILYRKSGLPFWCLLDVIPIKNEKGEVALFLVSHKDISETKNRGGPDRWKETGGGRRRYGRARSKGFNANRRRSRAVLYHLSGHLQKQPKGKHKLNKGVFGEKPNLPEYKVAAIRKSPFILLHCGALRATWDGFILLATLYVAVTVPYSVCVSTAREPSAARGPPSVCDLAVEVLFILDIVLNFRTTFVSKSGQVVFAPKSICLHYVTTWFLLDVIAALPFDLLHAFKVNVYFGAHLLKTVRLLRLLRLLPRLDRYSQYSAVVLTLLMAVFALLAHWVACVWFYIGQREIESSESELPEIGWLQELARRLETPYYLVGRRPAGGNSSGQSDNCSSSSEANGTGLELLGGPSLRSAYITSLYFALSSLTSVGFGNVSANTDTEKIFSICTMLIGALMHAVVFGNVTAIIQRMYARRFLYHSRTRDLRDYIRIHRIPKPLKQRMLEYFQATWAVNNGIDTTELLQSLPDELRADIAMHLHKEVLQLPLFEAASRGCLRALSLALRPAFCTPGEYLIHQGDALQALYFVCSGSMEVLKGGTVLAILGKGDLIGCELPRREQVVKANADVKGLTYCVLQCLQLAGLHDSLALYPEFAPRFSRGLRGELSYNLGAGGGSAEVDTSSLSGDNTLMSTLEEKETDGEQGPTVSPAPADEPSSPLLSPGCTSSSSAAKLLSPRRTAPRPRLGGRGRPGRAGALKAEAGPSAPPRALEGLRLPPMPWNVPPDLSPRVVDGIEDGCGSDQPKFSFRVGQSGPECSSSPSPGPESGLLTVPHGPSEARNTDTLDKLRQAVTELSEQVLQMREGLQSLRQAVQLVLAPHREGPCPRASGEGPCPASTSGLLQPLCVDTGASSYCLQPPAGSVLSGTWPHPRPGPPPLMAPWPWGPPASQSSPWPRATAFWTSTSDSEPPASGDLCSEPSTPASPPPSEEGARTGPAEPVSQAEATSTGEPPPGSGGLALPWDPHSLEMVLIGCHGSGTVQWTQEEGTGV

SEQ ID NO: 58819 - protein, 988 aa, Homo sapiens
MPGGKRGLVAPQNTFLENIVRRSSESSFLLGNAQIVDWPVVYSNDGFCKLSGYHRADVMQKSSTCSFMYGELTDKKTIEKVRQTFDNYESNCFEVLLYKKNRTPVWFYMQIAPIRNEHEKVVLFLCTFKDITLFKQPIEDDSTKGWTKFARLTRALTNSRSVLQQLTPMNKTEVVHKHSRLAEVLQLGSDILPQYKQEAPKTPPHIILHYCAFKTTWDWVILILTFYTAIMVPYNVSFKTKQNNIAWLVLDSVVDVIFLVDIVLNFHTTFVGPGGEVISDPKLIRMNYLKTWFVIDLLSCLPYDIINAFENVDEGISSLFSSLKVVRLLRLGRVARKLDHYLEYGAAVLVLLVCVFGLVAHWLACIWYSIGDYEVIDEVTNTIQIDSWLYQLALSIGTPYRYNTSAGIWEGGPSKDSLYVSSLYFTMTSLTTIGFGNIAPTTDVEKMFSVAMMMVGSLLYATIFGNVTTIFQQMYANTNRYHEMLNNVRDFLKLYQVPKGLSERVMDYIVSTWSMSKGIDTEKVLSICPKDMRADICVHLNRKVFNEHPAFRLASDGCLRALAVEFQTIHCAPGDLIYHAGESVDALCFVVSGSLEVIQDDEVVAILGKGDVFGDIFWKETTLAHACANVRALTYCDLHIIKREALLKVLDFYTAFANSFSRNLTLTCNLRKRIIFRKISDVKKEEEERLRQKNEVTLSIPVDHPVRKLFQKFKQQKELRNQGSTQGDPERNQLQVESRSLQNGASITGTSVVTVSQITPIQTSLAYVKTSESLKQNNRDAMELKPNGGADQKCLKVNSPIRMKNGNGKGWLRLKNNMGAHEEKKEDWNNVTKAESMGLLSEDPKSSDSENSVTKNPLRKTDSCDSGITKSDLRLDKAGEARSPLEHSPIQADAKHPFYPIPEQALQTTLQEVKHELKEDIQLLSCRMTALEKQVAEILKILSEKSVPQASSPKSQMPLQVPPQIPCQDIFSVSRPESPESDKDEIHF

SEQ ID NO: 58820 - protein, 422 aa, Homo sapiens
MQKSSTCSFMYGELTDKKTIEKVRQTFDNYESNCFEVLLYKKNRTPVWFYMQIAPIRNEHEKVVLFLCTFKDITLFKQPIEDDSTKGWTKFARLTRALTNSRSVLQQLTPMNKTEVVHKHSRLAEVLQLGSDILPQYKQEAPKTPPHIILHYCAFKTTWDWVILILTFYTAIMVPYNVSFKTKQNNIAWLVLDSVVDVIFLVDIVLNFHTTFVGPGGEVISDPKLIRMNYLKTWFVIDLLSCLPYDIINAFENVDEGISSLFSSLKVVRLLRLGRVARKLDHYLEYGAAVLVLLVCVFGLVAHWLACIWYSIGDYEVIDEVTNTIQIDSWLYQLALSIGTPYRYNTSAGIWEGGPSKDSLYVSSLYFTMTSLTTIGFGNIAPTTDVEKMFSVAMMMVGCKYFNFFIENYCYWQFSWLQSQIG

SEQ ID NO: 58821 - protein, 732 aa, Homo sapiens
MPVRRGHVAPQNTFLGTIIRKFEGQNKKFIIANARVQNCAIIYCNDGFCEMTGFSRPDVMQKPCTCDFLHGPETKRHDIAQIAQALLGSEERKVEVTYYHKNGSTFICNTHIIPVKNQEGVAMMFIINFEYVTDNENAATPERVNPILPIKTVNRKFFGFKFPGLRVLTYRKQSLPQEDPDVVVIDSSKHSDDSVAMKHFKSPTKESCSPSEADDTKALIQPSKCSPLVNISGPLDHSSPKRQWDRLYPDMLQSSSQLSHSRSRESLCSIRRASSVHDIEGFGVHPKNIFRDRHASEGPFNHIKSSLLGSTSDSNLNKYSTINKIPQLTLNFSEVKTEKKNSSPPSSDKTIIAPKVKDRTHNVTEKVTQVLSLGADVLPEYKLQTPRINKFTILHYSPFKAVWDWLILLLVIYTAIFTPYSAAFLLNDREEQKRRECGYSCSPLNVVDLIVDIMFIIDILINFRTTYVNQNEEVVSDPAKIAIHYFKGWFLIDMVAAIPFDLLIFGSGSDETTTLIGLLKTARLLRLVRVARKLDRYSEYGAAVLMLLMCIFALIAHWLACIWYAIGNVERPYLTDKIGWLDSLGQQIGKRYNDSDSSSGPSIKDKYVTALYFTFSSLTSVGFGNVSPNTNSEKIFSICVMLIGSLMYASIFGNVSAIIQRLYSGTARYHMQMLRVKEFIRFHQIPNPLRQRLEEYFQHAWTYTNGIDMNMVCMSVFQNESAAGIIVIAKME

SEQ ID NO: 58822 - protein, 1196 aa, Homo sapiens
MPVRRGHVAPQNTFLGTIIRKFEGQNKKFIIANARVQNCAIIYCNDGFCEMTGFSRPDVMQKPCTCDFLHGPETKRHDIAQIAQALLGSEERKVEVTYYHKNGSTFICNTHIIPVKNQEGVAMMFIINFEYVTDNENAATPERVNPILPIKTVNRKFFGFKFPGLRVLTYRKQSLPQEDPDVVVIDSSKHSDDSVAMKHFKSPTKESCSPSEADDTKALIQPSKCSPLVNISGPLDHSSPKRQWDRLYPDMLQSSSQLSHSRSRESLCSIRRASSVHDIEGFGVHPKNIFRDRHASEDNGRNVKGPFNHIKSSLLGSTSDSNLNKYSTINKIPQLTLNFSEVKTEKKNSSPPSSDKTIIAPKVKDRTHNVTEKVTQVLSLGADVLPEYKLQTPRINKFTILHYSPFKAVWDWLILLLVIYTAIFTPYSAAFLLNDREEQKRRECGYSCSPLNVVDLIVDIMFIIDILINFRTTYVNQNEEVVSDPAKIAIHYFKGWFLIDMVAAIPFDLLIFGSGSDETTTLIGLLKTARLLRLVRVARKLDRYSEYGAAVLMLLMCIFALIAHWLACIWYAIGNVERPYLTDKIGWLDSLGQQIGKRYNDSDSSSGPSIKDKYVTALYFTFSSLTSVGFGNVSPNTNSEKIFSICVMLIGSLMYASIFGNVSAIIQRLYSGTARYHMQMLRVKEFIRFHQIPNPLRQRLEEYFQHAWTYTNGIDMNMVLKGFPECLQADICLHLNQTLLQNCKAFRGASKGCLRALAMKFKTTHAPPGDTLVHCGDVLTALYFLSRGSIEILKDDIVVAILGKNDIFGEMVHLYAKPGKSNADVRALTYCDLHKIQREDLLEVLDMYPEFSDHFLTNLELTFNLRHESAKADLLRSQSMNDSEGDNCKLRRRKLSFESEGEKENSTNDPEDSADTIRHYQSSKRHFEEKKSRSSSFISSIDDEQKPLFSGIVDSSPGIGKASGLDFEETVPTSGRMHIDKRSHSCKDITDMRSWERENAHPQPEDSSPSALQRAAWGISETESDLTYGEVEQRLDLLQEQLNRLESQMTTDIQTILQLLQKQTTVVPPAYSMVTAGSEYQRPIIQLMRTSQPEASIKTDRSFSPSSQCPEFLDLEKSKLKSKESLSSGVHLNTASEDNLTSLLKQDSDLSLELHLRQRKTYVHPIRHPSLPDSSLSTVGIVGLHRHVSDPGLPGK

SEQ ID NO: 58823 - protein, 584 aa, Homo sapiens
MVAEVCSMPTASTVKKPFDLRSKMGKWCHHRFPCCRGSGKSNMGTSGDHDDSFMKMLRSKMGKCCRHCFPCCRGSGTSNVGTSGDHENSFMKMLRSKMGKWCCHCFPCCRGSGKSNVGAWGDYDHSAFMEPRYHIRREDLDKLHRAAWWGKVPRKDLIVMLRDTDMNKRDKEKRTALHLASANGNSEVVQLLLDRRCQLNVLDNKKRTALIKAIQCQEDECVLMLLEHGADRNIPDEYGNTALHYAIYNEDKLMAKALLLYGADIESKNKCGLTPLLLGVHEQKQQVVKFLIKKKANLNVLDRYGRTALILAVCCGSASIVNLLLEQNVDVSSQDLSGQTAREYAVSSHHHVICELLSDYKEKQMLKISSENSNPEQDLKLTSEEESQRLKVSENSQPEKMSQEPEINKDCDREVEEEIKKHGSNPVGLPENLTNGASAGNGDDGLIPQRRSRKPENQQFPDTENEEYHSDEQNDTRKQLSEEQNTGISQDEILTNKQKQIEVAEQKMNSELSLSHKKEEDLLRENSVLQEEIAMLRLELDETKHQNQLRENKILEEIESVKEKTDKLLRAMQLNEEALTKTNI

SEQ ID NO: 58824 - protein, 545 aa, Homo sapiens
MVAEAGSMPAASSVKKPFGLRSKMGKWCRHCFAWCRGSGKSNVGTSGDHDDSAMKTLRSKMGKWCCHCFPWCRGSGKSNVGTSGDHDDSAMKTLRSKMGKWCCHCFPCCRGSGKSNVGTSGDHDDSAMKTLRSKMGKWCCHCFPCCRGSGKNKVGPWGDYDDSAFMEPRYHVRREDLDKLHRAAWWGKVPRKDLIVMLKDTDMNKKDKQKRTALHLASANGNSEVVKLLLDRRCQLNILDNKKRTALTKAVQCQEDECALMLLEHGTDPNIPDEYGNTALHYAIYNEDKLMAKALLLYGADIESKNKHGLTPLLLGVHEQKQQVVKFLIKKKANLNALDRYGRTALILAVCCGSASIVSLLLEQNIDVSSQDLSGQTAREYAVSSRHNVICQLLSDYKEKQILKVSSENSNPEQDLKLTSEEESQRLKGSENSQPEEMSQEPEINKGGDRKVEEEMKKHGSTHMGFPENLTNGATADNGDDGLIPPRKSRTPESQQFPDTENEQYHSDEQNDTQKQLSEEQNTGILQDEILIHEEKQIEVAENEF

SEQ ID NO: 58825 - protein, 288 aa, Homo sapiens
MVAEAGSMPAASSVKKPFGLRSKMGKWCRHCFAWCRGSGKSNVGTSGDHDDSAMKTLRSKMGKWCCHCFPWCRGSGKSNVGTSGDHDDSAMKTLRSKMGKWCCHCFPCCRGSGKSNVGTSGDHDDSAMKTLRSKMGKWCCHCFPCCRGSGKNKVGPWGDYDDSAFMEPRYHVRREDLDKLHRAAWWGKVPRKDLIVMLKDTDMNKKDKQKRTALHLASANGNSEVVKLLLDRRCQLNILDNKKRTALTKAVQCQEDECALMLLEHGTDPNIPDEYGNTALHYAIYNED

SEQ ID NO: 58826 - protein, 508 aa, Homo sapiens
MVAEAGSMPAASSVKKPFGLRSKMGKWCRHCFAWCRGSGKSNVGTSGDHDDSAMKTLRSKMGKWCCHCFPWCRGSGKSNVGTSGDHDDSAMKTLRSKMGKWCCHCFPCCRGSGKNKVGPWGDYDDSAFMEPRYHVRREDLDKLHRAAWWGKVPRKDLIVMLKDTDMNKKDKQKRTALHLASANGNSEVVKLLLDRRCQLNILDNKKRTALTKAVQCQEDECALMLLEHGTDPNIPDEYGNTALHYAIYNEDKLMAKALLLYGADIESKNKHGLTPLLLGVHEQKQQVVKFLIKKKANLNALDRYGRTALILAVCCGSASIVSLLLEQNIDVSSQDLSGQTAREYAVSSRHNVICQLLSDYKEKQILKVSSENSNPEQDLKLTSEEESQRLKGSENSQPEEMSQEPEINKGGDRKVEEEMKKHGSTHMGFPENLTNGATADNGDDGLIPPRKSRTPESQQFPDTENEQYHSDEQNDTQKQLSEEQNTGILQDEILIHEEKQIEVAENEF

SEQ ID NO: 58827 - protein, 317 aa, Homo sapiens
MSCQAFTSADTFIPLNSDASATLPLIMHHSAAECLPVSNHATNVMSTVPSILSLIQTPKCLCTHFSVTTLGNTATGLHYSVPSCHYGNQPSTYGVMAGSLTPCLYKFPDHTLSHGFPPIHQPLLAEDPTAADFKQELRRKSKLVEEPIDMDSPEIRELEKFANEFKVRRIKLGYTQTNVGEALAAVHGSEFSQTTICRFENLQLSFKNACKLKAILSKWLEEAEQVGALYNEKVGANERKRKRRTTISIAAKDALERHFGEQNKPSSQEIMRMAEELNLEKEVVRVWFCNRRQREKRVKTSLNQSLFSISKEHLECR

SEQ ID NO: 58828 - protein, 291 aa, Homo sapiens
MSCQAFTSADTFIPLNSDASATLPLIMHHSAAECLPVSNHATNVMSTATGLHYSVPSCHYGNQPSTYGVMAGSLTPCLYKFPDHTLSHGFPPIHQPLLAEDPTAADFKQELRRKSKLVEEPIDMDSPEIRELEKFANEFKVRRIKLGYTQTNVGEALAAVHGSEFSQTTICRFENLQLSFKNACKLKAILSKWLEEAEQVGALYNEKVGANERKRKRRTTISIAAKDALERHFGEQNKPSSQEIMRMAEELNLEKEVVRVWFCNRRQREKRVKTSLNQSLFSISKEHLECR

SEQ ID NO: 58829 - protein, 256 aa, Homo sapiens
MLWQKPTAPEQAPAPARPYQGVRVKEPVKELLRRKRGHASSGAAPAPTAVVLPHQPLATYTTVGPSCLDMEGSVSAVTEEAALCAGWLSQPTPATLQPLAPWTPYTEYVPHEAVSCPYSADMYVQPVCPSYTVVGPSSVLTYASPPLITNVTTRSSATPAVGPPLEGPEHQAPLTYFPWPQPLSTLPTSTLQYQPPAPALPGPQFVQLPISIPEPVLQDMEDPRRAASSLTIDKLLLEEEDSDAYALNHTLSVEGF

SEQ ID NO: 58830 - protein, 479 aa, Homo sapiens
MVHSSMGAPEIRMSKPLEAEKQGLDSPSEHTDTERNGPDTNHQNPQNKTSPFSVSPTGPSTKIKAEDPSGDSAPAAPLPPQPAQPHLPQAQLMLTGSQLAGDIQQLLQLQQLVLVPGHHLQPPAQFLLPQAQQSQPGLLPTPNLFQLPQQTQGALLTSQPRAGLPTQAVTRPTLPDPHLSHPQPPKCLEPPSHPEEPSDLEELEQFARTFKQRRIKLGFTQGDVGLAMGKLYGNDFSQTTISRFEALNLSFKNMCKLKPLLEKWLNDAETMSVDSSLPSPNQLSSPSLGFDGLPGRRRKKRTSIETNVRFALEKSFLANQKPTSEEILLIAEQLHMEKEVIRVWFCNRRQKEKRINPCSAAPMLPSPGKPASYSPHMVTPQGGAGTLPLSQASSSLSTTVTTLSSAVGTLHPSRTAGGGGGGGGAAPPLNSIPSVTPPPPATTNSTNPSPQGSHSAIGLSGLNPSTGPGLWWNPAPYQP

SEQ ID NO: 58831 - protein, 602 aa, Homo sapiens
MVHSSMGAPEIRMSKPLEAEKQGLDSPSEHTDTERNGPDTNHQNPQNKTSPFSVSPTGPSTKIKAEDPSGDSAPAAPLPPQPAQPHLPQAQLMLTGSQLAGDIQQLLQLQQLVLVPGHHLQPPAQFLLPQAQQSQPGLLPTPNLFQLPQQTQGALLTSQPRAGLPTQAVTRPTLPDPHLSHPQPPKCLEPPSHPEEPSDLEELEQFARTFKQRRIKLGFTQGDVGLAMGKLYGNDFSQTTISRFEALNLSFKNMCKLKPLLEKWLNDAETMSVDSSLPSPNQLSSPSLGFDGLPGRRRKKRTSIETNVRFALEKSFLANQKPTSEEILLIAEQLHMEKEVIRVWFCNRRQKEKRINPCSAAPMLPSPGKPASYSPHMVTPQGGAGTLPLSQASSSLSTTVTTLSSAVGTLHPSRTAGGGGGGGGAAPPLNSIPSVTPPPPATTNSTNPSPQGSHSAIGLSGLNPSTGSTMVGLSSGLSPALMSNNPLATIQALASGGTLPLTSLDGSGNLVLGAAGAAPGSPGLVTSPLFLNHAGLPLLSTPPGVGLVSAAAAAVAASISSKSPGLSSSSSSSSSSSSSTCSETAAQTPGGPGGPEAGSKPE

SEQ ID NO: 58832 - protein, 463 aa, Homo sapiens
MVHSSMGAPEIRMSKPLEAEKQGLDSPSEHTDTERNGPDTNHQNPQNKTSPFSVSPTGPSTKIKAEDPSGDSAPAAPLPPQPAQPHLPQAQLMLTGSQLAGDIQQLLQLQQLVLVPGHHLQPPAQFLLPQAQQSQPGLLPTPNLFQLPQQTQGALLTSQPRAGLPTQPPKCLEPPSHPEEPSDLEELEQFARTFKQRRIKLGFTQGDVGLAMGKLYGNDFSQTTISRFEALNLSFKNMCKLKPLLEKWLNDAETMSVDSSLPSPNQLSSPSLGFDGLPGRRRKKRTSIETNVRFALEKSFLANQKPTSEEILLIAEQLHMEKEVIRVWFCNRRQKEKRINPCSAAPMLPSPGKPASYSPHMVTPQGGAGTLPLSQASSSLSTTVTTLSSAVGTLHPSRTAGGGGGGGGAAPPLNSIPSVTPPPPATTNSTNPSPQGSHSAIGLSGLNPSTGPGLWWNPAPYQP

SEQ ID NO: 58833 - protein, 474 aa, Homo sapiens
MGAPEIRMSKPLEAEKQGLDSPSEHTDTERNGPDTNHQNPQNKTSPFSVSPTGPSTKIKAEDPSGDSAPAAPLPPQPAQPHLPQAQLMLTGSQLAGDIQQLLQLQQLVLVPGHHLQPPAQFLLPQAQQSQPGLLPTPNLFQLPQQTQGALLTSQPRAGLPTQAVTRPTLPDPHLSHPQPPKCLEPPSHPEEPSDLEELEQFARTFKQRRIKLGFTQGDVGLAMGKLYGNDFSQTTISRFEALNLSFKNMCKLKPLLEKWLNDAETMSVDSSLPSPNQLSSPSLGFDGLPGRRRKKRTSIETNVRFALEKSFLANQKPTSEEILLIAEQLHMEKEVIRVWFCNRRQKEKRINPCSAAPMLPSPGKPASYSPHMVTPQGGAGTLPLSQASSSLSTTVTTLSSAVGTLHPSRTAGGGGGGGGAAPPLNSIPSVTPPPPATTNSTNPSPQGSHSAIGLSGLNPSTGPGLWWNPAPYQP

SEQ ID NO: 58834 - protein, 400 aa, Homo sapiens
MVHSSMGAPEIRMSKPLEAEKQGLDSPSEHTDTERNGPDTNHQNPQNKTSPFSVSPTGPSTKIKAEDPSGDSAPAAPLPPQPAQPHLPQAQLMLTGSQLAGDIQQLLQLQQLVLVPGHHLQPPAQFLLPQAQQSQPGLLPTPNLFQLPQQTQGALLTSQPRAGLPTQPPKCLEPPSHPEEPSDLEELEQFARTFKQRRIKLGFTQGDVGLAMGKLYGNDFSQTTISRFEALNLSFKNMCKLKPLLEKWLNDAETMSVDSSLPSPNQLSSPSLGFDGLPGRRRKKRTSIETNVRFALEKSFLANQKPTSEEILLIAEQLHMEKEVIRVWFCNRRQKEKRINPCSAAPMLPSPGKPASYSPHMVTPQGGAGTLPLSQASSSLSTTAQTPALKAATRLSACQA

SEQ ID NO: 58835 - protein, 467 aa, Homo sapiens
MVHSSMGAPEIRMSKPLEAEKQGLDSPSEHTDTERNGPDTNHQNPQNKTSPFSVSPTGPSTKIKAEDPSGDSAPAAPLPPQPAQPHLPQAQLMLTGSQLAGDIQQLLQLQQLVLVPGHHLQPPAQFLLPQAQQSQPGLLPTPNLFQLPQQTQGALLTSQPRAGLPTQAVTRPTLPDPHLSHPQPPKCLEPPSHPEEPSDLEELEQFARTFKQRRIKLGFTQGDVGLAMGKLYGNDFSQTTISRFEALNLSFKNMCKLKPLLEKWLNDAETMSVDSSLPSPNQLSSPSLGFDGLPGRRRKKRTSIETNVRFALEKSFLANQKPTSEEILLIAEQLHMEKEVIRVWFCNRRQKEKRINPCSAAPMLPSPGKPASYSPHMVTPQGGAGTLPLSQASSSLSTTVTTLSSAVGTLHPSRTAGGGGGGGGAAPPLNSIPSVTPPPPATTNSTNPSPQGSHSAIGLSGLNPSTG

SEQ ID NO: 58836 - protein, 586 aa, Homo sapiens
MVHSSMGAPEIRMSKPLEAEKQGLDSPSEHTDTERNGPDTNHQNPQNKTSPFSVSPTGPSTKIKAEDPSGDSAPAAPLPPQPAQPHLPQAQLMLTGSQLAGDIQQLLQLQQLVLVPGHHLQPPAQFLLPQAQQSQPGLLPTPNLFQLPQQTQGALLTSQPRAGLPTQPPKCLEPPSHPEEPSDLEELEQFARTFKQRRIKLGFTQGDVGLAMGKLYGNDFSQTTISRFEALNLSFKNMCKLKPLLEKWLNDAETMSVDSSLPSPNQLSSPSLGFDGLPGRRRKKRTSIETNVRFALEKSFLANQKPTSEEILLIAEQLHMEKEVIRVWFCNRRQKEKRINPCSAAPMLPSPGKPASYSPHMVTPQGGAGTLPLSQASSSLSTTVTTLSSAVGTLHPSRTAGGGGGGGGAAPPLNSIPSVTPPPPATTNSTNPSPQGSHSAIGLSGLNPSTGSTMVGLSSGLSPALMSNNPLATIQALASGGTLPLTSLDGSGNLVLGAAGAAPGSPGLVTSPLFLNHAGLPLLSTPPGVGLVSAAAAAVAASISSKSPGLSSSSSSSSSSSSSTCSETAAQTPGGPGGPEAGSKPE

SEQ ID NO: 58837 - protein, 436 aa, Homo sapiens
MVNLESMHTDIKMSGDVADSTDARSTLSQVEPGNDRNGLDFNRQIKTEDLSDSLQQTLSHRPCHLSQGPAMMSGNQMSGLNASPCQDMASLHPLQQLVLVPGHLQSVSQFLLSQTQPGQQGLQPNLLPFPQQQSGLLLPQTGPGLASQAFGHPGLPGSSLEPHLEASQHLPVPKHLPSSGGADEPSDLEELEKFAKTFKQRRIKLGFTQGDVGLAMGKLYGNDFSQTTISRFEALNLSFKNMCKLKPLLEKWLNDAESSPSDPSVSTPSSYPSLSEVFGRKRKKRTSIETNIRLTLEKRFQDNPKPSSEEISMIAEQLSMEKEVVRVWFCNRRQKEKRINCPVATPIKPPVYNSRLVSPSGSLGPLSVPPVHSTMPGTVTSSCSPGNNSRPSSPGSGLHASSPTASQNNSKAAVNSASSFNSSGSWYRWNHSTYLH

SEQ ID NO: 58838 - protein, 438 aa, Homo sapiens
MESPRTAKGGRDIKMSGDVADSTDARSTLSQVEPGNDRNGLDFNRQIKTEDLSDSLQQTLSHRPCHLSQGPAMMSGNQMSGLNASPCQDMASLHPLQQLVLVPGHLQSVSQFLLSQTQPGQQGLQPNLLPFPQQQSGLLLPQTGPGLASQAFGHPGLPGSSLEPHLEASQHLPVPKHLPSSGGADEPSDLEELEKFAKTFKQRRIKLGFTQGDVGLAMGKLYGNDFSQTTISRFEALNLSFKNMCKLKPLLEKWLNDAESSPSDPSVSTPSSYPSLSEVFGRKRKKRTSIETNIRLTLEKRFQDNPKPSSEEISMIAEQLSMEKEVVRVWFCNRRQKEKRINCPVATPIKPPVYNSRLVSPSGSLGPLSVPPVHSTMPGTVTSSCSPGNNSRPSSPGSGLHASSPTASQNNSKAAVNSASSFNSSGSWYRWNHSTYLH

SEQ ID NO: 58839 - protein, 451 aa, Homo sapiens
MATTAQYLPRGPGGGAGGTGPLMHPDAAAAAAAAAAAERLHAGAAYREVQKLMHHEWLGAGAGHPVGLAHPQWLPTGGGGGGDWAGGPHLEHGKAGGGGTGRADDGGGGGGFHARLVHQGAAHAGAAWAQGSTAHHLGPAMSPSPGASGGHQPQPLGLYAQAAYPGGGGGGLAGMLAAGGGGAGPGLHHALHEDGHEAQLEPSPPPHLGAHGHAHGHAHAGGLHAAAAHLHPGAGGGGSSVGEHSDEDAPSSDDLEQFAKQFKQRRIKLGFTQADVGLALGTLYGNVFSQTTICRFEALQLSFKNMCKLKPLLNKWLEETDSSSGSPTNLDKIAAQGRKRKKRTSIEVGVKGALESHFLKCPKPSAHEITGLADSLQLEKEVVRVWFCNRRQKEKRMTPAAGAGHPPMDDVYAPGELGPGGGGASPPSAPPPPPPAALHHHHHHTLPGSVQ

SEQ ID NO: 58840 - protein, 443 aa, Homo sapiens
MATAASNHYSLLTSSASIVHAEPPGGMQQGAGGYREAQSLVQGDYGALQSNGHPLSHAHQWITALSHGGGGGGGGGGGGGGGGGGGGGDGSPWSTSPLGQPDIKPSVVVQQGGRGDELHGPGALQQQHQQQQQQQQQQQQQQQQQQQQQRPPHLVHHAANHHPGPGAWRSAAAAAHLPPSMGASNGGLLYSQPSFTVNGMLGAGGQPAGLHHHGLRDAHDEPHHADHHPHPHSHPHQQPPPPPPPQGPPGHPGAHHDPHSDEDTPTSDDLEQFAKQFKQRRIKLGFTQADVGLALGTLYGNVFSQTTICRFEALQLSFKNMCKLKPLLNKWLEEADSSSGSPTSIDKIAAQGRKRKKRTSIEVSVKGALESHFLKCPKPSAQEITSLADSLQLEKEVVRVWFCNRRQKEKRMTPPGGTLPGAEDVYGGSRDTPPHHGVQTPVQ

SEQ ID NO: 58841 - protein, 376 aa, Homo sapiens
MATAASNHYSLLTSSASIVHAEPPGGMQQGAGGYREAQSLVQGDYGALQSNGHPLSHAHQWITALSHGGDGSPWSTSPLGQPDIKPSVVVQQGGRGDELHGPGALQQQHQQQQQQQQQQQQQQQQQQQQQRPPHLVHHAANHHPGPGAWRSAAAAAHLPPSMGASNGGLLYSQPPPPPQGPPGHPGAHHDPHSDEDTPTSDDLEQFAKQFKQRRIKLGFTQADVGLALGTLYGNVFSQTTICRFEALQLSFKNMCKLKPLLNKWLEEADSSSGSPTSIDKIAAQGRKRKKRTSIEVSVKGALESHFLKCPKPSAQEITSLADSLQLEKEVVRVWFCNRRQKEKRMTPPGGTLPGAEDVYGGSRDTPPHHGVQTPVQ

SEQ ID NO: 58842 - protein, 500 aa, Homo sapiens
MATAASNPYLPGNSLLAAGSIVHSDAAGAGGGGGGGGGGGGGGAGGGGGGMQPGSAAVTSGAYRGDPSSVKMVQSDFMQGAMAASNGGHMLSHAHQWVTALPHAAAAAAAAAAAAVEASSPWSGSAVGMAGSPQQPPQPPPPPPQGPDVKGGAGRDDLHAGTALHHRGPPHLGPPPPPPHQGHPGGWGAAAAAAAAAAAAAAAAHLPSMAGGQQPPPQSLLYSQPGGFTVNGMLSAPPGPGGGGGGAGGGAQSLVHPGLVRGDTPELAEHHHHHHHHAHPHPPHPHHAQGPPHHGGGGGGAGPGLNSHDPHSDEDTPTSDDLEQFAKQFKQRRIKLGFTQADVGLALGTLYGNVFSQTTICRFEALQLSFKNMCKLKPLLNKWLEEADSSTGSPTSIDKIAAQGRKRKKRTSIEVSVKGALESHFLKCPKPSAQEITNLADSLQLEKEVVRVWFCNRRQKEKRMTPPGIQQQTPDDVYSQVGTVSADTPPPHHGLQTSVQ

SEQ ID NO: 58843 - protein, 361 aa, Homo sapiens
MATAASNPYSILSSTSLVHADSAGMQQGSPFRNPQKLLQSDYLQGVPSNGHPLGHHWVTSLSDGGPWSSTLATSPLDQQDVKPGREDLQLGAIIHHRSPHVAHHSPHTNHPNAWGASPAPNPSITSSGQPLNVYSQPGFTVSGMLEHGGLTPPPAAASAQSLHPVLREPPDHGELGSHHCQDHSDEETPTSDELEQFAKQFKQRRIKLGFTQADVGLALGTLYGNVFSQTTICRFEGLQLSFKNMCKLKPLLNKWLEEADSSTGSPTSIDKIAAQGRKRKKRTSIEVSVKGVLETHFLKCPKPAAQEISSLADSLQLEKEVVRVWFCNRRQKEKRMTPPGDQQPHEVYSHTVKTDTSCHDL

SEQ ID NO: 58844 - protein, 419 aa, Homo sapiens
MMSMNSKQPHFAMHPTLPEHKYPSLHSSSEAIRRACLPTPPLQSNLFASLDETLLARAEALAAVDIAVSQGKSHPFKPDATYHTMNSVPCTSTSTVPLAHHHHHHHHHQALEPGDLLDHISSPSLALMAGAGGAGAAAGGGGAHDGPGGGGGPGGGGGPGGGPGGGGGGGPGGGGGGPGGGLLGGSAHPHPHMHSLGHLSHPAAAAAMNMPSGLPHPGLVAAAAHHGAAAAAAAAAAGQVAAASAAAAVVGAAGLASICDSDTDPRELEAFAERFKQRRIKLGVTQADVGSALANLKIPGVGSLSQSTICRFESLTLSHNNMIALKPILQAWLEEAEGAQREKMNKPELFNGGEKKRKRTSIAAPEKRSLEAYFAVQPRPSSEKIAAIAEKLDLKKNVVRVWFCNQRQKQKRMKFSATY

SEQ ID NO: 58845 - protein, 338 aa, Homo sapiens
MMAMNSKQPFGMHPVLQEPKFSSLHSGSEAMRRVCLPAPQLQGNIFGSFDESLLARAEALAAVDIVSHGKNHPFKPDATYHTMSSVPCTSTSSTVPISHPAALTSHPHHAVHQGLEGDLLEHISPTLSVSGLGAPEHSVMPAQIHPHHLGAMGHLHQAMGMSHPHTVAPHSAMPACLSDVESDPRELEAFAERFKQRRIKLGVTQADVGAALANLKIPGVGSLSQSTICRFESLTLSHNNMIALKPVLQAWLEEAEAAYREKNSKPELFNGSERKRKRTSIAAPEKRSLEAYFAIQPRPSSEKIAAIAEKLDLKKNVVRVWFCNQRQKQKRMKYSAVH

SEQ ID NO: 58846 - protein, 265 aa, Homo sapiens
MHFYRLFLGATRRFLNPEWKGEIDNWCVYVLTSLLPFKIQSQDIKALQKELEQFAKLLKQKRITLGYTQADVGLTLGVLFGKVFSQTTICRFEALQLSFKNMCKLRPLLQKWVEEADNNENLQEICKAETLVQARKRKRTSIENRVRGNLENLFLQCPKPTLQQISHIAQQLGLEKDVVRVWFCNRRQKGKRSSSDYAQREDFEAAGSPFSGGPVSFPLAPGPHFGTPGYGSPHFTALYSSVPFPEGEAFPPVSVTTLGSPMHSN

SEQ ID NO: 58847 - protein, 360 aa, Homo sapiens
MAGHLASDFAFSPPPGGGGDGPGGPEPGWVDPRTWLSFQGPPGGPGIGPGVGPGSEVWGIPPCPPPYEFCGGMAYCGPQVGVGLVPQGGLETSQPEGEAGVGVESNSDGASPEPCTVTPGAVKLEKEKLEQNPEESQDIKALQKELEQFAKLLKQKRITLGYTQADVGLTLGVLFGKVFSQTTICRFEALQLSFKNMCKLRPLLQKWVEEADNNENLQEICKAETLVQARKRKRTSIENRVRGNLENLFLQCPKPTLQQISHIAQQLGLEKDVVRVWFCNRRQKGKRSSSDYAQREDFEAAGSPFSGGPVSFPLAPGPHFGTPGYGSPHFTALYSSVPFPEGEAFPPVSVTTLGSPMHSN

SEQ ID NO: 58848 - protein, 123 aa, Homo sapiens
MAGHLASDFAFSPPPGGGGDGPGGPEPGWVDPRTWLSFQGPPGGPGIGPGVGPGSEVWGIPPCPPPYEFCGGMAYCGPQVGVGLVPQGGLETSQPEGEAGVGVETPMGPPRSPAPHPFPFPLL

SEQ ID NO: 58849 - protein, 185 aa, Homo sapiens
MAGHLASDFAFSPPPGGGGDGPGGPEPGWVDPRTWLSFQGPPGGPGIGPGVGPGSEVWGIPPCPPPYEFCGGMAYCGPQVGVGLVPQGGLETSQPEGEAGVGVESNSDGASPEPCTVTPGAVKLEKEKLEQNPEESQDIKALQKELEQFAKLLKQKRITLGYTQADVHPGGSIWEGIQPNDHLPL

SEQ ID NO: 58850 - protein, 185 aa, Homo sapiens; identical to SEQ ID NO: 58849

SEQ ID NO: 58851 - protein, 164 aa, Homo sapiens
MCKLRPLLQKWVEEADNNENLQEICKAETLVQARKRKRTSIENRVRGNLENLFLQCPKPTLQQISHIAQQLGLEKDVVRVWFCNRRQKGKRSSSDYAQREDFEAAGSPFSGGPVSFPLAPGPHFGTPGYGSPHFTALYSSVPFPEGEAFPPVSVTTLGSPMHSN

SEQ ID NO: 58852 - protein, 164 aa, Homo sapiens; identical to SEQ ID NO: 58851

SEQ ID NO: 58853 - protein, 691 aa, Homo sapiens
MSALLQDPMIAGQVSKPLLSVRSEMNAELRGEDKAATSDSELNEPLLAPVESNDSEDTPSKLFGARGNPALSDPGTPDQHQASQTHPPFPVGPQPLLTAQQLASAVAGVMPGGPPALNQPILIPFNMAGQLGGQQGLVLTLPTANLTNIQGLVAAAAAGGIMTLPLQNLQATSSLNSQLQQLQLQLQQQQQQQQQQPPPSTNQHPQPAPQAPSQSQQQPLQPTPPQQPPPASQQPPAPTSQLQQAPQPQQHQPHSHSQNQNQPSPTQQSSSPPQKPSQSPGHGLPSPLTPPNPLQLVNNPLASQAAAAAAAMSSIASSQAFGNALSSLQGVTGQLVTNAQGQIIGTIPLMPNPGPSSQAASGTQGLQVQPITPQLLTNAQGQIIATVIGNQILPVINTQGITLSPIKPGQQLHQPSQTSVGQAASQGNLLHLAHSQASMSQSPVRQASSSSSSSSSSSALSVGQLVSNPQTAAGEVDGVNLEEIREFAKAFKIRRLSLGLTQTQVGQALSATEGPAYSQSAICRHTILRSHFFLPQEAQENTIASSLTAKLNPGLLYPARFEKLDITPKSAQKIKPVLERWMAEAEARHRAGMQNLTEFIGSEPSKKRKRRTSFTPQALEILNAHFEKNTHPSGQEMTEIAEKLNYDREVVRVWFCNKRQALKNTIKRLKQHEPATAVPLEPLTDSLEENS

SEQ ID NO: 58854 - protein, 655 aa, Homo sapiens
MSALLQDPMIAGQVSKPLLSVRSEMNAELRGEDKAATSDSELNEPLLAPVESNDSEDTPSKLFGARGNPALSDPGTPDQHQASQTHPPFPVGPQPLLTAQQLASAVAGVMPGGPPALNQPILIPFNMAGQLGGQQGLVLTLPTANLTNIQGLVAAAAAGGIMTLPLQNLQATSSLNSQLQQLQLQLQQQQQQQQQQPPPSTNQHPQPAPQAPSQSQQQPLQPTPPQQPPPASQQPPAPTSQLQQAPQPQQHQPHSHSQNQNQPSPTQQSSSPPQKPSQSPGHGLPSPLTPPNPLQLVNNPLASQAAAAAAAMSSIASSQAFGNALSSLQGVTGQLVTNAQGQIIGTIPLMPNPGPSSQAASGTQGLQVQPITPQLLTNAQGQIIATVIGNQILPVINTQGITLSPIKPGQQLHQPSQTSVGQAASQGNLLHLAHSQASMSQSPVRQASSSSSSSSSSSALSVGQLVSNPQTAAGEVDGVNLEEIREFAKAFKIRRLSLGLTQTQVGQALSATEGPAYSQSAICRFEKLDITPKSAQKIKPVLERWMAEAEARHRAGMQNLTEFIGSEPSKKRKRRTSFTPQALEILNAHFEKNTHPSGQEMTEIAEKLNYDREVVRVWFCNKRQALKNTIKRLKQHEPATAVPLEPLTDSLEENS

SEQ ID NO: 58855 - protein, 691 aa, Homo sapiens
MEKIYSRGELHHFIDGFNEEKSNWMRYVNPAHSPREQNLAACQNGMNIYFYTIKPIPANQELLVWYCRDFAERLHYPYPGELTMMNLTQTQSSLKQPSTEKNELCPKNVPKREYSVKEILKLDSNPSKGKDLYRSNISPLTSEKDLDDFRRRGSPEMPFYPRVVYPIRAPLPEDFLKASLAYGIERPTYITRSPIPSSTTPSPSARSSPDQSLKSSSPHSSPGNTVSPVGPGSQEHRDSYAYLNASYGTEGLGSYPGYAPLPHLPPAFIPSYNAHYPKFLLPPYGMNCNGLSAVSSMNGINNFGLFPRLCPVYSNLLGGGSLPHPMLNPTSLPSSLPSDGARRLLQPEHPREVLVPAPHSAFSFTGAAASMKDKACSPTSGSPTAGTAATAEHVVQPKATSAAMAAPSSDEAMNLIKNKRNMTGYKTLPYPLKKQNGKIKYECNVCAKTFGQLSNLKVHLRVHSGERPFKCQTCNKGFTQLAHLQKHYLVHTGEKPHECQVCHKRFSSTSNLKTHLRLHSGEKPYQCKVCPAKFTQFVHLKLHKRLHTRERPHKCSQCHKNYIHLCSLKVHLKGNCAAAPAPGLPLEDLTRINEEIEKFDISDNADRLEDVEDDISVISVVEKEILAVVRKEKEETGLKVSLQRNMGNGLLSSGCSLYESSDLPLMKLPPSNPLPLVPVKVKQETVEPMDP

SEQ ID NO: 58856 - protein, 789 aa, Homo sapiens
MKMDMEDADMTLWTEAEFEEKCTYIVNDHPWDSGADGGTSVQAEASLPRNLLFKYATNSEEVIGVMSKEYIPKGTRFGPLIGEIYTNDTVPKNANRKYFWRIYSRGELHHFIDGFNEEKSNWMRYVNPAHSPREQNLAACQNGMNIYFYTIKPIPANQELLVWYCRDFAERLHYPYPGELTMMNLTQTQSSLKQPSTEKNELCPKNVPKREYSVKEILKLDSNPSKGKDLYRSNISPLTSEKDLDDFRRRGSPEMPFYPRVVYPIRAPLPEDFLKASLAYGIERPTYITRSPIPSSTTPSPSARSSPDQSLKSSSPHSSPGNTVSPVGPGSQEHRDSYAYLNASYGTEGLGSYPGYAPLPHLPPAFIPSYNAHYPKFLLPPYGMNCNGLSAVSSMNGINNFGLFPRLCPVYSNLLGGGSLPHPMLNPTSLPSSLPSDGARRLLQPEHPREVLVPAPHSAFSFTGAAASMKDKACSPTSGSPTAGTAATAEHVVQPKATSAAMAAPSSDEAMNLIKNKRNMTGYKTLPYPLKKQNGKIKYECNVCAKTFGQLSNLKVHLRVHSGERPFKCQTCNKGFTQLAHLQKHYLVHTGEKPHECQVCHKRFSSTSNLKTHLRLHSGEKPYQCKVCPAKFTQFVHLKLHKRLHTRERPHKCSQCHKNYIHLCSLKVHLKGNCAAAPAPGLPLEDLTRINEEIEKFDISDNADRLEDVEDDISVISVVEKEILAVVRKEKEETGLKVSLQRNMGNGLLSSGCSLYESSDLPLMKLPPSNPLPLVPVKVKQETVEPMDP

SEQ ID NO: 58857 - protein, 825 aa, Homo sapiens
MLDICLEKRVGTTLAAPKCNSSTVRFQGLAEGTKGTMKMDMEDADMTLWTEAEFEEKCTYIVNDHPWDSGADGGTSVQAEASLPRNLLFKYATNSEEVIGVMSKEYIPKGTRFGPLIGEIYTNDTVPKNANRKYFWRIYSRGELHHFIDGFNEEKSNWMRYVNPAHSPREQNLAACQNGMNIYFYTIKPIPANQELLVWYCRDFAERLHYPYPGELTMMNLTQTQSSLKQPSTEKNELCPKNVPKREYSVKEILKLDSNPSKGKDLYRSNISPLTSEKDLDDFRRRGSPEMPFYPRVVYPIRAPLPEDFLKASLAYGIERPTYITRSPIPSSTTPSPSARSSPDQSLKSSSPHSSPGNTVSPVGPGSQEHRDSYAYLNASYGTEGLGSYPGYAPLPHLPPAFIPSYNAHYPKFLLPPYGMNCNGLSAVSSMNGINNFGLFPRLCPVYSNLLGGGSLPHPMLNPTSLPSSLPSDGARRLLQPEHPREVLVPAPHSAFSFTGAAASMKDKACSPTSGSPTAGTAATAEHVVQPKATSAAMAAPSSDEAMNLIKNKRNMTGYKTLPYPLKKQNGKIKYECNVCAKTFGQLSNLKVHLRVHSGERPFKCQTCNKGFTQLAHLQKHYLVHTGEKPHECQVCHKRFSSTSNLKTHLRLHSGEKPYQCKVCPAKFTQFVHLKLHKRLHTRERPHKCSQCHKNYIHLCSLKVHLKGNCAAAPAPGLPLEDLTRINEEIEKFDISDNADRLEDVEDDISVISVVEKEILAVVRKEKEETGLKVSLQRNMGNGLLSSGCSLYESSDLPLMKLPPSNPLPLVPVKVKQETVEPMDP

SEQ ID NO: 58858 - protein, 63 aa, Homo sapiens
MKMDMEDADMTLWTEAEFEEKCTYIVNDHPWDSGADGGTSVQAEASLPRNLLFKYATNSEEVI

SEQ ID NO: 58859 - protein, 788 aa, Homo sapiens
MKMDMEDADMTLWTEAEFEEKCTYIVNDHPWDSGADGGTSVQAEASLPRNLLFKYATNSEEVIGVMSKEYIPKGTRFGPLIGEIYTNDTVPKNANRKYFWRIYSRGELHHFIDGFNEEKSNWMRYVNPAHSPREQNLAACQNGMNIYFYTIKPIPANQELLVWYCRDFAERLHYPYPGELTMMNLTQTQSSLKQPSTEKNELCPKNVPKREYSVKEILKLDSNPSKGKDLYRSNISPLTSEKDLDDFRRRGSPEMPFYPRVVYPIRAPLPEDFLKASLAYGIERPTYITRSPIPSSTTPSPSARSSPDQSLKSSSPHSSPGNTVSPVGPGSQEHRDSYAYLNASYGTEGLGSYPGYAPLPHLPPAFIPSYNAHYPKFLLPPYGMNCNGLSAVSSMNGINNFGLFPRLCPVYSNLLGGGSLPTPCSTPLLPSSLPSDGARRLLQPEHPREVLVPAPHSAFSFTGAAASMKDKACSPTSGSPTAGTAATAEHVVQPKATSAAMAAPSSDEAMNLIKNKRNMTGYKTLPYPLKKQNGKIKYECNVCAKTFGQLSNLKVHLRVHSGERPFKCQTCNKGFTQLAHLQKHYLVHTGEKPHECQVCHKRFSSTSNLKTHLRLHSGEKPYQCKVCPAKFTQFVHLKLHKRLHTRERPHKCSQCHKNYIHLCSLKVHLKGNCAAAPAPGLPLEDLTRINEEIEKFDISDNADRLEDVEDDISVISVVEKEILAVVRKEKEETGLKVSLQRNMGNGLLSSGCSLYESSDLPLMKLPPSNPLPLVPVKVKQETVEPMDP

SEQ ID NO: 58860 - protein, 571 aa, Homo sapiens
MALPRPSEAVPQDKVCYPPESSPQNLAAYYTPFPSYGHYRNSLATVEEDFQPFRQLEAAASAAPAMPPFPFRMAPPLLSPGLGLQREPLYDLPWYSKLPPWYPIPHVPREVPPFLSSSHEYAGASSEDLGHQIIGGDNESGPCCGPDTLIPPPPADASLLPEGLRTSQLLPCSPSKQSEDGPKPSNQEGKSPARFQFTEEDLHFVLYGVTPSLEHPASLHHAISGLLVPPDSSGSDSLPQTLDKDSLQLPEGLCLMQTVFGEVPHFGVFCSSFIAKGVRFGPFQGKVVNASEVKTYGDNSVMWEIFEDGHLSHFIDGKGGTGNWMSYVNCARFPKEQNLVAVQCQGHIFYESCKEIHQNQELLVWYGDCYEKFLDIPVSLQVTEPGKQPSGPSEESAEGYRCERCGKVFTYKYYRDKHLKYTPCVDKGDRKFPCSLCKRSFEKRDRLRIHILHVHEKHRPHKCSTCGKCFSQSSSLNKHMRVHSGDRPYQCVYCTKRFTASSILRTHIRQHSGEKPFKCKYCGKSFASHAAHDSHVRRSHKEDDGCSCSICGKIFSDQETFYSHMKFHEDY

SEQ ID NO: 58861 - protein, 100 aa, Homo sapiens
MALPRPSEAVPQDKVCYPPESSPQNLAAYYTPFPSYGHYRNSLATVEEDFQPFRQLEAAASAAPAMPPFPFRMAPPLLSPGLGLQREPLYDLPWYSKLPP

SEQ ID NO: 58862 - protein, 1276 aa, Homo sapiens
MRSKARARKLAKSDGDVVNNMYEPNRDLLASHSAEDEAEDSAMSPIPVGPPSPFPTSEDFTPKEGSPYEAPVYIPEDIPIPADFELRESSIPGAGLGVWAKRKMEAGERLGPCVVVPRAAAKETDFGWEQILTDVEVSPQEGCITKISEDLGSEKFCVDANQAGAGSWLKYIRVACSCDDQNLTMCQISEQIYYKVIKDIEPGEELLVHVKEGVYPLGTVPPGLDEEPTFRCDECDELFQSKLDLRRHKKYTCGSVGAALYEGLAEELKPEGLGGGSGQAHECKDCERMFPNKYSLEQHMVIHTEEREYKCDQCPKAFNWKSNLIRHQMSHDSGKRFECENCVKVFTDPSNLQRHIRSQHVGARAHACPDCGKTFATSSGLKQHKHIHSTVKPFICEVCHKSYTQFSNLCRHKRMHADCRTQIKCKDCGQMFSTTSSLNKHRRFCEGKNHYTPGGIFAPGLPLTPSPMMDKAKPSPSLNHASLGFNEYFPSRPHPGSLPFSTAPPTFPALTPGFPGIFPPSLYPRPPLLPPTSLLKSPLNHTQDAKLPSPLGNPALPLVSAVSNSSQGTTAAAGPEEKFESRLEDSCVEKLKTRSSDMSDGSDFEDVNTTTGTDLDTTTGTGSDLDSDVDSDPDKDKGKGKSAEGQPKFGGGLAPPGAPNSVAEVPVFYSQHSFFPPPDEQLLTATGAAGDSIKAIASIAEKYFGPGFMGMQEKKLGSLPYHSAFPFQFLPNFPHSLYPFTDRALAHNLLVKAEPKSPRDALKVGGPSAECPFDLTTKPKDVKPILPMPKGPSAPASGEEQPLDLSIGSRARASQNGGGREPRKNHVYGERKLGAGEGLPQVCPARMPQQPPLHYAKPSPFFMDPIYSRVEKRKVTDPVGALKEKYLRPSPLLFHPQMSAIETMTEKLESFAAMKADSGSSLQPLPHHPFNFRSPPPTLSDPILRKGKERYTCRYCGKIFPRSANLTRHLRTHTGEQPYRCKYCDRSFSISSNLQRHVRNIHNKEKPFKCHLCNRCFGQQTNLDRHLKKHEHENAPVSQHPGVLTNHLGTSASSPTSESDNHALLDEKEDSYFSEIRNFIANSEMNQASTRTEKRADMQIVDGSAQCPGLASEKQEDVEEEDDDDLEEDDEDSLAGKSQDDTVSPAPEPQAAYEDEEDEEPAASLAVGFDHTRRCAEDHEGGLLALEPMPTFGKGLDLRRAAEEAFEVKDVLNSTLDSEALKHTLCRQAKNQAYAMMLSLSEDTPLHTPSQGSLDAWLKVTGATSESGAFHPINHL

SEQ ID NO: 58863 - protein, 1276 aa, Homo sapiens
MRSKARARKLAKSDGDVVNNMYEPNRDLLASHSAEDEAEDSAMSPIPVGPPSPFPTSEDFTPKEGSPYEAPVYIPEDIPIPADFELRESSIPGAGLGVWAKRKMEAGERLGPCVVVPRAAAKETDFGWEQILTDVEVSPQEGCITKISEDLGSEKFCVDANQAGAGSWLKYIRVACSCDDQNLTMCQISEQVIYYKVIKDIEPGEELLVHVKEGVYPLGTVPPGLDEEPTFRCDECDELFQSKLDLRRHKKYTCGSVGAALYEGLAEELKPEGLGGGSGQAHECKDCERMFPNKYSLEQHMVIHTEEREYKCDQCPKAFNWKSNLIRHQMSHDSGKRFECENCVKVFTDPSNLQRHIRSQHVGARAHACPDCGKTFATSSGLKQHKHIHSTVKPFICEVCHKSYTQFSNLCRHKRMHADCRTQIKCKDCGQMFSTTSSLNKHRRFCEGKNHYTPGGIFAPGLPLTPSPMMDKAKPSPSLNHASLGFNEYFPSRPHPGSLPFSTAPPTFPALTPGFPGIFPPSLYPRPPLLPPTSLLKSPLNHTQDAKLPSPLGNPALPLVSAVSNSSQGTTAAAGPEEKFESRLEDSCVEKLKTRSSDMSDGSDFEDVNTTTGTDLDTTTGTGSDLDSDVDSDPDKDKGKGKSAEGQPKFGGGLAPPGAPNSVAEVPVFYSQHSFFPPPDEQLLTATGAAGDSIKAIASIAEKYFGPGFMGMQEKKLGSLPYHSAFPFQFLPNFPHSLYPFTDRALAHNLLVKAEPKSPRDALKVGGPSAECPFDLTTKPKDVKPILPMPKGPSAPASGEEQPLDLSIGSRARASQNGGGREPRKNHVYGERKLGAGEGLPQVCPARMPQQPPLHYAKPSPFFMDPIYRVEKRKVTDPVGALKEKYLRPSPLLFHPQMSAIETMTEKLESFAAMKADSGSSLQPLPHHPFNFRSPPPTLSDPILRKGKERYTCRYCGKIFPRSANLTRHLRTHTGEQPYRCKYCDRSFSISSNLQRHVRNIHNKEKPFKCHLCNRCFGQQTNLDRHLKKHEHENAPVSQHPGVLTNHLGTSASSPTSESDNHALLDEKEDSYFSEIRNFIANSEMNQASTRTEKRADMQIVDGSAQCPGLASEKQEDVEEEDDDDLEEDDEDSLAGKSQDDTVSPAPEPQAAYEDEEDEEPAASLAVGFDHTRRCAEDHEGGLLALEPMPTFGKGLDLRRAAEEAFEVKDVLNSTLDSEALKHTLCRQAKNQAYAMMLSLSEDTPLHTPSQGSLDAWLKVTGATSESGAFHPINHL

SEQ ID NO: 58864 - protein, 1092 aa, Homo sapiens
FCAYSAKIYYKVIKDIEPGEELLVHVKEGVYPLGTVPPGLDEEPTFRCDECDELFQSKLDLRRHKKYTCGSVGAALYEGLAEELKPEGLGGGSGQAHECKDCERMFPNKYSLEQHMVIHTEEREYKCDQCPKAFNWKSNLIRHQMSHDSGKRFECENCVKVFTDPSNLQRHIRSQHVGARAHACPDCGKTFATSSGLKQHKHIHSTVKPFICEVCHKSYTQFSNLCRHKRMHADCRTQIKCKDCGQMFSTTSSLNKHRRFCEGKNHYTPGGIFAPGLPLTPSPMMDKAKPSPSLNHASLGFNEYFPSRPHPGSLPFSTAPPTFPALTPGFPGIFPPSLYPRPPLLPPTSLLKSPLNHTQDAKLPSPLGNPALPLVSAVSNSSQGTTAAAGPEEKFESRLEDSCVEKLKTRSSDMSDGSDFEDVNTTTGTDLDTTTGTGSDLDSDVDSDPDKDKGKGKSAEGQPKFGGGLAPPGAPNSVAEVPVFYSQHSFFPPPDEQLLTATGAAGDSIKAIASIAEKYFGPGFMGMQEKKLGSLPYHSAFPFQFLPNFPHSLYPFTDRALAHNLLVKAEPKSPRDALKVGGPSAECPFDLTTKPKDVKPILPMPKGPSAPASGEEQPLDLSIGSRARASQNGGGREPRKNHVYGERKLGAGEGLPQVCPARMPQQPPLHYAKPSPFFMDPIYSRVEKRKVTDPVGALKEKYLRPSPLLFHPQMSAIETMTEKLESFAAMKADSGSSLQPLPHHPFNFRSPPPTLSDPILRKGKERYTCRYCGKIFPRSANLTRHLRTHTGEQPYRCKYCDRSFSISSNLQRHVRNIHNKEKPFKCHLCNRCFGQQTNLDRHLKKHEHENAPVSQHPGVLTNHLGTSASSPTSESDNHALLDEKEDSYFSEIRNFIANSEMNQASTRTEKRADMQIVDGSAQCPGLASEKQEDVEEEDDDDLEEDDEDSLAGKSQDDTVSPAPEPQAAYEDEEDEEPAASLAVGFDHTRRCAEDHEGGLLALEPMPTFGKGLDLRRAAEEAFEVKDVLNSTLDSEALKHTLCRQAKNQAYAMMLSLSEDTPLHTPSQGSLDAWLKVTGATSESGAFHPINHL

SEQ ID NO: 58865 - protein, 1275 aa, Homo sapiens
MRSKARARKLAKSDGDVVNNMYEPNRDLLASHSAEDEAEDSAMSPIPVGPPSPFPTSEDFTPKEGSPYEAPVYIPEDIPIPADFELRESSIPGAGLGVWAKRKMEAGERLGPCVVVPRAAAKETDFGWEQILTDVEVSPQEGCITKISEDLGSEKFCVDANQAGAGSWLKYIRVACSCDDQNLTMCQISEQIYYKVIKDIEPGEELLVHVKEGVYPLGTVPPGLDEEPTFRCDECDELFQSKLDLRRHKKYTCGSVGAALYEGLAEELKPEGLGGGSGQAHECKDCERMFPNKYSLEQHMVIHTEEREYKCDQCPKAFNWKSNLIRHQMSHDSGKRFECENCVKVFTDPSNLQRHIRSQHVGARAHACPDCGKTFATSSGLKQHKHIHSTVKPFICEVCHKSYTQFSNLCRHKRMHADCRTQIKCKDCGQMFSTTSSLNKHRRFCEGKNHYTPGGIFAPGLPLTPSPMMDKAKPSPSLNHASLGFNEYFPSRPHPGSLPFSTAPPTFPALTPGFPGIFPPSLYPRPPLLPPTSLLKSPLNHTQDAKLPSPLGNPALPLVSAVSNSSQGTTAAAGPEEKFESRLEDSCVEKLKTRSSDMSDGSDFEDVNTTTGTDLDTTTGTGSDLDSDVDSDPDKDKGKGKSAEGQPKFGGGLAPPGAPNSVAEVPVFYSQHSFFPPPDEQLLTATGAAGDSIKAIASIAEKYFGPGFMGMQEKKLGSLPYHSAFPFQFLPNFPHSLYPFTDRALAHNLLVKAEPKSPRDALKVGGPSAECPFDLTTKPKDVKPILPMPKGPSAPASGEEQPLDLSIGSRARASQNGGGREPRKNHVYGERKLGAGEGLPQVCPARMPQQPPLHYAKPSPFFMDPIYRVEKRKVTDPVGALKEKYLRPSPLLFHPQMSAIETMTEKLESFAAMKADSGSSLQPLPHHPFNFRSPPPTLSDPILRKGKERYTCRYCGKIFPRSANLTRHLRTHTGEQPYRCKYCDRSFSISSNLQRHVRNIHNKEKPFKCHLCNRCFGQQTNLDRHLKKHEHENAPVSQHPGVLTNHLGTSASSPTSESDNHALLDEKEDSYFSEIRNFIANSEMNQASTRTEKRADMQIVDGSAQCPGLASEKQEDVEEEDDDDLEEDDEDSLAGKSQDDTVSPAPEPQAAYEDEEDEEPAASLAVGFDHTRRCAEDHEGGLLALEPMPTFGKGLDLRRAAEEAFEVKDVLNSTLDSEALKHTLCRQAKNQAYAMMLSLSEDTPLHTPSQGSLDAWLKVTGATSESGAFHPINHL

SEQ ID NO: 58866 - protein, 1256 aa, Homo sapiens
MRSKARARKLAKSDGDVVNNMYEPNRDLLASHSAEDEAEDSAMSPIPVGPPSPFPTSEDFTPKEGSPYEAPVYIPEDIPIPADFELRESSIPGAGLGVWAKRKMEAGERLGPCVVVPRAAAKETDFGWEQILTDVEVSPQEGCITKISEDLGSEKFCVDANQAGAGSWLKYIRVACSCDDQNLTMCQISEQIYYKVIKDIEPGEELLVHVKEGVYPLGTVPPGLDEEPTFRCDECDELFQSKLDLRRHKKYTCGSVGAALYEGLAEELKPEGLGGGSGQAHECKDCERMFPNKYSLEQHMVIHTEEREYKCDQCPKAFNWKSNLIRHQMSHDSGKRFECENCVKVFTDPSNLQRHIRSQHVGARAHACPDCGKTFATSSGLKQHKHIHSTVKPFICEVCHKSYTQFSNLCRHKRMHADCRTQIKCKDCGQMFSTTSSLNKHRRFCEGKNHYTPGGIFAPGLPLTPSPMMDKAKPSPSLNHASLGFNEYFPSRPHPGSLPFSTAPPTFPALTPGFPGIFPPSLYPRPPLLPPTSLLKSPLNHTQDAKLPSPLGNPALPLVSAVSNSSQGTTAAAGPEEKFESRLEDSCVEKLKTRSSDMSDGSDFEDVNTTTGTDLDTTTGTGSDLDSDVDSDPDKDKGKGKSAEGQPKFGGGLAPPGAPNSVAEVPVFYSQHSFFPPPDEQLLTATGAAGDSIKAIASIAEKYFGPGFMGMQEKKLGSLPYHSAFPFQFLPNFPHSLYPFTDRALAHNLLVKAEPKSPRDALKVGGPSAECPFDLTTKPKDVKPILPMPKGPSAPASGEEQPLDLSIGSRARASQNGGGREPRKNHVYGERKLGAGEGLPQVCPARMPQQPPLHYAKPSPFFMDPIYRVEKRKVTDPVGALKEKYLRPSPLLFHPQMSAIETMTEKLESFAAMKADSGSSLQPLPHHPFNFRSPPPTLSDPILRKGKERYTCRYCGKIFPRSANLTRHLRTHTGEQPYRCKYCDRSFSISSNLQRHVRNIHNKEKPFKCHLCNRCFGQQTNLDRHLKKHEHENAPVSQHPGVLTNHLGTSASSPTSESDNHALLDEKEDSYFSEIRNFIANSEMNQASTRTEKRADMQIVDGSAQCPGLASEKQEDVEEEDDDDLEEDDEDSLAGKSQDDTVSPAPEPQAAYEDEEDEEPAASLAVGFDHTRRCAEDHEGGLLALEPMPTFGKGLDLRRAAEEAFEVKDVLNSTLDSEALKHTLCRQAKNQGSLDAWLKVTGATSESGAFHPINHL

SEQ ID NO: 58867 - protein, 1084 aa, Homo sapiens
IYYKVIKDIEPGEELLVHVKEGVYPLGTVPPGLDEEPTFRCDECDELFQSKLDLRRHKKYTCGSVGAALYEGLAEELKPEGLGGGSGQAHECKDCERMFPNKYSLEQHMVIHTEEREYKCDQCPKAFNWKSNLIRHQMSHDSGKRFECENCVKVFTDPSNLQRHIRSQHVGARAHACPDCGKTFATSSGLKQHKHIHSTVKPFICEVCHKSYTQFSNLCRHKRMHADCRTQIKCKDCGQMFSTTSSLNKHRRFCEGKNHYTPGGIFAPGLPLTPSPMMDKAKPSPSLNHASLGFNEYFPSRPHPGSLPFSTAPPTFPALTPGFPGIFPPSLYPRPPLLPPTSLLKSPLNHTQDAKLPSPLGNPALPLVSAVSNSSQGTTAAAGPEEKFESRLEDSCVEKLKTRSSDMSDGSDFEDVNTTTGTDLDTTTGTGSDLDSDVDSDPDKDKGKGKSAEGQPKFGGGLAPPGAPNSVAEVPVFYSQHSFFPPPDEQLLTATGAAGDSIKAIASIAEKYFGPGFMGMQEKKLGSLPYHSAFPFQFLPNFPHSLYPFTDRALAHNLLVKAEPKSPRDALKVGGPSAECPFDLTTKPKDVKPILPMPKGPSAPASGEEQPLDLSIGSRARASQNGGGREPRKNHVYGERKLGAGEGLPQVCPARMPQQPPLHYAKPSPFFMDPIYRVEKRKVTDPVGALKEKYLRPSPLLFHPQMSAIETMTEKLESFAAMKADSGSSLQPLPHHPFNFRSPPPTLSDPILRKGKERYTCRYCGKIFPRSANLTRHLRTHTGEQPYRCKYCDRSFSISSNLQRHVRNIHNKEKPFKCHLCNRCFGQQTNLDRHLKKHEHENAPVSQHPGVLTNHLGTSASSPTSESDNHALLDEKEDSYFSEIRNFIANSEMNQASTRTEKRADMQIVDGSAQCPGLASEKQEDVEEEDDDDLEEDDEDSLAGKSQDDTVSPAPEPQAAYEDEEDEEPAASLAVGFDHTRRCAEDHEGGLLALEPMPTFGKGLDLRRAAEEAFEVKDVLNSTLDSEALKHTLCRQAKNQAYAMMLSLSEDTPLHTPSQGSLDAWLKVTGATSESGAFHPINHL

SEQ ID NO: 58868 - protein, 1257 aa, Homo sapiens
MRSKARARKLAKSDGDVVNNMYEPNRDLLASHSAEDEAEDSAMSPIPVGPPSPFPTSEDFTPKEGSPYEAPVYIPEDIPIPADFELRESSIPGAGLGVWAKRKMEAGERLGPCVVVPRAAAKETDFGWEQILTDVEVSPQEGCITKISEDLGSEKFCVDANQAGAGSWLKYIRVACSCDDQNLTMCQISEQIYYKVIKDIEPGEELLVHVKEGVYPLGTVPPGLDEEPTFRCDECDELFQSKLDLRRHKKYTCGSVGAALYEGLAEELKPEGLGGGSGQAHECKDCERMFPNKYSLEQHMVIHTEEREYKCDQCPKAFNWKSNLIRHQMSHDSGKRFECENCVKVFTDPSNLQRHIRSQHVGARAHACPDCGKTFATSSGLKQHKHIHSTVKPFICEVCHKSYTQFSNLCRHKRMHADCRTQIKCKDCGQMFSTTSSLNKHRRFCEGKNHYTPGGIFAPGLPLTPSPMMDKAKPSPSLNHASLGFNEYFPSRPHPGSLPFSTAPPTFPALTPGFPGIFPPSLYPRPPLLPPTSLLKSPLNHTQDAKLPSPLGNPALPLVSAVSNSSQGTTAAAGPEEKFESRLEDSCVEKLKTRSSDMSDGSDFEDVNTTTGTDLDTTTGTGSDLDSDVDSDPDKDKGKGKSAEGQPKFGGGLAPPGAPNSVAEVPVFYSQHSFFPPPDEQLLTATGAAGDSIKAIASIAEKYFGPGFMGMQEKKLGSLPYHSAFPFQFLPNFPHSLYPFTDRALAHNLLVKAEPKSPRDALKVGGPSAECPFDLTTKPKDVKPILPMPKGPSAPASGEEQPLDLSIGSRARASQNGGGREPRKNHVYGERKLGAGEGLPQVCPARMPQQPPLHYAKPSPFFMDPIYSRVEKRKVTDPVGALKEKYLRPSPLLFHPQMSAIETMTEKLESFAAMKADSGSSLQPLPHHPFNFRSPPPTLSDPILRKGKERYTCRYCGKIFPRSANLTRHLRTHTGEQPYRCKYCDRSFSISSNLQRHVRNIHNKEKPFKCHLCNRCFGQQTNLDRHLKKHEHENAPVSQHPGVLTNHLGTSASSPTSESDNHALLDEKEDSYFSEIRNFIANSEMNQASTRTEKRADMQIVDGSAQCPGLASEKQEDVEEEDDDDLEEDDEDSLAGKSQDDTVSPAPEPQAAYEDEEDEEPAASLAVGFDHTRRCAEDHEGGLLALEPMPTFGKGLDLRRAAEEAFEVKDVLNSTLDSEALKHTLCRQAKNQGSLDAWLKVTGATSESGAFHPINHL

SEQ ID NO: 58869 - protein, 801 aa, Homo sapiens
MHHRMNEMNLSPVGMEQLTSSSVSNALPVSGSHLGLAASPTHSAIPAPGLPVAIPNLGPSLSSLPSALSLMLPMGIGDRGVMCGLPERNYTLPPPPYPHLESSYFRTILPGILSYLADRPPPQYIHPNSINVDGNTALSITNNPSALDPYQSNGNVGLEPGIVSIDSRSVNTHGAQSLHPSDGHEVALDTAITMENVSRVTSPISTDGMAEELTMDGVAGEHSQIPNGSRSHEPLSVDSVSNNLAADAVGHGGVIPMHGNGLELPVVMETDHIASRVNGMSDSALSDSIHTVAMSTNSVSVALSTSHNLASLESVSLHEVGLSLEPVAVSSITQEVAMGTGHVDVSSDSLSFVSPSLQMEDSNSNKENMATLFTIWCTLCDRAYPSDCPEHGPVTFVPDTPIESRARLSLPKQLVLRQSIVGAEVGVWTGETIPVRTCFGPLIGQQSHSMEVAEWTDKAVNHIWKIYHNGVLEFCIITTDENECNWMMFVRKARNREEQNLVAYPHDGKIFFCTSQDIPPENELLFYYSRDYAQQIGVPEHPDVHLCNCGKECNSYTEFKAHLTSHIHNHLPTQGHSGSHGPSHSKERKWKCSMCPQAFISPSKLHVHFMGHMGMKPHKCDFCSKAFSDPSNLRTHLKIHTGQKNYRCTLCDKSFTQKAHLESHMVIHTGEKNLKCDYCDKLFMRRQDLKQHVLIHTQERQIKCPKCDKLFLRTNHLKKHLNSHEGKRDYVCEKCTKAYLTKYHLTRHLKTCKGPTSSSSAPEEEEEDDSEEEDLADSVGTEDCRINSAVYSADESLSAHK

SEQ ID NO: 58870 - protein, 75 aa, Homo sapiens
MHHRMNEMNLSPVGMEQLTSSSVSNALPVSGSHLGLAASPTHSAIPAPGLPVAIPNLGPSLSSLPSALSLMLPMG

SEQ ID NO: 58871 - protein, 630 aa, Homo sapiens
MLGMYVPDRFSLKSSRVQDGMGLYTARRVRKGEKFGPFAGEKRMPEDLDENMDYRLMWEVRGSKGEVLYILDATNPRHSNWLRFVHEAPSQEQKNLAAIQEGENIFYLAVEDIETDTELLIGYLDSDMEAEEEEQQIMTVIKEGEVENSRRQSTAGRKDRLGCKEDYACPQCESSFTSEDILAEHLQTLHQKPTEEKEFKCKNCGKKFPVKQALQRHVLQCTAKSSLKESSRSFQCSVCNSSFSSASSFEQHQETCRGDARFVCKADSCGKRLKSKDALKRHQENVHTGDPKKKLICSVCNKKCSSASSLQEHRKIHEIFDCQECMKKFISANQLKRHMITHSEKRPYNCEICNKSFKRLDQVGAHKVIHSEDKPYKCKLCGKGFAHRNVYKNHKKTHSEERPFQCEECKALFRTPFSLQRHLLIHNSERTFKCHHCDATFKRKDTLNVHVQVVHERHKKYRCELCNKAFVTPSVLRSHKKTHTGEKEKICPYCGQKFASSGTLRVHIRSHTGERPYQCPYCEKGFSKNDGLKMHIRTHTREKPYKCSECSKAFSQKRGLDEHKRTHTGEKPFQCDVCDLAFSLKKMLIRHKMTHNPNRPLAECQFCHKKFTRNDYLKVHMDNIHGVADS

SEQ ID NO: 58872 - protein, 111 aa, Homo sapiens
MLGMYVPDRFSLKSSRVQDGMGLYTARRVRKGEKFGPFAGEKRMPEDLDENMDYRLMWEVRGSKGEVLYILDATNPRHSNWLRFVHEAPSQEQKNLAAIQDKNLGPAEWRG

SEQ ID NO: 58873 - protein, 599 aa, Homo sapiens
MLGMYVPDRFSLKSSRVQDGMGLYTARRVRKGEKFGPFAGEKRMPEDLDENMDYRLMWEVRGSKGEVLYILDATNPRHSNWLRFVHEAPSQEQKNLAAIQEGENIFYLAVEDIETDTELLIGYLDSDMEAEEEEQQIMTVIKEGEVENSRRQSTAGRKDRLGCKEDYACPQCESSFTSEDILAEHLQTLHQKPTEEKEFKCKNCGKKFPVKQALQRHFEQHQETCRGDARFVCKADSCGKRLKSKDALKRHQENVHTGDPKKKLICSVCNKKCSSASSLQEHRKIHEIFDCQECMKKFISANQLKRHMITHSEKRPYNCEICNKSFKRLDQVGAHKVIHSEDKPYKCKLCGKGFAHRNVYKNHKKTHSEERPFQCEECKALFRTPFSLQRHLLIHNSERTFKCHHCDATFKRKDTLNVHVQVVHERHKKYRCELCNKAFVTPSVLRSHKKTHTGEKEKICPYCGQKFASSGTLRVHIRSHTGERPYQCPYCEKGFSKNDGLKMHIRTHTREKPYKCSECSKAFSQKRGLDEHKRTHTGEKPFQCDVCDLAFSLKKMLIRHKMTHNPNRPLAECQFCHKKFTRNDYLKVHMDNIHGVADS

SEQ ID NO: 58874 - protein, 501 aa, Homo sapiens
MLGMYVPDRFSLKSSRVQDGMGLYTARRVRKGEKFGPFAGEKRMPEDLDENMDYRLMWEVRGSKGEVLYILDATNPRHSNWLRFVHEAPSQEQKNLAAIQEGENIFYLAVEDIETDTELLIGYLDSDMEAEEEEQQIMTVIKEGEVENSRRQSTAGRKDRLGCKEDYACPQCESSFTSEDILAEHLQTLHQKPTEEKEFKCKNCGKKFPVKQALQRHFEQHQETCRGDARFVCKADSCGKRLKSKDALKRHQENVHTGDPKKKLICSVCNKKCSSASSLQEHRKIHEIFDCQECMKKFISANQLKRHMITHSEKRPYNCEICNKSFKRLDQVGAHKVIHSEDKPYKCKLCGKGFAHRNVYKNHKKTHSEERPFQCEECKALFRTPFSLQRHLLIHNSERTFKCHHCDATFKRKDTLNVHVQVVHERHKKYRCELCNKAFVTPSVLRSHKKTHTGEKEKICPYCGQKFASSGTLRVHIRSHTGEAVQVLRVQQGLQPEARPG

SEQ ID NO: 58875 - protein, 408 aa, Homo sapiens
MCQNFFIDSCAAHGPPTFVKDSAVDKGHPNRSALSLPPGLRIGPSGIPQAGLGVWNEASDLPLGLHFGPYEGRITEDEEAANNGYSWLITKGRNCYEYVDGKDKSWANWMRYVNCARDDEEQNLVAFQYHRQIFYRTCRVIRPGCELLVWYGDEYGQELGIKWGSKWKKELMAGREPKPEIHPCPSCCLAFSSQKFLSQHVERNHSSQNFPGPSARKLLQPENPCPGDQNQEQQYPDPHSRNDKTKGQEIKERSKLLNKRTWQREISRAFSSPPKGQMGSCRVGKRIMEEESRTGQKVNPGNTGKLFVGVGISRIAKVKYGECGQGFSVKSDVITHQRTHTGEKPYVCRECGRGFSWQSVLLTHQRTHTGEKPYVCRECGRGFSRQSVLLTHQRTHTGEKPYVCREDE

SEQ ID NO: 58876 - protein, 894 aa, Homo sapiens
MSPEKSQEESPEEDTERTERKPMVKDAFKDISIYFTKEEWAEMGDWEKTRYRNVKRNYNALITIGLRATRPAFMCHRRQAIKLQVDDTEDSDEEWTPRQQVKPPWMALRVEQRKHQKGMPKASFSNESSLKELSRTANLLNASGSEQAQKPVSPSGEASTSGQHSRLKLELRKKETERKMYSLRERKGHAYKEVSEPQDDDYLYCEMCQNFFIDSCAAHGPPTFVKDSAVDKGHPNRSALSLPPGLRIGPSGIPQAGLGVWNEASDLPLGLHFGPYEGRITEDEEAANNGYSWLITKGRNCYEYVDGKDKSWANWMRYVNCARDDEEQNLVAFQYHRQIFYRTCRVIRPGCELLVWYGDEYGQELGIKWGSKWKKELMAGREPKPEIHPCPSCCLAFSSQKFLSQHVERNHSSQNFPGPSARKLLQPENPCPGDQNQEQQYPDPHSRNDKTKGQEIKERSKLLNKRTWQREISRAFSSPPKGQMGSCRVGKRIMEEESRTGQKVNPGNTGKLFVGVGISRIAKVKYGECGQGFSVKSDVITHQRTHTGEKLYVCRECGRGFSWKSHLLIHQRIHTGEKPYVCRECGRGFSWQSVLLTHQRTHTGEKPYVCRECGRGFSRQSVLLTHQRRHTGEKPYVCRECGRGFSRQSVLLTHQRRHTGEKPYVCRECGRGFSWQSVLLTHQRTHTGEKPYVCRECGRGFSWQSVLLTHQRTHTGEKPYVCRECGRGFSNKSHLLRHQRTHTGEKPYVCRECGRGFRDKSHLLRHQRTHTGEKPYVCRECGRGFRDKSNLLSHQRTHTGEKPYVCRECGRGFSNKSHLLRHQRTHTGEKPYVCRECGRGFRNKSHLLRHQRTHTGEKPYVCRECGRGFSDRSSLCYHQRTHTGEKPYVCREDE

SEQ ID NO: 58877 - protein, 100 aa, Homo sapiens
MSPEKSQEESPEEDTERTERKPMVKDAFKDISIYFTKEEWAEMGDWEKTRYRNVKRNYNALITIGLRATRPAFMCHRRQAIKLQVDDTEDSDEEWTPRQQ

SEQ ID NO: 58878 - protein, 178 aa, Homo sapiens
MSEVRLPPLRALDDFVLGSARLAAPDPCDPQRWCHRVINNLLYYQTNYLLCFGIGLALAGYVRPLHTLLSALVVAVALGVLVWAAETRAAVRRCRRSHPAACLAAVLAVGLLVLWVAGGACTFLFSIAGPVLLILVHASLRLRNLKNKIENKIESIGLKRTPMGLLLEALGQEQEAGS

SEQ ID NO: 58879 - protein, 281 aa, Homo sapiens
MAGTWLLLLLALGCPALPTGVGGTPFPSLAPPIMLLVDGKQQMVVVCLVLDVAPPGLDSPIWFSAGNGSALDAFTYGPSPATDGTWTNLAHLSLPSEELASWEPLVCHTGPGAEGHSRSTQPMHLSGEASTARTCPQEPLRGTPGGALWLGVLRLLLFKLLLFDLLLTCSCLCDPAGPLPSPATTTRLRALGSHRLHPATETGGREATSSPRPQPRDRRWGDTPPGRKPGSPVWGEGSYLSSYPTCPAQAWCSRSALRAPSSSLGAFFAGDLPPPLQAGAA

SEQ ID NO: 58880 - protein, 127 aa, Homo sapiens
MAATSPGPWVSSPTHRSCFLPFLTRGCHNRVWAAHPFLLWPHQSCCWWMESSRWWWSAWSLMLHPLALTAPGRKPGSPVWGEGSYLSSYPTCPAQAWCSRSALRAPSSSLGAFFAGDLPPPLQAGAA

SEQ ID NO: 58881 - protein, 256 aa, Homo sapiens
MAGTWLLLLLALGCPALPTGPVSFPSSPEAATTGPIWFSAGNGSALDAFTYGPSPATDGTWTNLAHLSLPSEELASWEPLVCHTGPGAEGHSRSTQPMHLSGEASTARTCPQEPLRGTPGGALWLGVLRLLLFKLLLFDLLLTCSCLCDPAGPLPSPATTTRLRALGSHRLHPATETGGREATSSPRPQPRDRRWGDTPPGRKPGSPVWGEGSYLSSYPTCPAQAWCSRSALRAPSSSLGAFFAGDLPPPLQAGAA

SEQ ID NO: 58882 - protein, 174 aa, Homo sapiens
MAGTWLLLLLALGCPALPTGEASTARTCPQEPLRGTPGGALWLGVLRLLLFKLLLFDLLLTCSCLCDPAGPLPSPATTTRLRALGSHRLHPATETGGREATSSPRPQPRDRRWGDTPPGRKPGSPVWGEGSYLSSYPTCPAQAWCSRSALRAPSSSLGAFFAGDLPPPLQAGAA

SEQ ID NO: 58883 - protein, 145 aa, Homo sapiens
MSWAPVLLMLFVYCTGCGPQPVLHQPPAMSSALGTTIRLTCTLRNDHDIGVYSVYWYQQRPGHPPRFLLRYFSQSDKSQGPQVPPRFSGSKDVARNRGYLSISELQPEDEAMYYCAMGARSSEKEEREREWEEEMEPTAARTRVP

SEQ ID NO: 58884 - protein, 123 aa, Homo sapiens
MACRCLSFLLMGTFLSVSQTVLAQLDALLVFPGQVAQLSCTLSPQHVTIRDYGVSWYQQRAGSAPRYLLYYRSEEDHHRPADIPDRFSAAKDEAHNACVLTISPVQPEDDADYYCSVGYGFSP

SEQ ID NO: 58885 - protein, 170 aa, Homo sapiens
MDEQPRLMHSHAGVGMAGHPGLSQHLQDGAGGTEGEGGRKQDIGDILQQIMTITDQSLDEAQARKHALNCHRMKPALFNVLCEIKEKTVLSIRGAQEEEPTDPQLMRLDNMLLAEGVAGPEKGGGSAAAAAAAAASGGAGSDNSVEHSDYRAKLSQIRQIYHTELEKYEQ

SEQ ID NO: 58886 - protein, 347 aa, Homo sapiens
MDEQPRLMHSHAGVGMAGHPGLSQHLQDGAGGTEGEGGRKQDIGDILQQIMTITDQSLDEAQARKHALNCHRMKPALFNVLCEIKEKTVLSIRGAQEEEPTDPQLMRLDNMLLAEGVAGPEKGGGSAAAAAAAAASGGAGSDNSVEHSDYRAKLSQIRQIYHTELEKYEQACNEFTTHVMNLLREQSRTRPISPKEIERMVSIIHRKFSSIQMQLKQSTCEAVMILRSRFLDARRKRRNFNKQATEILNEYFYSHLSNPYPSEEAKEELAKKCGITVSQVSNWFGNKRIRYKKNIGKFQEEANIYAAKTAVTATNVSAHGSQANSPSTPNSAGGYPSPCYQPDRRIQ

SEQ ID NO: 58887 - protein, 347 aa, Homo sapiens; identical to SEQ ID NO: 58886

SEQ ID NO: 58888 - protein, 430 aa, Homo sapiens
MDEQPRLMHSHAGVGMAGHPGLSQHLQDGAGGTEGEGGRKQDIGDILQQIMTITDQSLDEAQARKHALNCHRMKPALFNVLCEIKEKTVLSIRGAQEEEPTDPQLMRLDNMLLAEGVAGPEKGGGSAAAAAAAAASGGAGSDNSVEHSDYRAKLSQIRQIYHTELEKYEQACNEFTTHVMNLLREQSRTRPISPKEIERMVSIIHRKFSSIQMQLKQSTCEAVMILRSRFLDARRKRRNFNKQATEILNEYFYSHLSNPYPSEEAKEELAKKCGITVSQVSNWFGNKRIRYKKNIGKFQEEANIYAAKTAVTATNVSAHGSQANSPSTPNSAGSSSSFNMSNSGDLFMSVQSLNGDSYQGAQVGANVQSQVDTLRHVISQTGGYSDGLAASQMYSPQGISANGGWQDATTPSSVTSPTEGPGSVHSDTSN

SEQ ID NO: 58889 - protein, 325 aa, Homo sapiens
MRLDNMLLAEGVAGPEKGGGSAAAAAAAAASGGAGSDNSVEHSDYRAKLSQIRQIYHTELEKYEQACNEFTTHVMNLLREQSRTRPISPKEIERMVSIIHRKFSSIQMQLKQSTCEAVMILRSRFLDARRKRRNFNKQATEILNEYFYSHLSNPYPSEEAKEELAKKCGITVSQVSNWFGNKRIRYKKNIGKFQEEANIYAAKTAVTATNVSAHGSQANSPSTPNSAGSSSSFNMSNSGDLFMSVQSLNGDSYQGAQVGANVQSQVDTLRHVISQTGGYSDGLAASQMYSPQGISANGGWQDATTPSSVTSPTEGPGSVHSDTSN

SEQ ID NO: 58890 - protein, 370 aa, Homo sapiens
MLLVFFVLWTCSLALLASSQSPPPPCASVLSIRGAQEEEPTDPQLMRLDNMLLAEGVAGPEKGGGSAAAAAAAAASGGAGSDNSVEHSDYRAKLSQIRQIYHTELEKYEQACNEFTTHVMNLLREQSRTRPISPKEIERMVSIIHRKFSSIQMQLKQSTCEAVMILRSRFLDARRKRRNFNKQATEILNEYFYSHLSNPYPSEEAKEELAKKCGITVSQVSNWFGNKRIRYKKNIGKFQEEANIYAAKTAVTATNVSAHGSQANSPSTPNSAGSSSSFNMSNSGDLFMSVQSLNGDSYQGAQVGANVQSQVDTLRHVISQTGGYSDGLAASQMYSPQGISANGGWQDATTPSSVTSPTEGPGSVHSDTSN

SEQ ID NO: 58891 - protein, 420 aa, Homo sapiens
MDEQPRLMHSHAGVGMAGHPGLSQHLQDGAGGTEGEGGRKQDIGDILQQIMTITDQSLDEAQARKHALNCHRMKPALFNVLCEIKEKTVLSIRGAQEEEPTDPQLMRLDNMLLAEGVAGPEKGGGSAAAAAAAAASGGAGSDNSVEHSDYRAKLSQIRQIYHTELEKYEQACNEFTTHVMNLLREQSRTRPISPKEIERMVSIIHRKFSSIQMQLKQSTCEAVMILRSRFLDARRKRRNFNKQATEILNEYFYSHLSNPYPSEEAKEELAKKCGITVSQVSNWFGNKRIRYKKNIGKFQEEANIYAAKTAVTATNVSAHGSQANSPSTPNSAGSSSSFNMSNSGDLFMSVQSLNGDSYQGAQVGANVQSQVDTLRHVISQTGGYSDGLAASQMYSPQGISHLPRHPRQAHYHFRLPTWHP

SEQ ID NO: 58892 - protein, 301 aa, Homo sapiens
MRLDNMLLAEGVAGPEKGGGSAAAAAAAAASGGAGSDNSVEHSDYRAKLSQIRQIYHTELEKYEQACNEFTTHVMNLLREQSRTRPISPKEIERMVSIIHRKFSSIQMQLKQSTCEAVMILRSRFLDARRKRRNFNKQATEILNEYFYSHLSNPYPSEEAKEELAKKCGITVSQVSNWFGNKRIRYKKNIGKFQEEANIYAAKTAVTATNVSAHGSQANSPSTPNSAGSSSSFNMSNSGDLFMSVQSLNGDSYQGAQVGANVQSQVDTLRHVISQTGGYSDGLAASQMYSPQGISEIARTY

SEQ ID NO: 58893 - protein, 339 aa, Homo sapiens
MDEQPRLMHSHAGVGMAGHPGLSQHLQDGAGGTEGEGGRKQDIGDILQQIMTITDQSLDEAQARKHALNCHRMKPALFNVLCEIKEKTVLSIRGAQEEEPTDPQLMRLDNMLLAEGVAGPEKGGGSAAAAAAAAASGGAGSDNSVEHSDYRAKLSQIRQIYHTELEKYEQACNEFTTHVMNLLREQSRTRPISPKEIERMVSIIHRKFSSIQMQLKQSTCEAVMILRSRFLDARRKRRNFNKQATEILNEYFYSHLSNPYPSEEAKEELAKKCGITVSQVDTLRHVISQTGGYSDGLAASQMYSPQGISANGGWQDATTPSSVTSPTEGPGSVHSDTSN

SEQ ID NO: 58894 - protein, 325 aa, Homo sapiens; identical to SEQ ID NO: 58889

SEQ ID NO: 58895 - protein, 325 aa, Homo sapiens; identical to SEQ ID NO: 58889

SEQ ID NO: 58896 - protein, 430 aa, Homo sapiens
MDERLLGPPPPGGGRGGLGLVSGEPGGPGEPPGGGDPGGGSGGVPGGRGKQDIGDILQQIMTITDQSLDEAQAKKHALNCHRMKPALFSVLCEIKEKTGLSIRSSQEEEPVDPQLMRLDNMLLAEGVAGPEKGGGSAAAAAAAAASGGGVSPDNSIEHSDYRSKLAQIRHIYHSELEKYEQACNEFTTHVMNLLREQSRTRPVAPKEMERMVSIIHRKFSAIQMQLKQSTCEAVMILRSRFLDARRKRRNFSKQATEVLNEYFYSHLSNPYPSEEAKEELAKKCGITVSQVSNWFGNKRIRYKKNIGKFQEEANIYAVKTAVSVTQGGHSRTSSPTPPSSAGSGGSFNLSGSGDMFLGMPGLNGDSYSASQVESLRHSMGPGGYGDNLGGGQMYSPREMRANGSWQEAVTPSSVTSPTEGPGSVHSDTSN

SEQ ID NO: 58897 - protein, 430 aa, Homo sapiens; identical to SEQ ID NO: 58896

SEQ ID NO: 58898 - protein, 430 aa, Homo sapiens; identical to SEQ ID NO: 58896

SEQ ID NO: 58899 - protein, 430 aa, Homo sapiens; identical to SEQ ID NO: 58896

SEQ ID NO: 58900 - protein, 430 aa, Homo sapiens; identical to SEQ ID NO: 58896

SEQ ID NO: 58901 - protein, 430 aa, Homo sapiens; identical to SEQ ID NO: 58896

SEQ ID NO: 58902 - protein, 430 aa, Homo sapiens; identical to SEQ ID NO: 58896

SEQ ID NO: 58903 - protein, 463 aa, Homo sapiens
MDERLLGPPPPGGGRGGLGLVSGEPGGPGEPPGGGDPGGGSGGVPGGRGKQDIGDILQQIMTITDQSLDEAQAKKHALNCHRMKPALFSVLCEIKEKTGLSIRSSQEEEPVDPQLMRLDNMLLAEGVAGPEKGGGSAAAAAAAAASGGGVSPDNSIEHSDYRSKLAQIRHIYHSELEKYEQACNEFTTHVMNLLREQSRTRPVAPKEMERMVSIIHRKFSAIQMQLKQSTCEAVMILRSRFLDARRKRRNFSKQATEVLNEYFYSHLSNPYPSEEAKEELAKKCGITVSQVLWRLREELSGKVHASQLGAVVSNWFGNKRIRYKKNIGKFQEEANIYAVKTAVIIAERGPFGVRGTELSLPSLPPQGSGGSFNLSGSGDMFLGMPGLNGDSYSASQVRCPSPLQVESLRHSMGPGGYGDNLGGGQMYSPREMRANGSWQEAVTPSSVTSPTEGPGSVHSDTSN

SEQ ID NO: 58904 - protein, 463 aa, Homo sapiens; identical to SEQ ID NO: 58903

SEQ ID NO: 58905 - protein, 438 aa, Homo sapiens
MDERLLGPPPPGGGRGGLGLVSGEPGGPGEPPGGGDPGGGSGGVPGGRGKQDIGDILQQIMTITDQSLDEAQAKKHALNCHRMKPALFSVLCEIKEKTGLSIRSSQEEEPVDPQLMRLDNMLLAEGVAGPEKGGGSAAAAAAAAASGGGVSPDNSIEHSDYRSKLAQIRHIYHSELEKYEQACNEFTTHVMNLLREQSRTRPVAPKEMERMVSIIHRKFSAIQMQLKQSTCEAVMILRSRFLDARRKRRNFSKQATEVLNEYFYSHLSNPYPSEEAKEELAKKCGITVSQVSNWFGNKRIRYKKNIGKFQEEANIYAVKTAVSVTQGGHSRTSSPTPPSSAGSGGSFNLSGSGDMFLGMPGLNGDSYSASQVRCPSPLQVESLRHSMGPGGYGDNLGGGQMYSPREMRANGSWQEAVTPSSVTSPTEGPGSVHSDTSN

SEQ ID NO: 58906 - protein, 438 aa, Homo sapiens; identical to SEQ ID NO: 58905

SEQ ID NO: 58907 - protein, 463 aa, Homo sapiens; identical to SEQ ID NO: 58903

SEQ ID NO: 58908 - protein, 463 aa, Homo sapiens; identical to SEQ ID NO: 58903

SEQ ID NO: 58909 - protein, 443 aa, Homo sapiens
GAEQGGGLRAPPQLWTNGYWGRPLQAGAGGLGLVSGEPGGPGEPPGGGDPGGGSGGVPGGRGKQDIGDILQQIMTITDQSLDEAQAKKHALNCHRMKPALFSVLCEIKEKTGLSIRSSQEEEPVDPQLMRLDNMLLAEGVAGPEKGGGSAAAAAAAAASGGGVSPDNSIEHSDYRSKLAQIRHIYHSELEKYEQACNEFTTHVMNLLREQSRTRPVAPKEMERMVSIIHRKFSAIQMQLKQSTCEAVMILRSRFLDARRKRRNFSKQATEVLNEYFYSHLSNPYPSEEAKEELAKKCGITVSQVSNWFGNKRIRYKKNIGKFQEEANIYAVKTAVSVTQGGHSRTSSPTPPSSAGSGGSFNLSGSGDMFLGMPGLNGDSYSASQVESLRHSMGPGGYGDNLGGGQMYSPREMRANGSWQEAVTPSSVTSPTEGPGSVHSDTSN

SEQ ID NO: 58910 - protein, 443 aa, Homo sapiens; identical to SEQ ID NO: 58909

SEQ ID NO: 58911 - protein, 438 aa, Homo sapiens; identical to SEQ ID NO: 58905

SEQ ID NO: 58912 - protein, 459 aa, Homo sapiens
MDERLLGPPPPGGGRGGLGLVSGEPGGPGEPPGGGDPGGGSGGVPGGRGKQDIGDILQQIMTITDQSLDEAQAKKHALNCHRMKPALFSVLCEIKEKTGLSIRSSQEEEPVDPQLMRLDNMLLAEGVAGPEKGGGSAAAAAAAAASGGGVSPDNSIEHSDYRSKLAQIRHIYHSELEKYEQACNEFTTHVMNLLREQSRTRPVAPKEMERMVSIIHRKFSAIQMQLKQSTCEAVMILRSRFLDARRKRRNFSKQATEVLNEYFYSHLSNPYPSEEAKEELAKKCGITVSQVLWRLREELSGKVHASQLGAVVSNWFGNKRIRYKKNIGKFQEEANIYAVKTAVSVTQGGHSRTSSPTPPSSAGSGGSFNLSGSGDMFLGMPGLNGDSYSASQVRCPSPLQVESLRHSMGPGGYGDNLGGGQMYSPREMRANGSWQEAVTPSSVTSPTEGPGSVHSDTSN

SEQ ID NO: 58913 - protein, 443 aa, Homo sapiens; identical to SEQ ID NO: 58909

SEQ ID NO: 58914 - protein, 438 aa, Homo sapiens; identical to SEQ ID NO: 58905

SEQ ID NO: 58915 - protein, 438 aa, Homo sapiens; identical to SEQ ID NO: 58905

SEQ ID NO: 58916 - protein, 443 aa, Homo sapiens; identical to SEQ ID NO: 58909

SEQ ID NO: 58917 - protein, 463 aa, Homo sapiens; identical to SEQ ID NO: 58903

SEQ ID NO: 58918 - protein, 443 aa, Homo sapiens; identical to SEQ ID NO: 58909

SEQ ID NO: 58919 - protein, 443 aa, Homo sapiens; identical to SEQ ID NO: 58909

SEQ ID NO: 58920 - protein, 351 aa, Homo sapiens
MDDQSRMLQTLAGVNLAGHSVQGGMALPPPPHGHEGADGDGRKQDIGDILHQIMTITDQSLDEAQAKKHALNCHRMKPALFSVLCEIKEKTGLSIRGAQEEDPPDPQLMRLDNMLLAEGVSGPEKGGGSAAAAAAAAASGGSSDNSIEHSDYRAKLTQIRQIYHTELEKYEQACNEFTTHVMNLLREQSRTRPISPKEIERMVGIIHRKFSSIQMQLKQSTCEAVMILRSRFLDARRKRRNFSKQATEILNEYFYSHLSNPYPSEEAKEELAKKCSITVSQVSNWFGNKRIRYKKNIGKFQEEANLYAAKTAVTAAHAVAAAVQNNQTNSPTTPNSGGYPPSCYQSDGRLQ

SEQ ID NO: 58921 - protein, 253 aa, Homo sapiens
MNLLREQSRTRPISPKEIERMVGIIHRKFSSIQMQLKQSTCEAVMILRSRFLDARRKRRNFSKQATEILNEYFYSHLSNPYPSEEAKEELAKKCSITVSQVSNWFGNKRIRYKKNIGKFQEEANLYAAKTAVTAAHAVAAAVQNNQTNSPTTPNSGSSGSFNLPNSGDMFMNMQSLNGDSYQGSQVGANVQSQVDTLRHVINQTGGYSDGLGGNSLYSPHNLNANGGWQDATTPSSVTSPTEGPGSVHSDTSN

SEQ ID NO: 58922 - protein, 455 aa, Homo sapiens
MDDQSRMLQTLAGVNLAGHSVQGGMALPPPPHGHEGADGDGRKQDIGDILHQIMTITDQSLDEAQAKKHALNCHRMKPALFSVLCEIKEKTGLSIRGAQEEDPPDPQLMRLDNMLLAEGVSGPEKGGGSAAAAAAAAASGGSSDNSIEHSDYRAKLTQIRQIYHTELEKYEQACNEFTTHVMNLLREQSRTRPISPKEIERMVGIIHRKFSSIQMQLKQSTCEAVMILRSRFLDARRKRRNFSKQATEILNEYFYSHLSNPYPSEEAKEELAKKCSITVSQSLVKDPKERGSKGSDIQPTSVVSNWFGNKRIRYKKNIGKFQEEANLYAAKTAVTAAHAVAAAVQNNQTNSPTTPNSGSSGSFNLPNSGDMFMNMQSLNGDSYQGSQVGANVQSQVDTLRHVINQTGGYSDGLGGNSLYSPHNLNANGGWQDATTPSSVTSPTEGPGSVHSDTSN

SEQ ID NO: 58923 - protein, 434 aa, Homo sapiens
MDDQSRMLQTLAGVNLAGHSVQGGMALPPPPHGHEGADGDGRKQDIGDILHQIMTITDQSLDEAQAKKHALNCHRMKPALFSVLCEIKEKTGLSIRGAQEEDPPDPQLMRLDNMLLAEGVSGPEKGGGSAAAAAAAAASGGSSDNSIEHSDYRAKLTQIRQIYHTELEKYEQACNEFTTHVMNLLREQSRTRPISPKEIERMVGIIHRKFSSIQMQLKQSTCEAVMILRSRFLDARRKRRNFSKQATEILNEYFYSHLSNPYPSEEAKEELAKKCSITVSQVSNWFGNKRIRYKKNIGKFQEEANLYAAKTAVTAAHAVAAAVQNNQTNSPTTPNSGSSGSFNLPNSGDMFMNMQSLNGDSYQGSQVGANVQSQVDTLRHVINQTGGYSDGLGGNSLYSPHNLNANGGWQDATTPSSVTSPTEGPGSVHSDTSN

SEQ ID NO: 58924 - protein, 262 aa, Homo sapiens
MRGLSIRGAQEEDPPDPQLMRLDNMLLAEGVSGPEKGGGSAAAAAAAAASGGSSDNSIEHSDYRAKLTQIRQIYHTELEKYEQACNEFTTHVMNLLREQSRTRPISPKEIERMVGIIHRKFSSIQMQLKQSTCEAVMILRSRFLDARRKRRNFSKQATEILNEYFYSHLSNPYPSEEAKEELAKKCSITVSQVSNWFGNKRIRYKKNIGKFQEEANLYAAKTAVTAAHAVAAAVQNNQTNSPTTPNSGGYPPSCYQSDGRLQ

SEQ ID NO: 58925 - protein, 359 aa, Homo sapiens
MKPALFSVLCEIKEKTGLSIRGAQEEDPPDPQLMRLDNMLLAEGVSGPEKGGGSAAAAAAAAASGGSSDNSIEHSDYRAKLTQIRQIYHTELEKYEQACNEFTTHVMNLLREQSRTRPISPKEIERMVGIIHRKFSSIQMQLKQSTCEAVMILRSRFLDARRKRRNFSKQATEILNEYFYSHLSNPYPSEEAKEELAKKCSITVSQVSNWFGNKRIRYKKNIGKFQEEANLYAAKTAVTAAHAVAAAVQNNQTNSPTTPNSGSSGSFNLPNSGDMFMNMQSLNGDSYQGSQVGANVQSQVDTLRHVINQTGGYSDGLGGNSLYSPHNLNANGGWQDATTPSSVTSPTEGPGSVHSDTSN

SEQ ID NO: 58926 - protein, 509 aa, Homo sapiens
MERRRLWGSIQSRYISMSVWTSPRRLVELAGQSLLKDEALAIAALELLPRELFPPLFMAAFDGRHSQTLKAMVQAWPFTCLPLGVLMKGQHLHLETFKAVLDGLDVLLAQEVRPRRWKLQVLDLRKNSHQDFWTVWSGNRASLYSFPEPEAAQPMTKKRKVDGLSTEAEQPFIPVEVLVDLFLKEGACDELFSYLIEKVKRKKNVLRLCCKKLKIFAMPMQDIKMILKMVQLDSIEDLEVTCTWKLPTLAKFSPYLGQMINLRRLLLSHIHASSYISPEKEEQYIAQFTSQFLSLQCLQALYVDSLFFLRGRLDQLLRHVMNPLETLSITNCRLSEGDVMHLSQSPSVSQLSVLSLSGVMLTDVSPEPLQALLERASATLQDLVFDECGITDDQLLALLPSLSHCSQLTTLSFYGNSISISALQSLLQHLIGLSNLTHVLYPVPLESYEDIHGTLHLERLAYLHARLRELLCELGRPSMVWLSANPCPHCGDRTFYDPEPILCPCFMPN

SEQ ID NO: 58927 - protein, 509 aa, Homo sapiens; identical to SEQ ID NO: 58926

SEQ ID NO: 58928 - protein, 509 aa, Homo sapiens; identical to SEQ ID NO: 58926

SEQ ID NO: 58929 - protein, 86 aa, Homo sapiens
MERRRLWGSIQSRYISMSVWTSPRRLVELAGQSLLKDEALAIAALELLPRELFPPLFMAAFDGRHSQTLKAMVQAWPFTCLPLGVL

SEQ ID NO: 58930 - protein, 509 aa, Homo sapiens; identical to SEQ ID NO: 58926

SEQ ID NO: 58931 - protein, 115 aa, Homo sapiens
MERRRLWGSIQSRYISMSVWTSPRRLVELAGQSLLKDEALAIAALELLPRELFPPLFMAAFDGRHSQTLKAMVQAWPFTCLPLGVLMKGQHLHLETFKAVLDGLDVLLAQEVRPR

SEQ ID NO: 58932 - protein, 152 aa, Homo sapiens
MERRRLWGSIQSRYISMSVWTSPRRLVELAGQSLLKDEALAIAALELLPRELFPPLFMAAFDGRHSQTLKAMVQAWPFTCLPLGVLMKGQHLHLETFKAVLDGLDVLLAQEVRPRRWKLQVLDLRKNSHQDFWTVWSGNRASLYSFPEPEAA

SEQ ID NO: 58933 - protein, 493 aa, Homo sapiens
MSVWTSPRRLVELAGQSLLKDEALAIAALELLPRELFPPLFMAAFDGRHSQTLKAMVQAWPFTCLPLGVLMKGQHLHLETFKAVLDGLDVLLAQEVRPRRWKLQVLDLRKNSHQDFWTVWSGNRASLYSFPEPEAAQPMTKKRKVDGLSTEAEQPFIPVEVLVDLFLKEGACDELFSYLIEKVKRKKNVLRLCCKKLKIFAMPMQDIKMILKMVQLDSIEDLEVTCTWKLPTLAKFSPYLGQMINLRRLLLSHIHASSYISPEKEEQYIAQFTSQFLSLQCLQALYVDSLFFLRGRLDQLLRHVMNPLETLSITNCRLSEGDVMHLSQSPSVSQLSVLSLSGVMLTDVSPEPLQALLERASATLQDLVFDECGITDDQLLALLPSLSHCSQLTTLSFYGNSISISALQSLLQHLIGLSNLTHVLYPVPLESYEDIHGTLHLERLAYLHARLRELLCELGRPSMVWLSANPCPHCGDRTFYDPEPILCPCFMPN

SEQ ID NO: 58934 - protein, 201 aa, Homo sapiens
MERRRLWGSIQSRYISMSVWTSPRRLVELAGQSLLKDEALAIAALELLPRELFPPLFMAAFDGRHSQTLKAMVQAWPFTCLPLGVLMKGQHLHLETFKAVLDGLDVLLAQEVRPRRWKLQVLDLRKNSHQDFWTVWSGNRASLYSFPEPEAAQPMTKKRKVDGLSTEAEQPFIPVEVLVDLFLKEGACDELFSYLIEKVKR

SEQ ID NO: 58935 - protein, 493 aa, Homo sapiens; identical to SEQ ID NO: 58933

SEQ ID NO: 58936 - protein, 509 aa, Homo sapiens; identical to SEQ ID NO: 58926

SEQ ID NO: 58937 - protein, 122 aa, Homo sapiens
MAAPVDLELKKAFTELQAKVIDTQQKVKLADIQIEQLNRTKKHAHLTDTEIMTLVDETNMYEGVGRMFILQSKEAIHSQLLEKQKIAEEKIKELEQKKSYLERSVKEAEDNIREMLMARRAQ

SEQ ID NO: 58938 - protein, 154 aa, Homo sapiens
MAENSGRAGKSSGSGAGKGAVSAEQVIAGFNRLRQEQRGLASKAAELEMELNEHSLVIDTLKEVDETRKCYRMVGGVLVERTVKEVLPALENNKEQIQKIIETLTQQLQAKGKELNEFREKHNIRLMGEDEKPAAKENSEGAGAKASSAGVLVS

SEQ ID NO: 58939 - protein, 134 aa, Homo sapiens
MAATMKKAAAEDVNVTFEDQQKINKFARNTSRITELKEEIEVKKKQLQNLEDACDDIMLADDDCLMIPYQIGDVFISHSQEETQEMLEEAKKNLQEEIDALESRVESIQRVLADLKVQLYAKFGSNINLEADES

SEQ ID NO: 58940 - protein, 154 aa, Homo sapiens
MAQSINITELNLPQLEMLKNQLDQEVEFLSTSIAQLKVVQTKYVEAKDCLNVLNKSNEGKELLVPLTSSMYVPGKLHDVEHVLIDVGTGYYVEKTAEDAKDFFKRKIDFLTKQMEKIQPALQEKHAMKQAVMEMMSQKIQQLTALGAAQATAKA

SEQ ID NO: 58941 - protein, 109 aa, Homo sapiens
MAQSINITELNLPQLEMLKNQLDQMYVPGKLHDVEHVLIDVGTGYYVEKTAEDAKDFFKRKIDFLTKQMEKIQPALQEKHAMKQAVMEMMSQKIQQLTALGAAQATAKA

SEQ ID NO: 58942 - protein, 154 aa, Homo sapiens; identical to SEQ ID NO: 58940

SEQ ID NO: 58943 - protein, 426 aa, Homo sapiens
MGTLSAPPCTQRIKWKGLLLTASLLNFWNLPTTAQVTIEAEPTKVSEGKDVLLLVHNLPQNLTGYIWYKGQMRDLYHYITSYVVDGEIIIYGPAYSGRETAYSNASLLIQNVTREDAGSYTLHIIKGDDGTRGVTGRFTFTLHLETPKPSISSSNLNPRETMEAVSLTCDPETPDASYLWWMNGQSLPMTHSLKLSETNRTLFLLGVTKYTAGPYECEIRNPVSASRSDPVTLNLLPKLPKPYITINNLNPRENKDVLNFTCEPKSENYTYIWWLNGQSLPVSPRVKRPIENRILILPSVTRNETGPYQCEIRDRYGGIRSDPVTLNVLYGPDLPRIYPSFTYYRSGEVLYLSCSADSNPPAQYSWTINEKFQLPGQKLFIRHITTKHSGLYVCSVRNSATGKESSKSMTVEVSGKWIPASLAIGF

SEQ ID NO: 58944 - protein, 143 aa, Homo sapiens
MGTLSAPPCTQRIKWKGLLLTASLLNFWNLPTTAQVTIEAEPTKVSEGKDVLLLVHNLPQNLTGYIWYKGQMRDLYHYITSYVVDGEIIIYGPAYSGRETAYSNASLLIQNVTREDAGSYTLHIIKGDDGTRGVTGRFTFTLH

SEQ ID NO: 58945 - protein, 428 aa, Homo sapiens
MGTLSAPPCTQRIKWKGLLLTASLLNFWNLPTTAQVTIEAEPTKVSEGKDVLLLVHNLPQNLTGYIWYKGQMRDLYHYITSYVVDGEIIIYGPAYSGRETAYSNASLLIQNVTREDAGSYTLHIIKGDDGTRGVTGRFTFTLHLETPKPSISSSNLNPRETMEAVSLTCDPETPDASYLWWMNGQSLPMTHSLKLSETNRTLFLLGVTKYTAGPYECEIRNPVSASRSDPVTLNLLPKLPKPYITINNLNPRENKDVLNFTCEPKSENYTYIWWLNGQSLPVSPRVKRPIENRILILPSVTRNETGPYQCEIRDRYGGIRSDPVTLNVLYGPDLPRIYPSFTYYRSGEVLYLSCSADSNPPAQYSWTINEKFQLPGQKLFIRHITTKHSGLYVCSVRNSATGKESSKSMTVEVSAYSSSINYTSGNRN

SEQ ID NO: 58946 - protein, 419 aa, Homo sapiens
MGTLSAPPCTQRIKWKGLLLTASLLNFWNLPTTAQVTIEAEPTKVSEGKDVLLLVHNLPQNLTGYIWYKGQMRDLYHYITSYVVDGEIIIYGPAYSGRETAYSNASLLIQNVTREDAGSYTLHIIKGDDGTRGVTGRFTFTLHLETPKPSISSSNLNPRETMEAVSLTCDPETPDASYLWWMNGQSLPMTHSLKLSETNRTLFLLGVTKYTAGPYECEIRNPVSASRSDPVTLNLLPKLPKPYITINNLNPRENKDVLNFTCEPKSENYTYIWWLNGQSLPVSPRVKRPIENRILILPSVTRNETGPYQCEIRDRYGGIRSDPVTLNVLYGPDLPRIYPSFTYYRSGEVLYLSCSADSNPPAQYSWTINEKFQLPGQKLFIRHITTKHSGLYVCSVRNSATGKESSKSMTVEVSDWTVP

SEQ ID NO: 58947 - protein, 417 aa, Homo sapiens
MGTLSAPPCTQRIKWKGLLLTASLLNFWNLPTTAQVTIEAEPTKVSEGKDVLLLVHNLPQNLTGYIWYKGQMRDLYHYITSYVVDGEIIIYGPAYSGRETAYSNASLLIQNVTREDAGSYTLHIIKGDDGTRGVTGRFTFTLHLETPKPSISSSNLNPRETMEAVSLTCDPETPDASYLWWMNGQSLPMTHSLKLSETNRTLFLLGVTKYTAGPYECEIRNPVSASRSDPVTLNLLPKLPKPYITINNLNPRENKDVLNFTCEPKSENYTYIWWLNGQSLPVSPRVKRPIENRILILPSVTRNETGPYQCEIRDRYGGIRSDPVTLNVLYGPDLPRIYPSFTYYRSGEVLYLSCSADSNPPAQYSWTINEKFQLPGQKLFIRHITTKHSGLYVCSVRNSATGKESSKSMTVEVSEAL

SEQ ID NO: 58948 - protein, 213 aa, Homo sapiens
MGPLSAPPCTEHIKWKGLLLTVETPKPSISSSNLNPREAMETVILTCNPETPDASYLWWMNGQSLPMTHRMQLSETNRTLFLFGVTKYTAGPYECEIWNSGSASRSDPVTLNLLHGPDLPRIFPSVTSYYSGENLDLSCFANSNPPAQYSWTINGKFQLSGQKLFIPQITPKHNGLYACSARNSATGEESSTSLTIRVIAPPGLGTFAFNNPT

SEQ ID NO: 58949 - protein, 335 aa, Homo sapiens
MGPLSAPPCTEHIKWKGLLLTALLLNFWNLPTTAQVMIEAQPPKVSEGKDVLLLVHNLPQNLTGYIWYKGQIRDLYHYITSYVVDGQIIIYGPAYSGRETVYSNASLLIQNVTREDAGSYTLHIIKRGDGTRGVTGYFTFTLYLETPKPSISSSNLNPREAMETVILTCNPETPDASYLWWMNGQSLPMTHRMQLSETNRTLFLFGVTKYTAGPYECEIWNSGSASRSDPVTLNLLHGPDLPRIFPSVTSYYSGENLDLSCFANSNPPAQYSWTINGKFQLSGQKLFIPQITPKHNGLYACSARNSATGEESSTSLTIRVIAPPGLGTFAFNNPT

SEQ ID NO: 58950 - protein, 335 aa, Homo sapiens; identical to SEQ ID NO: 58949

SEQ ID NO: 58951 - protein, 213 aa, Homo sapiens; identical to SEQ ID NO: 58948

SEQ ID NO: 58952 - protein, 335 aa, Homo sapiens
MGPLSAPPCTEHIKWKGLLVTASLLNFWNLPTTAQVTIEAQPPKVSEGKDVLLLVHNLPQNLTGYIWYKGQIRDLYHYITSYVVDGQIIIYGPAYSGRETAYSNASLLIQNVTREDAGSYTLHIIKRGDGTRGVTGYFTFTLYLETPKPSISSSNLNPREAMETVILTCDPETPDTSYQWWMNGQSLPMTHRFQLSETNRTLFLFGVTKYTAGPYECEIRNSGSASRSDPVTLNLLHGPDLPRIHPSYTNYRSGDNLYLSCFANSNPPAQYSWTINGKFQQSGQNLFIPQITTKHSGLYVCSVRNSATGEESSTSLTVKVSASTRIGLLPLLNPT

SEQ ID NO: 58953 - protein, 335 aa, Homo sapiens; identical to SEQ ID NO: 58952

SEQ ID NO: 58954 - protein, 335 aa, Homo sapiens; identical to SEQ ID NO: 58952

SEQ ID NO: 58955 - protein, 428 aa, Homo sapiens
MGPLSAPPCTQRITWKGLLLTALLLNFWNLPTTAQVTIEAEPTKVSKGKDVLLLVHNLPQNLAGYIWYKGQMKDLYHYITSYVVDGQIIIYGPAYSGRETVYSNASLLIQNVTREDAGSYTLHIVKRGDGTRGETGHFTFTLYLETPKPSISSSNLYPREDMEAVSLTCDPETPDASYLWWMNGQSLPMTHSLQLSKNKRTLFLFGVTKYTAGPYECEIRNPVSASRSDPVTLNLLPKLPKPYITINNLNPRENKDVLAFTCEPKSENYTYIWWLNGQSLPVSPRVKRPIENRILILPSVTRNETGPYQCEIQDRYGGIRSYPVTLNVLYGPDLPRIYPSFTYYHSGENLYLSCFADSNPPAEYSWTINGKFQLSGQKLFIPQITTKHSGLYACSVRNSATGMESSKSMTVKVSAPSGTGHLPGLNPL

SEQ ID NO: 58956 - protein, 326 aa, Homo sapiens
MGPLSAPPCTQRITWKGVLLTASLLNFWNPPTTAQVTIEAQPPKVSEGKDVLLLVHNLPQNLAGYIWYKGQMTYLYHYITSYVVDGQRIIYGPAYSGRERVYSNASLLIQNVTQEDAGSYTLHIIKRRDGTGGVTGHFTFTLHLETPKPSISSSNLNPREAMEAVILTCDPATPAASYQWWMNGQSLPMTHRLQLSKTNRTLFIFGVTKYIAGPYECEIRNPVSASRSDPVTLNLLHGPDLPSIYPSFTYYRSGENLYLSCFAESNPRAQYSWTINGKFQLSGQKLSIPQITTKHSGLYACSVRNSATGKESSKSITVKVSDWILP

SEQ ID NO: 58957 - protein, 419 aa, Homo sapiens
MGPLSAPPCTQRITWKGVLLTASLLNFWNPPTTAQVTIEAQPPKVSEGKDVLLLVHNLPQNLAGYIWYKGQMTYLYHYITSYVVDGQRIIYGPAYSGRERVYSNASLLIQNVTQEDAGSYTLHIIKRRDGTGGVTGHFTFTLHLETPKPSISSSNLNPREAMEAVILTCDPATPAASYQWWMNGQSLPMTHRLQLSKTNRTLFIFGVTKYIAGPYECEIRNPVSASRSDPVTLNLLPKLSKPYITINNLNPRENKDVLTFTCEPKSKNYTYIWWLNGQSLPVSPRVKRPIENRILILPNVTRNETGPYQCEIRDRYGGIRSDPVTLNVLYGPDLPSIYPSFTYYRSGENLYLSCFAESNPRAQYSWTINGKFQLSGQKLSIPQITTKHSGLYACSVRNSATGKESSKSITVKVSDWILP

SEQ ID NO: 58958 - protein, 326 aa, Homo sapiens
MGPLSAPPCTQRITWKGVLLTASLLNFWNPPTTAQVTIEAQPPKVSEGKDVLLLVHNLPQNLAGYIWYKGQMTYLYHYITSYVVDGQRIIYGPAYSGRERVYSNASLLIQNVTQEDAGSYTLHIIKRRDGTGGVTGHFTFTLHPKLSKPYITINNLNPRENKDVLTFTCEPKSKNYTYIWWLNGQSLPVSPRVKRPIENRILILPNVTRNETGPYQCEIRDRYGGIRSDPVTLNVLYGPDLPSIYPSFTYYRSGENLYLSCFAESNPRAQYSWTINGKFQLSGQKLSIPQITTKHSGLYACSVRNSATGKESSKSITVKVSDWILP

SEQ ID NO: 58959 - protein, 335 aa, Homo sapiens
MGPLSAPPCTQHITWKGLLLTASLLNFWNLPITAQVTIEALPPKVSEGKDVLLLVHNLPQNLAGYIWYKGQLMDLYHYITSYVVDGQINIYGPAYTGRETVYSNASLLIQNVTREDAGSYTLHIIKRGDRTRGVTGYFTFNLYLKLPKPYITINNSKPRENKDVLAFTCEPKSENYTYIWWLNGQSLPVSPRVKRPIENRILILPSVTRNETGPYECEIRDRDGGMRSDPVTLNVLYGPDLPSIYPSFTYYRSGENLYLSCFAESNPPAEYFWTINGKFQQSGQKLSIPQITTKHRGLYTCSVRNSATGKESSKSMTVEVSAPSGIGRLPLLNPI

SEQ ID NO: 58960 - protein, 335 aa, Homo sapiens; identical to SEQ ID NO: 58959

SEQ ID NO: 58961 - protein, 335 aa, Homo sapiens; identical to SEQ ID NO: 58959

SEQ ID NO: 58962 - protein, 424 aa, Homo sapiens
MGPLSAPPCTQHITWKGLLLTASLLNFWNLPTTAQVIIEAKPPKVSEGKDVLLLVHNLPQNLTGYIWYKGQMTDLYHYITSYVVHGQIIYGPAYSGRETVYSNASLLIQNVTQEDAGSYTLHIIKRGDGTGGVTGYFTVTLYSETPKPSISSSNLNPREVMEAVRLICDPETPDASYLWLLNGQNLPMTHRLQLSKTNRTLYLFGVTKYIAGPYECEIRNPVSASRSDPVTLNLLPKLPMPYITINNLNPREKKDVLAFTCEPKSRNYTYIWWLNGQSLPVSPRVKRPIENRILILPSVTRNETGPYQCEIRDRYGGIRSNPVTLNVLYGPDLPRIYPSFTYYRSGENLDLSCFADSNPPAEYSWTINGKFQLSGQKLFIPQITTNHSGLYACSVRNSATGKEISKSMIVKVSGPCHGNQTESH

SEQ ID NO: 58963 - protein, 435 aa, Homo sapiens
MGPLSAPPCTQHITWKGLLLTASLLNFWNLPTTAQVIIEAKPPKVSEGKDVLLLVHNLPQNLTGYIWYKGQMTDLYHYITSYVVHGQIIYGPAYSGRETVYSNASLLIQNVTQEDAGSYTLHIIKRGDGTGGVTGYFTVTLYSETPKPSISSSNLNPREVMEAVRLICDPETPDASYLWLLNGQNLPMTHRLQLSKTNRTLYLFGVTKYIAGPYECEIRNPVSASRSDPVTLNLLPKLPMPYITINNLNPREKKDVLAFTCEPKSRNYTYIWWLNGQSLPVSPRVKRPIENRILILPSVTRNETGPYQCEIRDRYGGIRSNPVTLNVLYGPDLPRIYPSFTYYRSGENLDLSCFADSNPPAEYSWTINGKFQLSGQKLFIPQITTNHSGLYACSVRNSATGKEISKSMIVKVSETASPQVTYAGPNTWFQEILLL

SEQ ID NO: 58964 - protein, 201 aa, Homo sapiens
MGGDENRGVTGHFTFTLYLETPKPSISSSKLNPREAMEAVSLTCDPETPDASYLWWMNGQSLPMSHRLQLSETNRTLFLLGVTKYTAGPYECEIRNPVSASRSDPFTLNLLHGPDLPRIYPSFTYYRSGEVLYLSCSADSNPPAQYSWTINGKFQLSGQKLFIPQITTKHSGLYACSVRNSATGKESSKSMTVKVSDWTLP

SEQ ID NO: 58965 - protein, 426 aa, Homo sapiens
MGLLSAPPCTQRITWKGLLLTASLLNFWNPPTTAQVTIEAQPTKVSEGKDVLLLVHNLPQNLTGYIWYKGQIRDLYHYITSYVVDGQIIIYGPAYSGRETIYSNASLLIQNVTQEDAGSYTLHIIMGGDENRGVTGHFTFTLYLETPKPSISSSKLNPREAMEAVSLTCDPETPDASYLWWMNGQSLPMSHRLQLSETNRTLFLLGVTKYTAGPYECEIRNPVSASRSDPFTLNLLPKLPKPYITINNLKPRENKDVLNFTCEPKSENYTYIWWLNGQSLPVSPRVKRPIENRILILPSVTRNETGPYQCEIRDQYGGIRSYPVTLNVLYGPDLPRIYPSFTYYRSGEVLYLSCSADSNPPAQYSWTINGKFQLSGQKLFIPQITTKHSGLYACSVRNSATGKESSKSMTVKVSGKRIPVSLAIGI

SEQ ID NO: 58966 - protein, 238 aa, Homo sapiens
MSHRLQLSETNRTLFLLGVTKYTAGPYECEIRNPVSASRSDPFTLNLLPKLPKPYITINNLKPRENKDVLNFTCEPKSENYTYIWWLNGQSLPVSPRVKRPIENRILILPSVTRNETGPYQCEIRDQYGGIRSYPVTLNVLYGPDLPRIYPSFTYYRSGEVLYLSCSADSNPPAQYSWTINGKFQLSGQKLFIPQITTKHSGLYACSVRNSATGKESSKSMTVKVSAYSSSINYTAVY

SEQ ID NO: 58967 - protein, 419 aa, Homo sapiens
MGLLSAPPCTQRITWKGLLLTASLLNFWNPPTTAQVTIEAQPTKVSEGKDVLLLVHNLPQNLTGYIWYKGQIRDLYHYITSYVVDGQIIIYGPAYSGRETIYSNASLLIQNVTQEDAGSYTLHIIMGGDENRGVTGHFTFTLYLETPKPSISSSKLNPREAMEAVSLTCDPETPDASYLWWMNGQSLPMSHRLQLSETNRTLFLLGVTKYTAGPYECEIRNPVSASRSDPFTLNLLPKLPKPYITINNLKPRENKDVLNFTCEPKSENYTYIWWLNGQSLPVSPRVKRPIENRILILPSVTRNETGPYQCEIRDQYGGIRSYPVTLNVLYGPDLPRIYPSFTYYRSGEVLYLSCSADSNPPAQYSWTINGKFQLSGQKLFIPQITTKHSGLYACSVRNSATGKESSKSMTVKVSDWTLP

SEQ ID NO: 58968 - protein, 297 aa, Homo sapiens
MGLLSAPPCTQRITWKGLLLTVETPKPSISSSKLNPREAMEAVSLTCDPETPDASYLWWMNGQSLPMSHRLQLSETNRTLFLLGVTKYTAGPYECEIRNPVSASRSDPFTLNLLPKLPKPYITINNLKPRENKDVLNFTCEPKSENYTYIWWLNGQSLPVSPRVKRPIENRILILPSVTRNETGPYQCEIRDQYGGIRSYPVTLNVLYGPDLPRIYPSFTYYRSGEVLYLSCSADSNPPAQYSWTINGKFQLSGQKLFIPQITTKHSGLYACSVRNSATGKESSKSMTVKVSDWTLP

SEQ ID NO: 58969 - protein, 402 aa, Homo sapiens
MGPLPAPSCTQRITWKGLLLTASLLNFWNPPTTAEVTIEAQPPKVSEGKDVLLLVHNLPQNLPGYFWYKGEMTDLYHYIISYIVDGKIIIYGPAYSGRETVYSNASLLIQNVTRKDAGTYTLHIIKRGDETREEIRHFTFTLYLETPKPYISSSNLNPREAMEAVRLICDPETLDASYLWWMNGQSLPVTHRLQLSKTNRTLYLFGVTKYIAGPYECEIRNPVSASRSDPVTLNLLHGPDLPRIYPSFTYYRSGENLDLSCFTESNPPAEYFWTINGKFQQSGQKLFIPQITRNHSGLYACSVHNSATGKEISKSMTVKVSGKWIPASLAVGFYVESIWLSEKSQENIFIPSLCPMGTSKSQILLLNPPNLSLQTLFSLFFCFLMADLVSGLKKVGRGLYQP

SEQ ID NO: 58970 - protein, 426 aa, Homo sapiens
MGPLPAPSCTQRITWKGLLLTASLLNFWNPPTTAEVTIEAQPPKVSEGKDVLLLVHNLPQNLPGYFWYKGEMTDLYHYIISYIVDGKIIIYGPAYSGRETVYSNASLLIQNVTRKDAGTYTLHIIKRGDETREEIRHFTFTLYLETPKPYISSSNLNPREAMEAVRLICDPETLDASYLWWMNGQSLPVTHRLQLSKTNRTLYLFGVTKYIAGPYECEIRNPVSASRSDPVTLNLLPKLPIPYITINNLNPRENKDVLAFTCEPKSENYTYIWWLNGQSLPVSPGVKRPIENRILILPSVTRNETGPYQCEIRDRYGGLRSNPVILNVLYGPDLPRIYPSFTYYRSGENLDLSCFTESNPPAEYFWTINGKFQQSGQKLFIPQITRNHSGLYACSVHNSATGKEISKSMTVKVSGPCHGDLTESQS

SEQ ID NO: 58971 - protein, 240 aa, Homo sapiens
MGPLPAPSCTQRITWKGLLLTASLLNFWNPPTTAEVTIEAQPPKVSEGKDVLLLVHNLPQNLPGYFWYKGEMTDLYHYIISYIVDGKIIIYGPAYSGRETVYSNASLLIQNVTRKDAGTYTLHIIKRGDETREEIRHFTFTLYYGPDLPRIYPSFTYYRSGENLDLSCFTESNPPAEYFWTINGKFQQSGQKLFIPQITRNHSGLYACSVHNSATGKEISKSMTVKVSGPCHGDLTESQS

SEQ ID NO: 58972 - protein, 387 aa, Homo sapiens
MGPLPAPSCTQRITWKGLLLTASLLNFWYKGEMTDLYHYIISYIVDGKIIIYGPAYSGRETVYSNASLLIQNVTRKDAGTYTLHIIKRGDETREEIRHFTFTLYLETPKPYISSSNLNPREAMEAVRLICDPETLDASYLWWMNGQSLPVTHRLQLSKTNRTLYLFGVTKYIAGPYECEIRNPVSASRSDPVTLNLLPKLPIPYITINNLNPRENKDVLAFTCEPKSENYTYIWWLNGQSLPVSPGVKRPIENRILILPSVTRNETGPYQCEIRDRYGGLRSNPVILNVLYGPDLPRIYPSFTYYRSGENLDLSCFTESNPPAEYFWTINGKFQQSGQKLFIPQITRNHSGLYACSVHNSATGKEISKSMTVKVSGPCHGDLTESQS

SEQ ID NO: 58973 - protein, 333 aa, Homo sapiens
MGPLPAPSCTQRITWKGLLLTASLLNFWNPPTTAEVTIEAQPPKVSEGKDVLLLVHNLPQNLPGYFWYKGEMTDLYHYIISYIVDGKIIIYGPAYSGRETVYSNASLLIQNVTRKDAGTYTLHIIKRGDETREEIRHFTFTLYSKLPIPYITINNLNPRENKDVLAFTCEPKSENYTYIWWLNGQSLPVSPGVKRPIENRILILPSVTRNETGPYQCEIRDRYGGLRSNPVILNVLYGPDLPRIYPSFTYYRSGENLDLSCFTESNPPAEYFWTINGKFQQSGQKLFIPQITRNHSGLYACSVHNSATGKEISKSMTVKVSGPCHGDLTESQS

SEQ ID NO: 58974 - protein, 343 aa, Homo sapiens
MLLLKKHTEDISSVYEIRERLGSGAFSEVVLAQERGSAHLVALKCIPKKALRGKEALVENEIAVLRRISHPNIVALEDVHESPSHLYLAMELVTGGELFDRIMERGSYTEKDASHLVGQVLGAVSYLHSLGIVHRDLKPENLLYATPFEDSKIMVSDFGLSKIQAGNMLGTACGTPGYVAPELLEQKPYGKAVDVWALGVISYILLCGYPPFYDESDPELFSQILRASYEFDSPFWDDISESAKDFIRHLLERDPQKRFTCQQALRHLWISGDTAFDRDILGSVSEQIRKNFARTHWKRAFNATSFLRHIRKLGQIPEGEGASEQGMARHSHSGLRAGQPPKW

SEQ ID NO: 58975 - protein, 366 aa, Homo sapiens
MLLLKKHTEDISSVYEIRERLGSGAFSEVVLAQERGSAHLVALKCIPKKALRGKEALVENEIAVLRRISHPNIVALEDVHESPSHLYLAMELVTGGELFDRIMERGSYTEKDASHLVGQVLGAVSYLHSLGIVHRDLKPENLLYATPFEDSKIMVSDFGLSKIQAGNMLGTACGTPGYAEPVTLSGMAACVPVRASVCLWPPAPELLEQKPYGKAVDVWALGVISYILLCGYPPFYDESDPELFSQILRASYEFDSPFWDDISESAKDFIRHLLERDPQKRFTCQQALRHLWISGDTAFDRDILGSVSEQIRKNFARTHWKRAFNATSFLRHIRKLGQIPEGEGASEQGMARHSHSGLRAGQPPKW

SEQ ID NO: 58976 - protein, 360 aa, Homo sapiens
MWRRVCGGLAGRRPSGDMLLLKKHTEDISSVYEIRERLGSGAFSEVVLAQERGSAHLVALKCIPKKALRGKEALVENEIAVLRRISHPNIVALEDVHESPSHLYLAMELVTGGELFDRIMERGSYTEKDASHLVGQVLGAVSYLHSLGIVHRDLKPENLLYATPFEDSKIMVSDFGLSKIQAGNMLGTACGTPGYVAPELLEQKPYGKAVDVWALGVISYILLCGYPPFYDESDPELFSQILRASYEFDSPFWDDISESAKDFIRHLLERDPQKRFTCQQALRHLWISGDTAFDRDILGSVSEQIRKNFARTHWKRAFNATSFLRHIRKLGQIPEGEGASEQGMARHSHSGLRAGQPPKW

SEQ ID NO: 58977 - protein, 343 aa, Homo sapiens; identical to SEQ ID NO: 58974

SEQ ID NO: 58978 - protein, 366 aa, Homo sapiens; identical to SEQ ID NO: 58975

SEQ ID NO: 58979 - protein, 43 aa, Homo sapiens
MLLLKKHTEDISSVYEIRERLGSGAFSEVVLAQERGSAHLVAL

SEQ ID NO: 58980 - protein, 224 aa, Homo sapiens
MLLLKKHTEDISSVYEIRERLGSGAFSEVVLAQERGSAHLVALKCIPKKALRGKEALVENEIAVLRRISHPNIVALEDVHESPSHLYLAMELVTGGELFDRIMERGSYTEKDASHLVGQVLGAVSYLHSLGIVHRDLKPENLLYATPFEDSKIMVSDFGLSKIQAGNMLGTACGTPGYVAPELLEQKPYGKAVDVWALGVISYILLCGYPPFYDESDPELFSQI

SEQ ID NO: 58981 - protein, 43 aa, Homo sapiens; identical to SEQ ID NO: 58979

SEQ ID NO: 58982 - protein, 43 aa, Homo sapiens; identical to SEQ ID NO: 58979

SEQ ID NO: 58983 - protein, 86 aa, Homo sapiens
MLLLKKHTEDISSVYEIRERLGSGAFSEVVLAQERGSAHLVALKCIPKKALRGKEALVENEIAVLRRISHPNIVALEDVHESPSHL

SEQ ID NO: 58984 - protein, 81 aa, Homo sapiens
  VARIANT 1: note = MOD_RES - Any amino acid
XISGDTAFDRDILGSVSEQIRKNFARTHWKRAFNATSFLRHIRKLGQIPEGEGASEQGMARHSHSGGPQGLSFLHGCCVLR

SEQ ID NO: 58985 - protein, 226 aa, Homo sapiens
MLLLKKHTEDISSVYEIRERLGSGAFSEVVLAQERGSAHLVALKCIPKKALRGKEALVENEIAVLRRISHPNIVALEDVHESPSHLYLAMELVTGGELFDRIMERGSYTEKDASHLVGQVLGAVSYLHSLGIVHRDLKPENLLYATPFEDSKIMVSDFGLSKIQAGNMLGTACGTPGYVAPELLEQKPYGKAVDVWALGVISYILLCGYPPFYDESDPELFSQILR

SEQ ID NO: 58986 - protein, 426 aa, Homo sapiens
MEAAFGQVAGSACPRRGGEGRDWKAESLADLWPKSSPGDSHRWCKGPGAGPAGPQLREAARASSGLGGGGRHPSRIPAIALQDMLLLKKHTEDISSVYEIRERLGSGAFSEVVLAQERGSAHLVALKCIPKKALRGKEALVENEIAVLRRISHPNIVALEDVHESPSHLYLAMELVTGGELFDRIMERGSYTEKDASHLVGQVLGAVSYLHSLGIVHRDLKPENLLYATPFEDSKIMVSDFGLSKIQAGNMLGTACGTPGYVAPELLEQKPYGKAVDVWALGVISYILLCGYPPFYDESDPELFSQILRASYEFDSPFWDDISESAKDFIRHLLERDPQKRFTCQQALRHLWISGDTAFDRDILGSVSEQIRKNFARTHWKRAFNATSFLRHIRKLGQIPEGEGASEQGMARHSHSGLRAGQPPKW

SEQ ID NO: 58987 - protein, 43 aa, Homo sapiens; identical to SEQ ID NO: 58979

SEQ ID NO: 58988 - protein, 1627 aa, Homo sapiens
MRLWSWVLHLGLLSAALGCGLAERPRRARRDPRAGRPPRPAAGPATCATRAARGRRASPPPPPPPGGAWEAVRVPRRRQQREARGATEEPSPPSRALYFSGRGEQLRLRADLELPRDAFTLQVWLRAEGGQRSPAVITGLYDKCSYISRDRGWVVGIHTISDQDNKDPRYFFSLKTDRARQVTTINAHRSYLPGQWVYLAATYDGQFMKLYVNGAQVATSGEQVGGIFSPLTQKCKVLMLGGSALNHNYRGYIEHFSLWKVARTQREILSDMETHGAHTALPQLLLQENWDNVKHAWSPMKDGSSPKVEFSNAHGFLLDTSLEPPLCGQTLCDNTEVIASYNQLSSFRQPKVVRYRVVNLYEDDHKNPTVTREQVDFQHHQLAEAFKQYNISWELDVLEVSNSSLRRRLILANCDISKIGDENCDPECNHTLTGHDGGDCRHLRHPAFVKKQHNGVCDMDCNYERFNFDGGECCDPEITNVTQTCFDPDSPHRAYLDVNELKNILKLDGSTHLNIFFAKSSEEELAGVATWPWDKEALMHLGGIVLNPSFYGMPGHTHTMIHEIGHSLGLYHVFRGISEIQSCSDPCMETEPSFETGDLCNDTNPAPKHKSCGDPGPGNDTCGFHSFFNTPYNNFMSYADDDCTDSFTPNQVARMHCYLDLVYQGWQPSRKPAPVALAPQVLGHTTDSVTLEWFPPIDGHFFERELGSACHLCLEGRILVQYASNASSPMPCSPSGHWSPREAEGHPDVEQPCKSSVRTWSPNSAVNPHTVPPACPEPQGCYLELEFLYPLVPESLTIWVTFVSTDWDSSGAVNDIKLLAVSGKNISLGPQNVFCDVPLTIRLWDVGEEVYGIQIYTLDEHLEIDAAMLTSTADTPLCLQCKPLKYKVVRDPPLQMDVASILHLNRKFVDMDLNLGSVYQYWVITISGTEESEPSPAVTYIHGSGYCGDGIIQKDQGEQCDDMNKINGDGCSLFCRQEVSFNCIDEPSRCYFHDGDGVCEEFEQKTSIKDCGVYTPQGFLDQWASNASVSHQDQQCPGWVIIGQPAASQVCRTKVIDLSEGISQHAWYPCTISYPYSQLAQTTFWLRAYFSQPMVAAAVIVHLVTDGTYYGDQKQETISVQLLDTKDQSHDLGLHVLSCRNNPLIIPVVHDLSQPFYHSQAVRVSFSSPLVAISGVALRSFDNFDPVTLSSCQRGETYSPAEQSCVHFACEKTDCPELAVENASLNCSSSDRYHGAQCTVSCRTGYVLQIRRDDELIKSQTGPSVTVTCTEGKWNKQVACEPVDCSIPDHHQVYAASFSCPEGTTFGSQCSFQCRHPAQLKGNNSLLTCMEDGLWSFPEALCELMCLAPPPVPNADLQTARCRENKHKVGSFCKYKCKPGYHVPGSSRKSKKRAFKTQCTQDGSWQEGACVPVTCDPPPPKFHGLYQCTNGFQFNSECRIKCEDSDASQGLGSNVIHCRKDGTWNGSFHVCQEMQGQCSVPNELNSNLKLQCPDGYAIGSECATSCLDHNSESIILPMNVTVRDIPHWLNPTRVERVVCTAGLKWYPHPALIHCVKGCEPFMGDNYCDAINNRAFCNYDGGDCCTSTVKTKKVTPFPMSCDLQGDCACRDPQAQEHSRKDLRGYSHG

SEQ ID NO: 58989 - protein, 566 aa, Homo sapiens
MDCNYERFNFDGGECCDPEITNVTQTCFDPDSPHRAYLDVNELKNILKLDGSTHLNIFFAKSSEEELAGVATWPWDKEALMHLDDDCTDSFTPNQVARMHCYLDLVYQGWQPSRKPAPVALAPQVLGHTTDSVTLEWFPPIDGHFFERELGSACHLCLEGRILVQYASNASSPMPCSPSGHWSPREAEGHPDVEQPCKSSVRTWSPNSAVNPHTVPPACPEPQGCYLELEFLYPLVPESLTIWVTFVSTDWDSSGAVNDIKLLAVSGKNISLGPQNVFCDVPLTIRLWDVGEEVYGIQIYTLDEHLEIDAAMLTSTADTPLCLQCKPLKYKVVRDPPLQMDVASILHLNRKFVDMDLNLGSVYQYWVITISGTEESEPSPAVTYIHGSGYCGDGIIQKDQGEQCDDMNKINGDGCSLFCRQEVSFNCIDEPSRCYFHDGDGVCEEFEQKTSIKDCGVYTPQGFLDQWASNASVSHQDQQCPGWVIIGQPAASQVCRTKVIDLSEGISACLVPLHHQLPIFPAGSDHFLAPGVFFSTNGCRSCHCPPGDGWDILWGPKAGDHQRAAA

SEQ ID NO: 58990 - protein, 665 aa, Homo sapiens [sequence omitted]

SEQ ID NO: 58991 - protein, 1482 aa, Homo sapiens
MRKDRLLHLCLVLLLILLSASDSNSTEPQYMVLVPSLLHTEAPKKGCVLLSHLNETVTVSASLESGRENRSLFTDLVAEKDLFHCVSFTLPRISASSEVAFLSIQIKGPTQDFRKRNTVLVLNTQSLVFVQTDKPMYKPGQTVRFRVVSVDENFRPRNELIPLIYLENPRRNRIAQWQSLKLEAGINQLSFPLSSEPIQGSYRVVVQTESGGRIQHPFTVEEFVLPKFEVKVQVPKIISIMDEKVNITVCGEYTYGKPVPGLATVSLCRKLSRVLNCDKQEVCEEFSQQLNSNGCITQQVHTKMLQITNTGFEMKLRVEARIREEGTDLEVTANRISEITNIVSKLKFVKVDSHFRQGIPFFAQVLLVDGKGVPIPNKLFFISVNDANYYSNATTNEQGLAQFSINTTSISVNKLFVRVFTVHPNLCFHYSWVAEDHQGAQHTANRVFSLSGSYIHLEPVAGTLPCGHTETITAHYTLNRQAMGELSELSFHYLIMAKGVIVRSGTHTLPVESGDMKGSFALSFPVESDVAPIARMFIFAILPDGEVVGDSEKFEIENCLANKVDLSFSPAQSPPASHAHLQVAAAPQSLCALRAVDQSVLLMKPEAELSVSSVYNLLTVKDLTNFPDNVDQQEEEQGHCPRPFFIHNGAIYVPLSSNEADIYSFLKGMGLKVFTNSKIRKPKSCSVIPSVSAGAVGQGYYGAGLGVVERPYVPQLGTYNVIPLNNEQSSGPVPETVRSYFPETWIWELVAVNSSGVAEVGVTVPDTITEWKAGAFCLSEDAGLGISSTASLRAFQPFFVELTMPYSVIRGEVFTLKATVLNYLPKCIRVSVQLKASPAFLASQNTKGEESYCICGNERQTLSWTVTPKTLGNVNFSVSAEAMQSLELCGNEVVEVPEIKRKDTVIKTLLVEAEGIEQEKTFSSMTCASGANVSEQLSLKLPSNVVKESARASFSVLGDILGSAMQNIQNLLQMPYGCGEQNMVLFAPNIYVLNYLNETQQLTQEIKAKAVGYLITGYQRQLNYKHQDGSYSTFGERYGRNQGNTWLTAFVLKTFAQARSYIFIDEAHITQSLTWLSQMQKDNGCFRSSGSLLNNAIKGGVEDEATLSAYVTIALLEIPLPVTNPIVRNALFCLESAWNVAKEGTHGSHVYTKALLAYAFSLLGKQNQNREILNSLDKEAVKEDNLVHWERPQRPKAPVGHLYQTQAPSAEVEMTSYVLLAYLTAQPAPTSGDLTSATNIVKWIMKQQNAQGGFSSTQDTVVALHALSRYGAATFTRTEKTAQVTVQDSQTFSTNFQVDNNNLLLLQQISLPELPGEYVITVTGERCVYLQTSMKYNILPEKEDSPFALKVQTVPQTCDGHKAHTSFQISLTISYTGNRPASNMVIVDVKMVSGFIPLKPTVKMLERSSSVSRTEVSNNHVLIYVEQVTNQTLSFSFMVLQDIPVGDLKPAIVKVYDYYETDESVVAEYIAPCSTDTEHGNV

SEQ ID NO: 58992 - protein, 1268 aa, Homo sapiens
MSESYRRTTFPVRFRVVSVDENFRPRNELIPLIYLENPRRNRIAQWQSLKLEAGINQLSFPLSSEPIQGSYRVVVQTESGGRIQHPFTVEEFVLPKFEVKVQVPKIISIMDEKVNITVCGEYTYGKPVPGLATVSLCRKLSRVLNCDKQEVCEEFSQQLNSNGCITQQVHTKMLQITNTGFEMKLRVEARIREEGTDLEVTANRISEITNIVSKLKFVKVDSHFRQGIPFFAQVLLVDGKGVPIPNKLFFISVNDANYYSNATTNEQGLAQFSINTTSISVNKLFVRVFTVHPNLCFHYSWVAEDHQGAQHTANRVFSLSGSYIHLEPVAGTLPCGHTETITAHYTLNRQAMGELSELSFHYLIMAKGVIVRSGTHTLPVESGDMKGSFALSFPVESDVAPIARMFIFAILPDGEVVGDSEKFEIENCLANKVDLSFSPAQSPPASHAHLQVAAAPQSLCALRAVDQSVLLMKPEAELSVSSVYNLLTVKDLTNFPDNVDQQEEEQGHCPRPFFIHNGAIYVPLSSNEADIYSFLKGMGLKVFTNSKIRKPKSCSVIPSVSAGAVGQGYYGAGLGVVERPYVPQLGTYNVIPLNNEQSSGPVPETVRSYFPETWIWELVAVNSSGVAEVGVTVPDTITEWKAGAFCLSEDAGLGISSTASLRAFQPFFVELTMPYSVIRGEVFTLKATVLNYLPKCIRAEGIEQEKTFSSMTCASGANVSEQLSLKLPSNVVKESARASFSVLGDILGSAMQNIQNLLQMPYGCGEQNMVLFAPNIYVLNYLNETQQLTQEIKAKAVGYLITGYQRQLNYKHQDGSYSTFGERYGRNQGNTWLTAFVLKTFAQARSYIFIDEAHITQSLTWLSQMQKDNGCFRSSGSLLNNAIKGGVEDEATLSAYVTIALLEIPLPVTNPIVRNALFCLESAWNVAKEGTHGSHVYTKALLAYAFSLLGKQNQNREILNSLDKEAVKEDNLVHWERPQRPKAPVGHLYQTQAPSAEVEMTSYVLLAYLTAQPAPTSGDLTSATNIVKWIMKQQNAQGGFSSTQDTVVALHALSRYGAATFTRTEKTAQVTVQDSQTFSTNFQVDNNNLLLLQQISLPELPGEYVITVTGERCVYLQTSMKYNILPEKEDSPFALKVQTVPQTCDGHKAHTSFQISLTISYTGNRPASNMVIVDVKMVSGFIPLKPTVKMLERSSSVSRTEVSNNHVLIYVEQVTNQTLSFSFMVLQDIPVGDLKPAIVKVYDYYETDESVVAEYIAPCSTDTEHGNV

SEQ ID NO: 58993 - protein, 219 aa, Homo sapiens
MVKYFLGQSVLRSSWDQVFAAFWQRYPNPYSKHVLTEDIVHREVTPDQKLLSRRLLTKTNRMPRWAERLFPANVAHSVYVLEDSIVDPQNQTMTTFTWNINHARLMVVEERCVYCVNSDNSGWTEIRREAWVSSSLFGVSRAVQEFGLARFKSNVTKTMKGFEYILAKLQGEAPSKTLVETAKEAKEKAKETALAATEKAKDLASKAATKKQQQQQQFV

SEQ ID NO: 58994 - protein, 589 aa, Homo sapiens
MSSSYWSETSSSSCGTQQLPEVLQCQPQHYHCYHQSSQAQQPPEKNVVYERVRTYSGPMNKVVQALDPFNSREVLSPLKTTSSYQNLVWSDHSQELHSPTLKISTCAPSTLHITQNTEQELHSPTVKLTTYPQTTIRKYVVQNPEQEPLSQFLRGSHFFPGNNVIYEKTIRKVEKLNTDQGCHPQAQCHHHIIQQPQVIHSAHWQQPDSSQQIQAITGNNPISTHIGNELCHSGSSQICEQVIIQDDGPEKLDPRYFGELLADLSRKNTDLYHCLLEHLQRIGGSKQDFESTDESEDIESLIPKGLSEFTKQQIRYILQMRGMSDKSLRLVLSTFSNIREELGHLQNDMTSLENDKMRLEKDLSFKDTQLKEYEELLASVRANNHQQQQGLQDSSSKCQALEENNLSLRHTLSDMEYRLKELEYCKRNLEQENQNLRMQVSETCTGPMLQAKMDEIGNHYTEMVKNLRMEKDREICRLRSQLNQYHKDVSKREGSCSDFQFKLHELTSLLEEKDSLIKRQSEELSKLRQEIYSSHNQPSTGGRTTITTKKYRTQYPILGLLYDDYEYIPPGSETQTIVIEKTEDKYTCP

SEQ ID NO: 58995 - protein, 306 aa, Homo sapiens
MSSSYWSETSSSSCGTQQLPEVLQCQPQHYHCYHQSSQAQQPPEKNVVYERVRTYSGPMNKVVQALDPFNSREVLSPLKTTSSYQNLVWSDHSQELHSPTLKISTCAPSTLHITQNTEQELHSPTVKLTTYPQTTIRKYVVQNPEQEPLSQFLRGSHFFPGNNVIYEKTIRKVEKLNTDQGCHPQAQCHHHIIQQPQVIHSAHWQQPDSSQQIQAITGNNPISTHIGNELCHSGSSQICEQVIIQDDGPEKLDPRYFGELLADLSRKNTDLYHCLLEHLQRIGRKQSLSSTYTIRHGIQTKRTGIL

SEQ ID NO: 58996 - protein, 595 aa, Homo sapiens
MSSSYWSETSSSSCGTQQLPEVLQCQPQHYHCYHQSSQAQQPPEKNVVYERVRTYSGPMNKVVQALDPFNSREVLSPLKTTSSYQNLVWSDHSQELHSPTLKISTCAPSTLHITQNTEQELHSPTVKLTTYPQTTIRKYVVQNPEQEPLSQFLRGSHFFPGNNVIYEKTIRKVEKLNTDQGCHPQAQCHHHIIQQPQVIHSAHWQQPDSSQQIQAITGNNPISTHIGNELCHSGSSQICEQVIIQDDGPEKLDPRYFGELLADLSRKNTDLYHCLLEHLQRIGGSKQDFESTDESEDIESLIPKGLSEFTKQQIRYILQMRGMSDKSLRLVLSTFSNIREELGHLQNDMTSLENDKMRLEKDLSFKDTQLKEYEELLASVRANNHQQQQGLQDSSSKCQALEENNLSLRHTLSDMEYRLKELEYCKRNLEQENQNLRMQVSETCTGPMLQAKMDEIGNHYTEMVKNLRMEKDREICRLRSQLNQYHKDVSKREGSCSDFQFKLHELTSLLEEKDSLIKRQSEELSKLRQEIYSSHNQPSTGGRTTITTKKYRTQYPILGLLYDDYEYIPPGSETQTIVIEKTEDKYTCVSSLGHF

SEQ ID NO: 58997 - protein, 306 aa, Homo sapiens
MASRWWRWRRGCSWKPAARSPGPGSPGRAGPLGPSAAAEVRAQVHRRKGLDLSQIPYINLVKHLTSACPNVCRISRFHHTTPDSKTHSGEKYTDPFKLGWRDLKGLYEDIRKELLISTSELKEMSEYYFDGKGKAFRPIIVALMARACNIHHNNSRHVQASQRAIALIAEMIHTASLVHDDVIDDASSRRGKHTVNKIWGEKKAVLAGDLILSAASIALARIGNTTVISILTQVIEDLVRGEFLQLGSKENENERFAHYLEKTFKKTASLIANSCKAVFPRNECYDHATVQFAWRCRQSSTVCTTE

SEQ ID NO: 58998 - protein, 415 aa, Homo sapiens
MASRWWRWRRGCSWKPAARSPGPGSPGRAGPLGPSAAAEVRAQVHRRKGLDLSQIPYINLVKHLTSACPNVCRISRFHHTTPDSKTHSGEKYTDPFKLGWRDLKGLYEDIRKELLISTSELKEMSEYYFDGKGKAFRPIIVALMARACNIHHNNSRHVQASQRAIALIAEMIHTASLVHDDVIDDASSRRGKHTVNKIWGEKKAVLAGDLILSAASIALARIGNTTVISILTQVIEDLVRGEFLQLGSKENENERFAHYLEKTFKKTASLIANSCKAVSVLGCPDPVVHEIAYQYGKNVGIAFQLIDDVLDFTSCSDQMGKPTSADLKLGLATGPVLFACQQFPEMNAMIMRRFSLPGDVDRARQYVLQSDGVQQTTYLAQQYCHEAIREISKLRPSPERDALIQLSEIVLTRDK

SEQ ID NO: 58999 - protein, 376 aa, Homo sapiens
MPAHVHRRKGLDLSQIPYINLVKHLTSACPNVCRISRFHHTTPDSKTHSGEKYTDPFKLGWRDLKGLYEDIRKELLISTSELKEMSEYYFDGKGKAFRPIIVALMARACNIHHNNSRHVQASQRAIALIAEMIHTASLVHDDVIDDASSRRGKHTVNKIWGEKKAVLAGDLILSAASIALARIGNTTVISILTQVIEDLVRGEFLQLGSKENENERFAHYLEKTFKKTASLIANSCKAVSVLGCPDPVVHEIAYQYGKNVGIAFQLIDDVLDFTSCSDQMGKPTSADLKLGLATGPVLFACQQFPEMNAMIMRRFSLPGDVDRARQYVLQSDGVQQTTYLAQQYCHEAIREISKLRPSPERDALIQLSEIVLTRDK

SEQ ID NO: 59000 - protein, 240 aa, Homo sapiens
MNFRQLLLHLPRYLGASGSPRRLWWSPSLDTISSVGSWRGRSSKSPAHWNQVVSEAEKIVGYPTSFMSLRCLLSDELSNIAMQVRKLVGTQHPLLTTARGLVHDSWNSLQLRGLVVLLISKAAGPSSVNTSCQNYDMVSGIYSCQRSLAEITELIHIALLVHRGIVNLNELQSSDGPLKDMQFGNKIAILSGDFLLANACNGLALLQNTKSFSFNGPIAIYQMGDCESAWILSKHPRALS

SEQ ID NO: 59001 - protein, 89 aa, Homo sapiens
MELAKHDAEVQNMAFQYGKHMAMSHKINSDVQPFIKEKTSDSMTFNLNSAPVVLHQEFLGRDLWIKQIGESSSTEVQLSNFQQMLLSTL

SEQ ID NO: 59002 - protein, 399 aa, Homo sapiens
MNFRQLLLHLPRYLGASGSPRRLWWSPSLDTISSVGSWRGRSSKSPAHWNQVVSEAEKIVGYPTSFMSLRCLLSDELSNIAMQVRKLVGTQHPLLTTARGLVHDSWNSLQLRGLVVLLISKAAGPSSVNTSCQNYDMVSGIYSCQRSLAEITELIHIALLVHRGIVNLNELQSSDGPLKDMQFGNKIAILSGDFLLANACNGLALLQNTKVVELLASALMDLVQGVYHENSTSKESYITDDIGISTWKEQTFLSHGALLAKSCQAAMELAKHDAEVQNMAFQYGKHMAMSHKINSDVQPFIKEKTSDSMTFNLNSAPVVLHQEFLGRDLWIKQIGEAQEKGRLDYAKLRERIKAGKGVTSAIDLCRYHGNKALEALESFPPSEARSALENIVFAVTRFS

SEQ ID NO: 59003 - protein, 80 aa, Homo sapiens
VQNMAFQYGKHMAMSHKINSDVQPFIKEKTSDSMTFNLNSAPVVLHQEFLGRDLWIKQIGESSSTEVQLSNFQQMLLSTL

SEQ ID NO: 59004 - protein, 297 aa, Homo sapiens
MNFRQLLLHLPRYLGASGSPRRLWWSPSLDTISSVGSWRGRSSKSPAHWNQVVSEAEKIVGYPTSFMSLRCLLSDELSNIAMQVRKLVGTQHPLLTTARGLVHDSWNSLQLRGLVVLLISKAAGPSSVNTSCQNYDMVSGIYSCQRSLAEITELIHIALLVHRGIVNLNELQSSDGPLKDMQFGNKIAILSGDFLLANACNGLALLQNTKVVELLASALMDLVQGVYHENSTSKAQEKGRLDYAKLRERIKAGKGVTSAIDLCRYHGNKALEALESFPPSEARSALENIVFAVTRFS

SEQ ID NO: 59005 - protein, 293 aa, Homo sapiens
MGRVVAELVSSLLGLWLLLCSCGCPEGAELRAPPDKIAIIGAGIGGTSAAYYLRQKFGKDVKIDLFEREEVGGRLATMMVQGQEYEAGGSVIHPLNLHMKRFVKDLGLSAVQASGGLLGIYNGETLVFEESNWFIINVIKLVWRYGFQSLRMHMWVEDVLDKFMRIYRYQSHDYAFSSVEKLLHALGGDDFLGMLNRTLLETLQKAGFSEKFLNEMIAPVMRVNYGQSTDINAFVGAVSLSCSDSGLWAVEGGNKLVCSGLLQASKSNLISGSVMYIEEKTKTKYTVLGLCPL

SEQ ID NO: 59006 - protein, 505 aa, Homo sapiens
MGRVVAELVSSLLGLWLLLCSCGCPEGAELRAPPDKIAIIGAGIGGTSAAYYLRQKFGKDVKIDLFEREEVGGRLATMMVQGQEYEAGGSVIHPLNLHMKRFVKDLGLSAVQASGGLLGIYNGETLVFEESNWFIINVIKLVWRYGFQSLRMHMWVEDVLDKFMRIYRYQSHDYAFSSVEKLLHALGGDDFLGMLNRTLLETLQKAGFSEKFLNEMIAPVMRVNYGQSTDINAFVGAVSLSCSDSGLWAVEGGNKLVCSGLLQASKSNLISGSVMYIEEKTKTKYTGNPTKMYEVVYQIGTETRSDFYDIVLVATPLNRKMSNITFLNFDPPIEEFHQYYQHIVTTLVKGELNTSIFSSRPIDKFGLNTVLTTDNSDLFINSIGIVPSVREKEDPEPSTDGTYVWKIFSQETLTKAQILKLFLSYDYAVKKPWLAYPHYKPPEKCPSIILHDRLYYLNGIECAASAMEMSAIAAHNAALLAYHRWNGHTDMIDQDGLYEKLKTEL

SEQ ID NO: 59007 - protein, 428 aa, Homo sapiens
MMVQGQEYEAGGSVIHPLNLHMKRFVKDLGLSAVQASGGLLGIYNGETLVFEESNWFIINVIKLVWRYGFQSLRMHMWVEDVLDKFMRIYRYQSHDYAFSSVEKLLHALGGDDFLGMLNRTLLETLQKAGFSEKFLNEMIAPVMRVNYGQSTDINAFVGAVSLSCSDSGLWAVEGGNKLVCSGLLQASKSNLISGSVMYIEEKTKTKYTGNPTKMYEVVYQIGTETRSDFYDIVLVATPLNRKMSNITFLNFDPPIEEFHQYYQHIVTTLVKGELNTSIFSSRPIDKFGLNTVLTTDNSDLFINSIGIVPSVREKEDPEPSTDGTYVWKIFSQETLTKAQILKLFLSYDYAVKKPWLAYPHYKPPEKCPSIILHDRLYYLNGIECAASAMEMSAIAAHNAALLAYHRWNGHTDMIDQDGLYEKLKTEL

SEQ ID NO: 59008 - protein, 427 aa, Homo sapiens
MVQGQEYEAGGSVIHPLNLHMKRFVKDLGLSAVQASGGLLGIYNGETLVFEESNWFIINVIKLVWRYGFQSLRMHMWVEDVLDKFMRIYRYQSHDYAFSSVEKLLHALGGDDFLGMLNRTLLETLQKAGFSEKFLNEMIAPVMRVNYGQSTDINAFVGAVSLSCSDSGLWAVEGGNKLVCSGLLQASKSNLISGSVMYIEEKTKTKYTGNPTKMYEVVYQIGTETRSDFYDIVLVATPLNRKMSNITFLNFDPPIEEFHQYYQHIVTTLVKGELNTSIFSSRPIDKFGLNTVLTTDNSDLFINSIGIVPSVREKEDPEPSTDGTYVWKIFSQETLTKAQILKLFLSYDYAVKKPWLAYPHYKPPEKCPSIILHDRLYYLNGIECAASAMEMSAIAAHNAALLAYHRWNGHTDMIDQDGLYEKLKTEL

SEQ ID NO: 59009 - protein, 494 aa, Homo sapiens
MARAAPLLAALTALLAAAAAGGDAPPGKIAVVGAGIGGSAVAHFLQQHFGPRVQIDVYEKGTVGGRLATISVNKQHYESGAASFHSLSLHMQDFVKLLGLRHRREVVGRSAIFGGEHFMLEETDWYLLNLFRLWWHYGISFLRLQMWVEEVMEKFMRIYKYQAHGYAFSGVEELLYSLGESTFVNMTQHSVAESLLQVGVTQRFIDDVVSAVLRASYGQSAAMPAFAGAMSLAGAQGSLWSVEGGNKLVCSGLLKLTKANVIHATVTSVTLHSTEGKALYQVAYENEVGNSSDFYDIVVIATPLHLDNSSSNLTFAGFHPPIDDVQGSFQPTVVSLVHGYLNSSYFGFPDPKLFPFANILTTDFPSFFCTLDNICPVNISASFRRKQPQEAAVWRVQSPKPLFRTQLKTLFRSYYSVQTAEWQAHPLYGSRPTLPRFALHDQLFYLNALEWAASSVEVMAVAAKNVALLAYNRWYQDLDKIDQKDLMHKVKTEL

SEQ ID NO: 59010 - protein, 176 aa, Homo sapiens
MKVLLCDLLLLSLFSSVFSSCQRDCLTCQEKLHPALDSFDLEVCILECEEKVFPSPLWTPCTKVMARSSWQLSPAAPEHVAAALYQPRASEMQHLRRMPRVRSLFQEQEEPEPGMEEAGEMEQKQLQKRFGGFTGARKSARKLANQKRFSEFMRQYLVLSMQSSQRRRTLHQNGNV

SEQ ID NO: 59011 - protein, 154 aa, Homo sapiens
MKVLLCDLLLLSLFSSVFSSCQRDCLTCQEKLHPALDSFDLEVCILECEEKVFPSPLWTPCTKVMARSSWQLSPAAPEHVAAALYQPRASEMQHLRRMPRVRSLFQEQEEPEPGMEEAGEMEQKQLQKRFGGFTGARKSARKLANQKRFSEFMR

SEQ ID NO: 59012 - protein, 409 aa, Homo sapiens
MTELPAPLSYFQNAQMSEDNHLSNTVRSQNDNRERQEHNDRRSLGHPEPLSNGRPQGNSRQVVEQDEEEDEELTLKYGAKHVIMLFVPVTLCMVVVVATIKSVSFYTRKDGQLIYTPFTEDTETVGQRALHSILNAAIMISVIVVMTILLVVLYKYRCYKVIHAWLIISSLLLLFFFSFIYLGEVFKTYNVAVDYITVALLIWNFGVVGMISIHWKGPLRLQQAYLIMISALMALVFIKYLPEWTAWLILAVISVYDLVAVLCPKGPLRMLVETAQERNETLFPALIYSSTMVWLVNMAEGDPEAQRRVSKNSKYNAERGVKLGLGDFIFYSVLVGKASATASGDWNTTIACFVAILIGLCLTLLLLAIFKKALPALPISITFGLVFYFATDYLVQPFMDQLAFHQFYI

SEQ ID NO: 59013 - protein, 467 aa, Homo sapiens
MTELPAPLSYFQNAQMSEDNHLSNTVRSQNDNRERQEHNDRRSLGHPEPLSNGRPQGNSRQVVEQDEEEDEELTLKYGAKHVIMLFVPVTLCMVVVVATIKSVSFYTRKDGQLIYTPFTEDTETVGQRALHSILNAAIMISVIVVMTILLVVLYKYRCYKVIHAWLIISSLLLLFFFSFIYLGEVFKTYNVAVDYITVALLIWNFGVVGMISIHWKGPLRLQQAYLIMISALMALVFIKYLPEWTAWLILAVISVYDLVAVLCPKGPLRMLVETAQERNETLFPALIYSSTMVWLVNMAEGDPEAQRRVSKNSKYNAESTERESQDTVAENDDGGFSEEWEAQRDSHLGPHRSTPESRAAVQELSSSILAGEDPEERGVKLGLGDFIFYSVLVGKASATASGDWNTTIACFVAILIGLCLTLLLLAIFKKALPALPISITFGLVFYFATDYLVQPFMDQLAFHQFYI

SEQ ID NO: 59014 - protein, 378 aa, Homo sapiens
MTELPAPLSYFQNAQMSEDNHLSNTVRSQNDNRERQEHNDRRSLGHPEPLSNGRPQGNSRQVVEQDEEEDEELTLKYGAKHVIMLFVPVTLCMVVVVATIKSVSFYTRKDGQLIYTPFTEDTETVGQRALHSILNAAIMISVIVVMTILLVVLYKYRCYKVIHAWLIISSLLLLFFFSFIYLGEVFKTYNVAVDYITVALLIWNFGVVGMISIHWKGPLRLQQAYLIMISALMALVFIKYLPEWTAWLILAVISVYDLVAVLCPKGPLRMLVETAQERNETLFPALIYSSTMVWLVNMAEGDPEAQRRVSKNSKYNAERACLPPAAINLLSIAPMAPRLFMPKGACRPTAQKGSHKTLLQRMMMAGSVRNGKPRGTVI

SEQ ID NO: 59015 - protein, 463 aa, Homo sapiens
MTELPAPLSYFQNAQMSEDNHLSNTNDNRERQEHNDRRSLGHPEPLSNGRPQGNSRQVVEQDEEEDEELTLKYGAKHVIMLFVPVTLCMVVVVATIKSVSFYTRKDGQLIYTPFTEDTETVGQRALHSILNAAIMISVIVVMTILLVVLYKYRCYKVIHAWLIISSLLLLFFFSFIYLGEVFKTYNVAVDYITVALLIWNFGVVGMISIHWKGPLRLQQAYLIMISALMALVFIKYLPEWTAWLILAVISVYDLVAVLCPKGPLRMLVETAQERNETLFPALIYSSTMVWLVNMAEGDPEAQRRVSKNSKYNAESTERESQDTVAENDDGGFSEEWEAQRDSHLGPHRSTPESRAAVQELSSSILAGEDPEERGVKLGLGDFIFYSVLVGKASATASGDWNTTIACFVAILIGLCLTLLLLAIFKKALPALPISITFGLVFYFATDYLVQPFMDQLAFHQFYI

SEQ ID NO: 59016 - protein, 184 aa, Homo sapiens
MTELPAPLSYFQNAQMSEDNHLSNTVRSQNDNRERQEHNDRRSLGHPEPLSNGRPQGNSRQVVEQDEEEDEELTLKYGAKHVIMLFVPVTLCMVVVVATIKSVSFYTRKDGQLIYTPFTEDTETVGQRALHSILNAAIMISVIVVMTILLVVLYKYRCYKVSMRHRSLLSTLFFLWLGILVTVT

SEQ ID NO: 59017 - protein, 463 aa, Homo sapiens; identical to SEQ ID NO: 59015

SEQ ID NO: 59018 - protein, 92 aa, Homo sapiens
MTELPAPLSYFQNAQMSEDNHLSNTNDNRERQEHNDRRSLGHPEPLSNGRPQGNSRQVVEQDEEEDEELTLKYGAKHVIMLFVPVTLCMVVV

SEQ ID NO: 59019 - protein, 147 aa, Homo sapiens
MTELPAPLSYFQNAQMSEDNHLSNTNDNRERQEHNDRRSLGHPEPLSNGRPQGNSRQVVEQDEEEDEELTLKYGAKHVIMLFVPVTLCMVVVVATIKSVSFYTRKDGQLIYTPFTEDTETVGQRALHSILNAAIMISVIVVMTILLV

SEQ ID NO: 59020 - protein, 109 aa, Homo sapiens
MTELPAPLSYFQNAQMSEDNHLSNTVRSQNDNRERQEHNDRRSLGHPEPLSNGRPQGNSRQVVEQDEEEDEELTLKYGAKHVIMLFVPVTLCMVVVVATIKSVSFYTRK

SEQ ID NO: 59021 - protein, 155 aa, Homo sapiens
MTELPAPLSYFQNAQMSEDNHLSNTVRSQNDNRERQEHNDRRSLGHPEPLSNGRPQGNSRQVVEQDEEEDEELTLKYGAKHVIMLFVPVTLCMVVVVATIKSVSFYTRKDGQLIYTPFTEDTETVGQRALHSILNAAIMISVIVVMTILLVVLYK

SEQ ID NO: 59022 - protein, 58 aa, Homo sapiens
MTELPAPLSYFQNAQMSEDNHLSNTNDNRERQEHNDRRSLGHPEPLSNGRPQGNSRQV

SEQ ID NO: 59023 - protein, 92 aa, Homo sapiens; identical to SEQ ID NO: 59018

SEQ ID NO: 59024 - protein, 63 aa, Homo sapiens
MTELPAPLSYFQNAQMSEDNHLSNTNDNRERQEHNDRRSLGHPEPLSNGRPQGNSRQVVEQDE

SEQ ID NO: 59025 - protein, 91 aa, Homo sapiens
MTELPAPLSYFQNAQMSEDNHLSNTNDNRERQEHNDRRSLGHPEPLSNGRPQGNSRQVVEQDEEEDEELTLKYGAKHVIMLFVPVTLCMVV

SEQ ID NO: 59026 - protein, 62 aa, Homo sapiens
MTELPAPLSYFQNAQMSEDNHLSNTNDNRERQEHNDRRSLGHPEPLSNGRPQGNSRQVVEQD

SEQ ID NO: 59027 - protein, 99 aa, Homo sapiens
MTELPAPLSYFQNAQMSEDNHLSNTVRSQNDNRERQEHNDRRSLGHPEPLSNGRPQGNSRQVVEQDEEEDEELTLKYGAKHVIMLFVPVTLCMVVVVAT

SEQ ID NO: 59028 - protein, 135 aa, Homo sapiens
MTELPAPLSYFQNAQMSEDNHLSNTNDNRERQEHNDRRSLGHPEPLSNGRPQGNSRQVVEQDEEEDEELTLKYGAKHVIMLFVPVTLCMVVVVATIKSVSFYTRKDGQLIYTPFTEDTETVGQRALHSILNAAIM

SEQ ID NO: 59029 - protein, 109 aa, Homo sapiens
MTELPAPLSYFQNAQMSEDNHLSNTNDNRERQEHNDRRSLGHPEPLSNGRPQGNSRQVVEQDEEEDEELTLKYGAKHVIMLFVPVTLCMVVVVATIKSVSFYTRKDGQL

SEQ ID NO: 59030 - protein, 415 aa, Homo sapiens
MLTFMASDSEEEVCDERTSLMSAESPTPRSCQEGRQGPEDGENTAQWRSQENEEDGEEDPDRYVCSGVPGRPPGLEEELTLKYGAKHVIMLFVPVTLCMIVVVATIKSVRFYTEKNGQLIYTPFTEDTPSVGQRLLNSVLNTLIMISVIVVMTIFLVVLYKYRCYKFIHGWLIMSSLMLLFLFTYIYLGEVLKTYNVAMDYPTLLLTVWNFGAVGMVCIHWKGPLVLQQAYLIMISALMALVFIKYLPEWSAWVILGAISVYAAMVWTVGMAKLDPSSQGALQLPYDPEMEEDSYDSFGEPSYPEVFEPPLTGYPGEELEEEEERGVKLGLGDFIFYSVLVGKAAATGSGDWNTTLACFVAILIGLCLTLLLLAVFKKALPALPISITFGLIFYFSTDNLVRPFMDTLASHQLYI

SEQ ID NO: 59031 - protein, 481 aa, Homo sapiens
MLAGTVRFARHCLKFFPAQKPACVDFGASRGRAMLTFMASDSEEEVCDERTSLMSAESPTPRSCQEGRQGPEDGENTAQWRSQENEEDGEEDPDRYVCSGVPGRPPGLEEELTLKYGAKHVIMLFVPVTLCMIVVVATIKSVRFYTEKNGQLIYTPFTEDTPSVGQRLLNSVLNTLIMISVIVVMTIFLVVLYKYRCYKFIHGWLIMSSLMLLFLFTYIYLGEVLKTYNVAMDYPTLLLTVWNFGAVGMVCIHWKGPLVLQQAYLIMISALMALVFIKYLPEWSAWVILGAISVYDLVAVLCPKGPLRMLVETAQERNEPIFPALIYSSAMVWTVGMAKLDPSSQGALQLPYDPEMEEDSYDSFGEPSYPEVFEPPLTGYPGEELEEEEERGVKLGLGDFIFYSVLVGKAAATGSGDWNTTLACFVAILIGLCLTLLLLAVFKKALPALPISITFGLIFYFSTDNLVRPFMDTLASHQLYI

SEQ ID NO: 59032 - protein, 448 aa, Homo sapiens
MLTFMASDSEEEVCDERTSLMSAESPTPRSCQEGRQGPEDGENTAQWRSQENEEDGEEDPDRYVCSGVPGRPPGLEEELTLKYGAKHVIMLFVPVTLCMIVVVATIKSVRFYTEKNGQLIYTPFTEDTPSVGQRLLNSVLNTLIMISVIVVMTIFLVVLYKYRCYKFIHGWLIMSSLMLLFLFTYIYLGEVLKTYNVAMDYPTLLLTVWNFGAVGMVCIHWKGPLVLQQAYLIMISALMALVFIKYLPEWSAWVILGAISVYDLVAVLCPKGPLRMLVETAQERNEPIFPALIYSSAMVWTVGMAKLDPSSQGALQLPYDPEMEEDSYDSFGEPSYPEVFEPPLTGYPGEELEEEEERGVKLGLGDFIFYSVLVGKAAATGSGDWNTTLACFVAILIGLCLTLLLLAVFKKALPALPISITFGLIFYFSTDNLVRPFMDTLASHQLYI

SEQ ID NO: 59033 - protein, 481 aa, Homo sapiens; identical to SEQ ID NO: 59031

SEQ ID NO: 59034 - protein, 447 aa, Homo sapiens
MLTFMASDSEEEVCDERTSLMSAESPTPRSCQEGRQGPEDGENTAQWRSQENEEDGEEDPDRYVCSGVPGRPPGLEEELTLKYGAKHVIMLFVPVTLCMIVVVATIKSVRFYTEKNGQLIYTPFTEDTPSVGQRLLNSVLNTLIMISVIVVMTIFLVVLYKYRCYKFIHGWLIMSSLMLLFLFTYIYLGEVLKTYNVAMDYPTLLLTVWNFGAVGMVCIHWKGPLVLQQAYLIMISALMALVFIKYLPEWSAWVILGAISVYDLVAVLCPKGPLRMLVETAQERNEPIFPALIYSSAMVWTVGMAKLDPSSQGALQLPYDPEMEDSYDSFGEPSYPEVFEPPLTGYPGEELEEEEERGVKLGLGDFIFYSVLVGKAAATGSGDWNTTLACFVAILIGLCLTLLLLAVFKKALPALPISITFGLIFYFSTDNLVRPFMDTLASHQLYI

SEQ ID NO: 59035 - protein, 129 aa, Homo sapiens
MLTFMASDSEEEVCDERTSLMSAESPTPRSCQEGRQGPEDGENTAQWRSQENEEDGEEDPDRYVCSGVPGRPPGLEEELTLKYGAKHVIMLFVPVTLCMIVVVATIKSVRFYTEKNGQLIYTPFTEDTP

SEQ ID NO: 59036 - protein, 21 aa, Homo sapiens
MLTFMASDSEEEVCDERTSLM

SEQ ID NO: 59037 - protein, 329 aa, Homo sapiens
MAWRGWAQRGWGCGQAWGASVGGRSCEELTAVLTPPQLLGRRFNFFIQQKCGFRKAPRKVEPRRSDPGTSGEAYKRSALIPPVEETVFYPSPYPIRSLIKPLFFTVGFTGCAFGSAAIWQYESLKSRVQSYFDGIKADWLDSIRPQKEGDFRKEINKWWNNLSDGQRTVTGIIAANVLVFCLWRVPSLQRTMIRYFTSNPASSVISNFVSYVGKVATGRYGPSLGASGAIMTVLAAVCTKIPEGRLAIIFLPMFTFTAGNALKAIIAMDTAGMILGWKFFDHAAHLGGALFGIWYVTYGHELIWKNREPLVKIWHEIRTNGPKKGGGSK

SEQ ID NO: 59038 - protein, 379 aa, Homo sapiens
MAWRGWAQRGWGCGQAWGASVGGRSCEELTAVLTPPQLLGRRFNFFIQQKCGFRKAPRKVEPRRSDPGTSGEAYKRSALIPPVEETVFYPSPYPIRSLIKPLFFTVGFTGCAFGSAAIWQYESLKSRVQSYFDGIKADWLDSIRPQKEGDFRKEINKWWNNLSDGQRTVTGIIAANVLVFCLWRVPSLQRTMIRYFTSNPASKVLCSPMLLSTFSHFSLFHMAANMYVLWSFSSSIVNILGQEQFMAVYLSAGVISNFVSYVGKVATGRYGPSLGASGAIMTVLAAVCTKIPEGRLAIIFLPMFTFTAGNALKAIIAMDTAGMILGWKFFDHAAHLGGALFGIWYVTYGHELIWKNREPLVKIWHEIRTNGPKKGGGSK

SEQ ID NO: 59039 - protein, 101 aa, Homo sapiens
MNLERVSNEEKLNLCRKYYLGGFAFLPFLWLVNIFWFFREAFLVPAYTEQSQIKGYVWRSAVGFLFWVIVLTSWITIFQIYRPRWGALGDYLSFTIPLGTP

SEQ ID NO: 59040 - protein, 101 aa, Homo sapiens; identical to SEQ ID NO: 59039

SEQ ID NO: 59041 - protein, 125 aa, Homo sapiens
MAKYLAQIIVMGVQVVGRAFARALRQEFAASRAAADARGRAGHRSAAASNLSGLSLQEAQQILNVSKLSPEEVQKNYEHLFKVNDKSVGGSFYLQSKVVRAKERLDEELKIQAQEDREKGQMPHT

SEQ ID NO: 59042 - protein, 831 aa, Homo sapiens
MPLEMEPKMSKLAFGCQRSSTSDDDSGCALEEYAWVPPGLRPEQIQLYFACLPEEKVPYVNSPGEKHRIKQLLYQLPPHDNEVRYCQSLSEEEKKELQVFSAQRKKEALGRGTIKLLSRAVMHAVCEQCGLKINGGEVAVFASRAGPGVCWHPSCFVCFTCNELLVDLIYFYQDGKIHCGRHHAELLKPRCSACDEIIFADECTEAEGRHWHMKHFCCLECETVLGGQRYIMKDGRPFCCGCFESLYAEYCETCGEHIGVDHAQMTYDGQHWHATEACFSCAQCKASLLGCPFLPKQGQIYCSKTCSLGEDVHASDSSDSAFQSARSRDSRRSVRMGKSSRSADQCRQSLLLSPALNYKFPGLSGNADDTLSRKLDDLSLSRQGTSFASEEFWKGRVEQETPEDPEEWADHEDYMTQLLLKFGDKSLFQPQPNEMDIRASEHWISDNMVKSKTELKQNNQSLASKKYQSDMYWAQSQDGLGDSAYGSHPGPASSRRLQELELDHGASGYNHDETQWYEDSLECLSDLKPEQSVRDSMDSLALSNITGASVDGENKPRPSLYSLQNFEEMETEDCEKMSNMGTLNSSMLHRSAESLKSLSSELCPEKILPEEKPVHLPVLRRSKSQSRPQQVKFSDDVIDNGNYDIEIRQPPMSERTRRRVYNFEERGSRSHHHRRRRSRKSRSDNALNLVTERKYSPKDRLRLYTPDNYEKFIQNKSAREIQAYIQNADLYGQYAHATSDYGLQNPGMNRFLGLYGEDDDSWCSSSSSSSDSEEEGYFLGQPIPQPRPQRFAYYTDDLSSPPSALPTPQFGQRTTKSKKKKGHKGKNCIIS

SEQ ID NO: 59043 - protein, 831 aa, Homo sapiens; identical to SEQ ID NO: 59042

SEQ ID NO: 59044 - protein, 831 aa, Homo sapiens; identical to SEQ ID NO: 59042

SEQ ID NO: 59045 - protein, 110 aa, Homo sapiens
MPLEMEPKMSKLAFGCQRSSTSDDDSGCALEEYAWVPPGLRPEQIQLYFACLPEEKVPYVNSPGEKHRIKQLLYQLPPHDNEVRYCQSLSEEEKKELQVFSAQRKKEALG

SEQ ID NO: 59046 - protein, 831 aa, Homo sapiens; identical to SEQ ID NO: 59042

SEQ ID NO: 59047 - protein, 119 aa, Homo sapiens
MPLEMEPKMSKLAFGCQRSSTSDDDSGCALEEYAWVPPGLRPEQIQLYFACLPEEKVPYVNSPGEKHRIKQLLYQLPPHDNEVRYCQSLSEEEKKELQVFSAQRKKEALGRGTIKLLSR

SEQ ID NO: 59048 - protein, 159 aa, Homo sapiens
MPLEMEPKMSKLAFGCQRSSTSDDDSGCALEEYAWVPPGLRPEQIQLYFACLPEEKVPYVNSPGEKHRIKQLLYQLPPHDNEVRYCQSLSEEEKKELQVFSAQRKKEALGRGTIKLLSRAVMHAVCEQCGLKINGGEVAVFASRAGPGVCWHPSCFVCF

SEQ ID NO: 59049 - protein, 831 aa, Homo sapiens; identical to SEQ ID NO: 59042

SEQ ID NO: 59050 - protein, 844 aa, Homo sapiens
MVTVMPLEMEKTISKLMFDFQRNSTSDDDSGCALEEYAWVPPGLKPEQVHQYYSCLPEEKVPYVNSPGEKLRIKQLLHQLPPHDNEVRYCNSLDEEEKRELKLFSSQRKRENLGRGNVRPFPVTMTGAICEQCGGQINGGDIAVFASRAGHGVCWHPPCFVCTVCNELLVDLIYFYQDGKIYCGRHHAECLKPRCAACDEIIFADECTEAEGRHWHMKHFCCFECETVLGGQRYIMKEGRPYCCHCFESLYAEYCDTCAQHIGIDQGQMTYDGQHWHATETCFCCAHCKKSLLGRPFLPKQGQIFCSRACSAGEDPNGSDSSDSAFQNARAKESRRSAKIGKNKGKTEEPMLNQHSQLQVSSNRLSADVDPLSLQMDMLSLSSQTPSLNRDPIWRSREEPYHYGNKMEQNQTQSPLQLLSQCNIRTSYSPGGQGAGAQPEMWGKHFSNPKRSSSLAMTGHAGSFIKECREDYYPGRLRSQESYSDMSSQSFSETRGSIQVPKYEEEEEEEGGLSTQQCRTRHPISSLKYTEDMTPTEQTPRGSMESLALSNATGLSADGGAKRQEHLSRFSMPDLSKDSGMNVSEKLSNMGTLNSSMQFRSAESVRSLLSAQQYQEMEGNLHQLSNPIGYRDLQSHGRMHQSFDFDGGMAGSKLPGQEGVRIQPMSERTRRRATSRDDNRRFRPHRSRRSRRSRSDNALHLASEREAISRLKDRPPLRAREDYDQFMRQRSFQESMGHGSRRDLYGQCPRTVSDLALQNAFGDRWGPYFAEYDWCSTCSSSSESDNEGYFLGEPIPQPARLRYVTSDELLHKYSSYGLPKSSTLGGRGQLHSRKRQKSKNCIIS

SEQ ID NO: 59051 - protein, 150 aa, Homo sapiens
MVTVMPLEMEKTISKLMFDFQRNSTSDDDSGCALEEYAWVPPGLKPEQVHQYYSCLPEEKVPYVNSPGEKLRIKQLLHQLPPHDNEVRYCNSLDEEEKRELKLFSSQRKRENLGRGNVRPFPVTMTGAICEQCGGQINGGDIAVFASRAG

SEQ ID NO: 59052 - protein, 420 aa, Homo sapiens
METFDPTELPELLKLYYRRLFPYSQYYRWLNYGGVIKNYFQHREFSFTLKDDIYIRYQSFNNQSDLEKEMQKMNPYKIDIGAVYSHRPNQHNTVKLGAFQAQEKELVFDIDMTDYDDVRRCCSSADICPKCWTLMTMAIRIIDRALKEDFGFKHRLWVYSGRRGVHCWVCDESVRKLSSAVRSGIVEYLSLVKGGQDVKKKVHLSEKIHPFIRKSINIIKKYFEEYALVNQDILENKESWDKILALVPETIHDELQQSFQKSHNSLQRWEHLKKVASRYQNNIKNDKYGPWLEWEIMLQYCFPRLDINVSKGINHLLKSPFSVHPKTGRISVPIDLQKVDQFDPFTVPTISFICRELDAISTNEEEKEENEAESDVKHRTRDYKKTSLAPYVKVFEHFLENLDKSRKGELLKKSDLQKDF

SEQ ID NO: 59053 - protein, 427 aa, Homo sapiens
METFDPTELPELLKLYYRRLFPYSQYYRWLNYGGVIKNYFQHREFSFTLKDDIYIRYQSFNNQSDLEKEMQKMNPYKIDIGAVYSHRPNQHNTVKLGAFQAQEKELVFDIDMTDYDDVRRCCSSADICPKCWTLMTMAIRIIDRALKGKDFGFKHRLWVYSGRRGVHCWVCDESVRKLSSAVRSGIVEYLSLVKGGQDVKKKVHLSEKIHPFIRKSINIIKKYFEEYALVNQDILENKESWDKILALMGLFLNDPSPIHDELQQSFQKSHNSLQRWEHLKKVASRYQNNIKNDKYGPWLEWEIMLQYCFPRLDINVSKGINHLLKSPFSVHPKTGRISVPIDLQKVDQFDPFTVPTISFICRELDAISTNEEEKEENEAESDVKHRTRDYKKTSLAPYVKVFEHFLENLDKSRKGELLKKSDLQKDF

SEQ ID NO: 59054 - protein, 253 aa, Homo sapiens
MANLGCWMLVLFVATWSDLGLCKKRPKPGGWNTGGSRYPGQGSPGGNRYPPQGGGGWGQPHGGGWGQPHGGGWGQPHGGGWGQPHGGGWGQGGGTHSQWNKPSKPKTNMKHMAGAAAAGAVVGGLGGYMLGSAMSRPIIHFGSDYEDRYYRENMHRYPNQVYYRPMDEYSNQNNFVHDCVNITIKQHTVTTTTKGENFTETDVKMMERVVEQMCITQYERESQAYYQRGSSMVLFSSPPVILLISFLIFLIVG

SEQ ID NO: 59055 - protein, 249 aa, Homo sapiens
MANLGCWMLVLFVATWSDLGLCKKRPKPGGWNTGGSRYPGQGSPGGNRYPPQGGGGWGQPHGGGWGQPHGGGWGQPHGGGWGQPHGGGWGQGGGTHSQWNKPSKPKTNMKHMAGAAAAGAVVGGLGGYMLGSAMSRPIIHFGSDYEDRYYRENMHRYPNQVYYRPMDEYSNQNNFVHDCVNITIKQHTVTTTTKGENFTETDVKMMERVVEQMCITQYERESQAYYQRGSSMVLFSSPPVILLISFLIF

SEQ ID NO: 59056 - protein, 253 aa, Homo sapiens; identical to SEQ ID NO: 59054

SEQ ID NO: 59057 - protein, 192 aa, Homo sapiens
MEHWGQPHGGGWGQPHGGGWGQPHGGGWGQGGGTHSQWNKPSKPKTNMKHMAGAAAAGAVVGGLGGYMLGSAMSRPIIHFGSDYEDRYYRENMHRYPNQVYYRPMDEYSNQNNFVHDCVNITIKQHTVTTTTKGENFTETDVKMMERVVEQMCITQYERESQAYYQRGSSMVLFSSPPVILLISFLIFLIVG

SEQ ID NO: 59058 - protein, 217 aa, Homo sapiens
MANLGCWMLVLFVATWSDLGLCKKRPKPGGWNTGGSRYPGQGSPGGNRYPPQGGGGWGQPHGGGWGQPHGGGWGQPHGGGWGQPHGGGWGQGGGTHSQWNKPSKPKTNMKHMAGAAAAGAVVGGLGGYMLGSAMSRPIIHFGSDYEDRYYRENMHRYPNQVYYRPMDEYSNQNNFVHDCVNITIKQHTVTTTTKGENFTETDVKMMERVVEQMCITQ

SEQ ID NO: 59059 - protein, 176 aa, Homo sapiens
MRKHLSWWWLATVCMLLFSHLSAVQTRGIKHRIKWNRKALPSTAQITEAQVAENRPGAFIKQGRKLDIDFGAEGNRYYEANYWQFPDGIHYNGCSEANVTKEAFVTGCINATQAANQGEFQKPDNKLHQQVLWRLVQELCSLKHCEFWLERGAGLRVTMHQPVLLCLLALIWLTVK

SEQ ID NO: 59060 - protein, 340 aa, Homo sapiens
MATGGYRTSSGLGGSTTDFLEEWKAKREKMRAKQNPPGPAPPGGGSSDAAGKPPAGALGTPAAAAANELNNNLPGGAPAAPAVPGPGGVNCAVGSAMLTRAAPGPRRSEDEPPAASASAAPPPQRDEEEPDGVPEKGKSSGPSARKGKGQIEKRKLREKRRSTGVVNIPAAECLDEYEDDEAGQKERKREDAITQQNTIQNEAVNLLDPGSSYLLQEPPRTVSGRYKSTTSVSEEDVSSRYSRTDRSGFPRYNRDANVSGTLVSSSTLEKKIEDLEKEVVRERQENLRLVRLMQDKEEMIGKLKEEIDLLNRDLDDIEDENEQLKQENKTLLKVVGQLTR

SEQ ID NO: 59061 - protein, 76 aa, Homo sapiens
MATGGYRTSSGLGGSTTDFLEEWKAKREKMRAKQNPPGPAPPGGGSSDAAGKPPAGALGTPAAAAANELNNNLPGG

SEQ ID NO: 59062 - protein, 64 aa, Homo sapiens
MATGGYRTSSGLGGSTTDFLEEWKAKREKMRAKQNPPGPAPPGGGSSDAAGKPPAGALGTPAAA

SEQ ID NO: 59063 - protein, 220 aa, Homo sapiens
MKSVIYHALSQKEANDSDVQPSGAQRAEAFVRAFLKRSTPRMSPQAREDQLQRKAVVLEYFTRHKRKEKKKKAKGLSARQRRELRLFDIKPEQQRYSLFLPLHELWKQYIRDLCSGLKPDTQPQMIQAKLLKADLHGAIISVTKSKCPSYVGITGILLQETKHIFKIITKEDRLKVIPKLNCVFTVETDGFISYIYGSKFQLRSSERSAKKFKAKGTIDL

SEQ ID NO: 59064 - protein, 220 aa, Homo sapiens; identical to SEQ ID NO: 59063

SEQ ID NO: 59065 - protein, 139 aa, Homo sapiens
MHCLRKRRMTPMSRYSLFLPLHELWKQYIRDLCSGLKPDTQPQMIQAKLLKADLHGAIISVTKSKCPSYVGITGILLQETKHIFKIITKEDRLKVIPKLNCVFTVETDGFISYIYGSKFQLRSSERSAKKFKAKGTIDL

SEQ ID NO: 59066 - protein, 113 aa, Homo sapiens
MVRFKHRYLLCELVSDDPRCRLSLDDRVLSSLVRDTIARVHGTFGAAACSIGFAGTIRTCQKFLIQYNRRQLLILLQNCTDEGEREAIQKSVTRSCLLEEEEESGEEAAEAME

SEQ ID NO: 59067 - protein, 163 aa, Homo sapiens
MVRFKHRYLLCELVSDDPRCRLSLDDRVLSSLVRDTIARVHGTFGAAACSIGFAVRYLNAYTGIVLLRCRKEFYQLVWSALPFITYLENKGHRYPCFFNTLHVGGTIRTCQKFLIQYNRRQLLILLQNCTDEGEREAIQKSVTRSCLLEEEEESGEEAAEAME

SEQ ID NO: 59068 - protein, 140 aa, Homo sapiens
MAENREPRGAVEAELDPVEYTLRKRLPSRLPRRPNDIYVNMKTDFKAQLARCQKLLDGGARGQNACSEIYIHGLGLAINRAINIALQLQAGSFGSLQVAANTSTVELVDELEPETDTREPLTRIRNNSAIHIRVFRVTPK

SEQ ID NO: 59069 - protein, 137 aa, Homo sapiens
MAENREPRGAVEAELDPVEYTLRKRLPSRLPRRPNDIYVNMKTDFKAQLARCQKLLDGGARGQNACSEIYIHGLGLAINRAINIALQLQAGSFGSLQVAANTSTVELVDELEPETDTREPLTRIRNNSAIHIRVFRV

SEQ ID NO: 59070 - protein, 449 aa, Homo sapiens
MLPAATASLLGPLLTACALLPFAQGQTPNYTRPVFLCGGDVKGESGYVASEGFPNLYPPNKECIWTITVPEGQTVSLSFRVFDLELHPACRYDALEVFAGSGTSGQRLGRFCGTFRPAPLVAPGNQVTLRMTTDEGTGGRGFLLWYSGRATSGTEHQFCGGRLEKAQGTLTTPNWPESDYPPGISCSWHIIAPPDQVIALTFEKFDLEPDTYCRYDSVSVFNGAVSDDSRRLGKFCGDAVPGSISSEGNELLVQFVSDLSVTADGFSASYKTLPRGTAKEGQGPGPKRGTEPKVKLPPKSQPPEKTEESPSAPDAPTCPKQCRRTGTLQSNFCASSLVVTATVKSMVREPGEGLAVTVSLIGAYKTGGLDLPSPPTGASLKFYVPCKQCPPMKKGVSYLLMGQVEENRGPVLPPESFVVLHRPNQDQILTNLSKRKCPSQPVRAAASQD

SEQ ID NO: 59071 - protein, 415 aa, Homo sapiens
MRGANAWAPLCLLLAAATQLSRQQSPERPVFTCGGILTGESGFIGSEGFPGVYPPNSKCTWKITVPEGKVVVLNFRFIDLESDNLCRYDFVDVYNGHANGQRIGRFCGTFRPGALVSSGNKMMVQMISDANTAGNGFMAMFSAAEPNERGDQYCGGLLDRPSGSFKTPNWPDRDYPAGVTCVWHIVAPKNQLIELKFEKFDVERDNYCRYDYVAVFNGGEVNDARRIGKYCGDSPPAPIVSERNELLIQFLSDLSLTADGFIGHYIFRPKKLPTTTEQPVTTTFPVTTGLKPTVALCQQKCRRTGTLEGNYCSSDFVLAGTVITTITRDGSLHATVSIINIYKEGNLAIQQAGKNMSARLTVVCKQCPLLRRGLNYIIMGQVGEDGRGKIMPNSFIMMFKTKNQKLLDALKNKQC

SEQ ID NO: 59072 - protein, 727 aa, Homo sapiens
MRPLLLLALLGWLLLAEAKGDAKPEDNLLVLTVATKETEGFRRFKRSAQFFNYKIQALGLGEDWNVEKGTSAGGGQKVRLLKKALEKHADKEDLVILFADSYDVLFASGPRELLKKFRQARSQVVFSAEELIYPDRRLETKYPVVSDGKRFLGSGGFIGYAPNLSKLVAEWEGQDSDSDQLFYTKIFLDPEKREQINITLDHRCRIFQNLDGALDEVVLKFEMGHVRARNLAYDTLPVLIHGNGPTKLQLNYLGNYIPRFWTFETGCTVCDEGLRSLKGIGDEALPTVLVGVFIEQPTPFVSLFFQRLLRLHYPQKHMRLFIHNHEQHHKAQVEEFLAQHGSEYQSVKLVGPEVRMANADARNMGADLCRQDRSCTYYFSVDADVALTEPNSLRLLIQQNKNVIAPLMTRHGRLWSNFWGALSADGYYARSEDYVDIVQGRRVGVWNVPYISNIYLIKGSALRGELQSSDLFHHSKLDPDMAFCANIRQQDVFMFLTNRHTLGHLLSLDSYRTTHLHNDLWEVFSNPEDWKEKYIHQNYTKALAGKLVETPCPDVYWFPIFTEVACDELVEEMEHFGQWSLGNNKDNRIQGGYENVPTIDIHMNQIGFEREWHKFLLEYIAPMTEKLYPGYYTRAQFDLAFVVRYKPDEQPSLMPHHDASTFTINIALNRVGVDYEGGGCRFLRYNCSIRAPRKGWTLMHPGRLTHYHEGLPTTRGTRYIAVSFVDP

SEQ ID NO: 59073 - protein, 199 aa, Homo sapiens
MRPLLLLALLGWLLLAEAKGDAKPEDNLLVLTVATKETEGFRRFKRSAQFFNYKIQALGLGEDWNVEKGTSAGGGQKVRLLKKALEKHADKEDLVILFADSYDVLFASGPRELLKKFRQARSQVVFSAEELIYPDRRLETKYPVVSDGKRFLGSGGFIGYAPNLSKLVAEWEGQDSDSDQLFYTKIFLDPEKRVSRLHS

SEQ ID NO: 59074 - protein, 774 aa, Homo sapiens
MRPLLLLALLGWLLLAEAKGDAKPEAPCCQEGLRAGGSGSLHLGRDFTVLAGARGSPSPSVSSIPRFWIPGSDNLLVLTVATKETEGFRRFKRSAQFFNYKIQALGLGEDWNVEKGTSAGGGQKVRLLKKALEKHADKEDLVILFADSYDVLFASGPRELLKKFRQARSQVVFSAEELIYPDRRLETKYPVVSDGKRFLGSGGFIGYAPNLSKLVAEWEGQDSDSDQLFYTKIFLDPEKREQINITLDHRCRIFQNLDGALDEVVLKFEMGHVRARNLAYDTLPVLIHGNGPTKLQLNYLGNYIPRFWTFETGCTVCDEGLRSLKGIGDEALPTVLVGVFIEQPTPFVSLFFQRLLRLHYPQKHMRLFIHNHEQHHKAQVEEFLAQHGSEYQSVKLVGPEVRMANADARNMGADLCRQDRSCTYYFSVDADVALTEPNSLRLLIQQNKNVIAPLMTRHGRLWSNFWGALSADGYYARSEDYVDIVQGRRVGVWNVPYISNIYLIKGSALRGELQSSDLFHHSKLDPDMAFCANIRQQDVFMFLTNRHTLGHLLSLDSYRTTHLHNDLWEVFSNPEDWKEKYIHQNYTKALAGKLVETPCPDVYWFPIFTEVACDELVEEMEHFGQWSLGNNKDNRIQGGYENVPTIDIHMNQIGFEREWHKFLLEYIAPMTEKLYPGYYTRAQFDLAFVVRYKPDEQPSLMPHHDASTFTINIALNRVGVDYEGGGCRFLRYNCSIRAPRKGWTLMHPGRLTHYHEGLPTTRGTRYIAVSFVDP

SEQ ID NO: 59075 - protein, 391 aa, Homo sapiens
MRPLLLLALLGWLLLAEAKGDAKPEDNLLVLTVATKETEGFRRFKRSAQFFNYKIQALGLGEDWNVEKGTSAGGGQKVRLLKKALEKHADKEDLVILFADSYDVLFASGPRELLKKFRQARSQVVFSAEELIYPDRRLETKYPVVSDGKRFLLEDVFMFLTNRHTLGHLLSLDSYRTTHLHNDLWEVFSNPEDWKEKYIHQNYTKALAGKLVETPCPDVYWFPIFTEVACDELVEEMEHFGQWSLGNNKDNRIQGGYENVPTIDIHMNQIGFEREWHKFLLEYIAPMTEKLYPGYYTRAQFDLAFVVRYKPDEQPSLMPHHDASTFTINIALNRVGVDYEGGGCRFLRYNCSIRAPRKGWTLMHPGRLTHYHEGLPTTRGTRYIAVSFVDP

SEQ ID NO: 59076 - protein, 283 aa, Homo sapiens
MRPLLLLALLGWLLLAEAKGDAKPEDNLLVLTVATKETEGFRRFKRSAQFFNYKIQALGLGEDWNVEKGTSAGGGQKVRLLKKALEKHADKEDLVILFADSYDVLFASGPRELLKKFRQARSQVVFSAEELIYPDRRLETKYPVVSDGKRFLGSGGFIGYAPNLSKLVAEWEGQDSDSDQLFYTKIFLDPEKREQINITLDHRCRIFQNLDGALVSPWGQGHLPGACYELTASVLTSELSVMPSFPAVVLQLNYLGNYIPRFWTFETGCTVCDEGLRSLKGIG

SEQ ID NO: 59077 - protein, 225 aa, Homo sapiens
MRPLLLLALLGWLLLAEAKGDAKPEAPCCQEGLRAGGSGSLHLGRDFTVLAGARGSPSPSVSSIPRFWIPGSDNLLVLTVATKETEGFRRFKRSAQFFNYKIQALGLGEDWNVEKGTSAGGGQKVRLLKKALEKHADKEDLVILFADSYDVLFASGPRELLKKFRQARSQVVFSAEELIYPDRRLETKYPVVSDGKRFLGSGGFIGYAPNLSKLVAEWEGQDSDS

SEQ ID NO: 59078 - protein, 758 aa, Homo sapiens
MGGCTVKPQLLLLALVLHPWNPCLGADSEKPSSIPTDKLLVITVATKESDGFHRFMQSAKYFNYTVKVLGQGEEWRGGDGINSIGGGQKVRLMKEVMEHYADQDDLVVMFTECFDVIFAGGPEEVLKKFQKANHKVVFAADGILWPDKRLADKYPVVHIGKRYLNSGGFIGYAPYVNRIVQQWNLQDNDDDQLFYTKVYIDPLKREAINITLDHKCKIFQTLNGAVDEVVLKFENGKARAKNTFYETLPVAINGNGPTKILLNYFGNYVPNSWTQDNGCTLCEFDTVDLSAVDVHPNVSIGVFIEQPTPFLPRFLDILLTLDYPKEALKLFIHNKEVYHEKDIKVFFDKAKHEIKTIKIVGPEENLSQAEARNMGMDFCRQDEKCDYYFSVDADVVLTNPRTLKILIEQNRKIIAPLVTRHGKLWSNFWGALSPDGYYARSEDYVDIVQGNRVGVWNVPYMANVYLIKGKTLRSEMNERNYFVRDKLDPDMALCRNAREMTLQREKDSPTPETFQMLSPPKGVFMYISNRHEFGRLLSTANYNTSHYNNDLWQIFENPVDWKEKYINRDYSKIFTENIVEQPCPDVFWFPIFSEKACDELVEEMEHYGKWSGGKHHDSRISGGYENVPTDDIHMKQVDLENVWLHFIREFIAPVTLKVFAGYYTKGFALLNFVVKYSPERQRSLRPHHDASTFTINIALNNVGEDFQGGGCKFLRYNCSIESPRKGWSFMHPGRLTHLHEGLPVKNGTRYIAVSFIDP

SEQ ID NO: 59079 - protein, 737 aa, Homo sapiens
MGGCTVKPQLLLLALVLHPWNPCLGADSEKPSSIPTDKLLVITVATKESDGFHRFMQSAKYFNYTVKVLGQGEEWRGGDGINSIGGGQKVRLMKEVMEHYADQDDLVVMFTECFDVIFAGGPEEVLKKFQKANHKVVFAADGILWPDKRLADKYPVVHIGKRYLNSGGFIGYAPYVNRIVQQWNLQDNDDDQLFYTKVYIDPLKREAINITLDHKCKIFQTLNGAVDEVVLKFENGKARAKNTFYETLPVAINGNGPTKILLNYFGNYVPNSWTQDNGCTLCEFDTVDLSAVDVHPNVSIGVFIEQPTPFLPRFLDILLTLDYPKEALKLFIHNKEVYHEKDIKVFFDKAKHEIKTIKIVGPEENLSQAEARNMGMDFCRQDEKCDYYFSVDADVVLTNPRTLKILIEQNRKIIAPLVTRHGKLWSNFWGALSPDGYYARSEDYVDIVQGNRVGVWNVPYMANVYLIKGKTLRSEMNERNYFVRDKLDPDMALCRNAREMGVFMYISNRHEFGRLLSTANYNTSHYNNDLWQIFENPVDWKEKYINRDYSKIFTENIVEQPCPDVFWFPIFSEKACDELVEEMEHYGKWSGGKHHDSRISGGYENVPTDDIHMKQVDLENVWLHFIREFIAPVTLKVFAGYYTKGFALLNFVVKYSPERQRSLRPHHDASTFTINIALNNVGEDFQGGGCKFLRYNCSIESPRKGWSFMHPGRLTHLHEGLPVKNGTRYIAVSFIDP

SEQ ID NO: 59080 - protein, 418 aa, Homo sapiens
MLENHILHKRIYILTFFSQQIFILCHAHFIFFFTVRDFCRQDEKCDYYFSVDADVVLTNPRTLKILIEQNRKIIAPLVTRHGKLWSNFWGALSPDGYYARSEDYVDIVQGNRVGVWNVPYMANVYLIKGKTLRSEMNERNYFVRDKLDPDMALCRNAREMTLQREKDSPTPETFQMLSPPKGVFMYISNRHEFGRLLSTANYNTSHYNNDLWQIFENPVDWKEKYINRDYSKIFTENIVEQPCPDVFWFPIFSEKACDELVEEMEHYGKWSGGKHHDSRISGGYENVPTDDIHMKQVDLENVWLHFIREFIAPVTLKVFAGYYTKGFALLNFVVKYSPERQRSLRPHHDASTFTINIALNNVGEDFQGGGCKFLRYNCSIESPRKGWSFMHPGRLTHLHEGLPVKNGTRYIAVSFIDP

SEQ ID NO: 59081 - protein, 703 aa, Homo sapiens
MQSAKYFNYTVKVLGQGEEWRGGDGINSIGGGQKVRLMKEVMEHYADQDDLVVMFTECFDVIFAGGPEEVLKKFQKANHKVVFAADGILWPDKRLADKYPVVHIGKRYLNSGGFIGYAPYVNRIVQQWNLQDNDDDQLFYTKVYIDPLKREAINITLDHKCKIFQTLNGAVDEVVLKFENGKARAKNTFYETLPVAINGNGPTKILLNYFGNYVPNSWTQDNGCTLCEFDTVDLSAVDVHPNVSIGVFIEQPTPFLPRFLDILLTLDYPKEALKLFIHNKEVYHEKDIKVFFDKAKHEIKTIKIVGPEENLSQAEARNMGMDFCRQDEKCDYYFSVDADVVLTNPRTLKILIEQNRKIIAPLVTRHGKLWSNFWGALSPDGYYARSEDYVDIVQGNRVGVWNVPYMANVYLIKGKTLRSEMNERNYFVRDKLDPDMALCRNAREMTLQREKDSPTPETFQMLSPPKGVFMYISNRHEFGRLLSTANYNTSHYNNDLWQIFENPVDWKEKYINRDYSKIFTENIVEQPCPDVFWFPIFSEKACDELVEEMEHYGKWSGGKHHDSRISGGYENVPTDDIHMKQVDLENVWLHFIREFIAPVTLKVFAGYYTKGFALLNFVVKYSPERQRSLRPHHDASTFTINIALNNVGEDFQGGGCKFLRYNCSIESPRKGWSFMHPGRLTHLHEGLPVKNGTRYIAVSFIDP

SEQ ID NO: 59082 - protein, 738 aa, Homo sapiens
MTSSGPGPRFLLLLPLLLPPAASASDRPRGRDPVNPEKLLVITVATAETEGYLRFLRSAEFFNYTVRTLGLGEEWRGGDVARTVGGGQKVRWLKKEMEKYADREDMIIMFVDSYDVILAGSPTELLKKFVQSGSRLLFSAESFCWPEWGLAEQYPEVGTGKRFLNSGGFIGFATTIHQIVRQWKYKDDDDDQLFYTRLYLDPGLREKLSLNLDHKSRIFQNLNGALDEVVLKFDRNRVRIRNVAYDTLPIVVHGNGPTKLQLNYLGNYVPNGWTPEGGCGFCNQDRRTLPGGQPPPRVFLAVFVEQPTPFLPRFLQRLLLLDYPPDRVTLFLHNNEVFHEPHIADSWPQLQDHFSAVKLVGPEEALSPGEARDMAMDLCRQDPECEFYFSLDADAVLTNLQTLRILIEENRKVIAPMLSRHGKLWSNFWGALSPDEYYARSEDYVELVQRKRVGVWNVPYISQAYVIRGDTLRMELPQRDVFSGSDTDPDMAFCKSFRDKGIFLHLSNQHEFGRLLATSRYDTEHLHPDLWQIFDNPVDWKEQYIHENYSRALEGEGIVEQPCPDVYWFPLLSEQMCDELVAEMEHYGQWSGGRHEDSRLAGGYENVPTVDIHMKQVGYEDQWLQLLRTYVGPMTESLFPGYHTKARAVMNFVVRYRPDEQPSLRPHHDSSTFTLNVALNHKGLDYEGGGCRFLRYDCVISSPRKGWALLHPGRLTHYHEGLPTTWGTRYIMVSFVDP

SEQ ID NO: 59083 - protein, 76 aa, Homo sapiens
MTSSGPGPRFLLLLPLLLPPAASASDRPRGRDPVNPEKLLVITVATAETEGYLRFLRSAEFFNYTVRTLGLGEEWR

SEQ ID NO: 59084 - protein, 243 aa, Homo sapiens
MEKYADREDMIIMFVDSYDVILAGSPTELLKKFVQSGSRLLFSAESFCWPEWGLAEQYPEVGTGKRFLNSGGFIGFATTIHQIVRQWKYKDDDDDQLFYTRLYLDPGLREKLSLNLDHKSRIFQNLNGALDEVVLKFDRNRVRIRNVAYDTLPIVVHGNGPTKLQLNYLGNYVPNGWTPEGGCGFCNQDRRTLPGGPASPPGVSGRVCGTAYSVSAPLPAAAATPGLSPRQGHPFPAQQRGLP

SEQ ID NO: 59085 - protein, 254 aa, Homo sapiens [sequence omitted]

SEQ ID NO: 59086 - protein, 254 aa, Homo sapiens [sequence omitted]

SEQ ID NO: 59087 - protein, 254 aa, Homo sapiens [sequence omitted]

SEQ ID NO: 59088 - protein, 267 aa, Homo sapiens
MARFLTLCTWLLLLGPGLLATVRAECSQDCATCSYRLVRPADINFLACVMECEGKLPSLKIWETCKELLQLSKPELPQDGTSTLRENSKPEESHLLAKRYGGFMKRYGGFMKKMDELYPMEPEEEANGSEILAKRYGGFMKKDAEEDDSLANSSDLLKELLETGDNRERSHHQDGSDNEEEVSKRYGGFMRGLKRSPQLEDEAKELQKRYGGFMRRVGRPEWWMDYQKRYGGFLKRFAEALPSDEEGESYSKEVPEMEKRYGGFMRF

SEQ ID NO: 59089 - protein, 267 aa, Homo sapiens; identical to SEQ ID NO: 59088

SEQ ID NO: 59090 - protein, 105 aa, Homo sapiens
MARFLTLCTWLLLLGPGLLATVRAECSQDCATCSYRLVRPADINFLACVMECEGKLPSLKIWETCKELLQLSKPELPQDGTSTLRENSKPEESHLLAKRYGGFMK

SEQ ID NO: 59091 - protein, 189 aa, Homo sapiens
MARFLTLCTWLLLLGPGLLATVRAECSQDCATCSYRLVRPADINFLACVMECEGKLPSLKIWETCKELLQLSKPELPQDGTSTLRENSKPEESHLLAKRYGGFMKRYGGFMKKMDELYPMEPEEEANGSEILAKRYGGFMKKDAEEDDSLANSSDLLKELLETGDNRERSHHQDGSDNEEEKKKKKRKE

SEQ ID NO: 59092 - protein, 140 aa, Homo sapiens
MAGWQSYVDNLMCDGCCQEAAIVGYCDAKYVWAATAGGVFQSITPIEIDMIVGKDREGFFTNGLTLGAKKCSVIRDSLYVDGDCTMDIRTKSQGGEPTYNVAVGRAGRVLVFVMGKEGVHGGGLNKKAYSMAKYLRDSGF

SEQ ID NO: 59093 - protein, 140 aa, Homo sapiens
MAGWQSYVDNLMCDGCCQEAAIVGYCDAKYVWAATAGGVFQSITPIEIDMIVGKDREGFFTNGLTLGAKKCSVIRDSLYVDGDCTMDIRTKSQGGEPTYNVAVGRAGRALVIVMGKEGVHGGTLNKKAYELALYLRRSDV

SEQ ID NO: 59094 - protein, 137 aa, Homo sapiens
MGDWKVYISAVLRDQRIDDVAIVGHADNSCVWASRPGGLLAAISPQEVGVLTGPDRHTFLQAGLSVGGRRCCVIRDHLLAEGDGVLDARTKGLDARAVCVGRAPRALLVLMGRRGVHGGILNKTVHELIRGLRMQGA

SEQ ID NO: 59095 - protein, 388 aa, Homo sapiens
MKWMVVVLVCLQLLEAAVVKVPLKKFKSIRETMKEKGLLGEFLRTHKYDPAWKYRFGDLSVTYEPMAYMDAAYFGEISIGTPPQNFLVLFDTGSSNLWVPSVYCQSQACTSHSRFNPSESSTYSTNGQTFSLQYGSGSLTGFFGYDTLTVQSIQVPNQEFGLSENEPGTNFVYAQFDGIMGLAYPALSVDEATTAMQGMVQEGALTSPVFSVYLSNQQGSSGGAVVFGGVDSSLYTGQIYWAPVTQELYWQIGIEEFLIGGQASGWCSEGCQAIVDTGTSLLTVPQQYMSALLQATGAQEDEYGQFLVNCNSIQNLPSLTFIINGVEFPLPPSSYILSNNGYCTVGVEPTYLSSQNGQPLWILGDVFLRSYYSVYDLGNNRVGFATAA

SEQ ID NO: 59096 - protein, 104 aa, Homo sapiens [sequence omitted]

SEQ ID NO: 59097 - protein, 136 aa, Homo sapiens
MKWMVVVLVCLQLLEAAVVKVPLKKFKSIRETMKEKGLLGEFLRTHKYDPAWKYRFGDLSVTYEPMAYMDVQSIQVPNQEFGLSENEPGTNFVYAQFDGIMGLAYPALSVDEATTAMQGMVQEGALTSPVFSVYLS

SEQ ID NO: 59098 - protein, 315 aa, Homo sapiens
MKWMVVVLVCLQLLEAAVVKVPLKKFKSIRETMKEKGLLGEFLRTHKYDPAWKYRFGDLSVTYEPMAYMDAAYFGEISIGTPPQNFLVLFDTGSSNLWVPSVYCQSQACTSHSRFNPSESSTYSTNGQTFSLQYGSGSLTGFFGYDTLTVQSIQVPNQEFGLSENEPGTNFVYAQFDGIMGLAYPALSVDEATTAMQGMVQEGALTSPVFSVYLSNLVLESSGLGPLLTPSRAAPPSSTLQLPEKPLEQTWNILTPFTKTLPVSNLSRKVTSWAGVGIPVTCLPEAGSGGERRAECGLGVPTTRGPPRSQHHSGA

SEQ ID NO: 59099 - protein, 180 aa, Homo sapiens
MLCLLLTLGVALVCGVPAMDIPQTKQDLELPKLAGTWHSMAMATNNISLMATLKAPLRVHITSLLPTPEDNLEIVLHRWENNSCVEKKVLGEKTENPKKFKINYTVANEATLLDTDYDNFLFLCLQDTTTPIQSMMCQYLARVLVEDDEIMQGFIRAFRPLPRHLWYLLDLKQMEEPCRF

SEQ ID NO: 59100 - protein, 86 aa, Homo sapiens
MLCLLLTLGVALVCGVPAMDIPQTKQDLELPKDTTTPIQSMMCQYLARVLVEDDEIMQGFIRAFRPLPRHLWYLLDLKQMEAPCWL

SEQ ID NO: 59101 - protein, 180 aa, Homo sapiens; identical to SEQ ID NO: 59099

SEQ ID NO: 59102 - protein, 145 aa, Homo sapiens
MLCLLLTLGVALVCGVPAMDIPQTKQDLELPKAPLRVHITSLLPTPEDNLEIVLHRWENNSCVEKKVLGEKTENPKKFKINCKASGAPQLSWKPQGPRTDPASSTARVLVEDDEIMQGFIRAFRPLPRHLWYLLDLKQMEEPCRF

SEQ ID NO: 59103 - protein, 132 aa, Homo sapiens
LMATLKAPLRVHITSLLPTPEDNLEIVLHRWENNSCVEKKVLGEKTENPKKFKINYTVANEATLLDTDYDNFLFLCLQDTTTPIQSMMCQYLARVLVEDDEIMQGFIRAFRPLPRHLWYLLDLKQMEEPCRF

SEQ ID NO: 59104 - protein, 131 aa, Homo sapiens
  VARIANT 1: note = MOD_RES - Any amino acid
XVPAMDIPQTKQDLELPKAPLRVHITSLLPTPEDNLEIVLHRWENNSCVEKKVLGEKTENPKKFKINCKASGAPQLSWKPQGPRTDPASSTARVLVEDDEIMQGFIRAFRPLPRHLWYLLDLKQMEEPCRF

SEQ ID NO: 59105 - protein, 126 aa, Homo sapiens
  VARIANT 1: note = MOD_RES - Any amino acid
XPLRVHITSLLPTPEDNLEIVLHRWENNSCVEKKVLGEKTENPKKFKINYTVANEATLLDTDYDNFLFLCLQDTTTPIQSMMCQYLARVLVEDDEIMQGFIRAFRPLPRHLWYLLDLKQMEEPCRF

SEQ ID NO: 59106 - protein, 33 aa, Homo sapiens
  VARIANT 1: note = MOD_RES - Any amino acid
XEIMQGFIRAFRPLPRHLWYLLDLKQMEEPCRF

SEQ ID NO: 59107 - protein, 180 aa, Homo sapiens; identical to SEQ ID NO: 59099

SEQ ID NO: 59108 - protein, 169 aa, Homo sapiens
MLCLLLTLGVALVCGVPAMDIPQTKQDLELPKLAGTWHSMAMATNNISLMATLKAPLRVHITSLLPTPEDNLEIVLHRWENNSCVEKKVLGEKTENPKKFKINYTVANEATLLDTDYDNFLFLCLQDTTTPIQSMMCQYLESWWRTMRSCRDSSGLSGPCPGTYGTCWT

SEQ ID NO: 59109 - protein, 757 aa, Homo sapiens
MSRKISKESKKVNISSSLESEDISLETTVPTDDISSSEEREGKVRITRQLIERKELLHNIQLLKIELSQKTMMIDNLKVDYLTKIEELEEKLNDALHQKQLLTLRLDNQLAFQQKDASKYQELMKQEMETILLRQKQLEETNLQLREKAGDVRRNLRDFELTEEQYIKLKAFPEDQLSIPEYVSVRFYELVNPLRKEICELQVKKNILAEELSTNKNQLKQLTETYEEDRKNYSEVQIRCQRLALELADTKQLIQQGDYRQENYDKVKSERDALEQEVIELRRKHEILEASHMIQTKERSELSKEVVTLEQTVTLLQKDKEYLNRQNMELSVRCAHEEDRLERLQAQLEESKKAREEMYEKYVASRDHYKTEYENKLHDELEQIRLKTNQEIDQLRNASREMYERENRNLREARDNAVAEKERAVMAEKDALEKHDQLLDRYRELQLSTESKVTEFLHQSKLKSFESERVQLLQEETARNLTQCQLECEKYQKKLEVLTKEFYSLQASSEKRITELQAQNSEHQARLDIYEKLEKELDEIIMQTAEIENEDEAERVLFSYGYGANVPTTAKRRLKQSVHLARRVLQLEKQNSLILKDLEHRKDQVTQLSQELDRANSLLNQTQQPYRYLIESVRQRDSKIDSLTESIAQLEKDVSNLNKEKSALLQTKNQMALDLEQLLNHREELAAMKQILVKMHSKHSENSLLLTKTEPKHVTENQKSKTLNVPKEHEDNIFTPKPTLFTKKEAPEWSKKQKMKT

SEQ ID NO: 59110 - protein, 216 aa, Homo sapiens
FRTAKVENEDEAERVLFSYGYGANVPTTAKRRLKQSVHLARRVLQLEKQNSLILKDLEHRKDQVTQLSQELDRANSLLNQTQQPYRYLIESVRQRDSKIDSLTESIAQLEKDVSNLNKEKSALLQTKNQMALDLEQLLNHREELAAMKQILVKMHSKHSENSLLLTKTEPKHVTENQKSKTLNVPKEHEDNIFTPKPTLFTKKEAPEWSKKQKMKT

SEQ ID NO: 59111 - protein, 414 aa, Homo sapiens
MSRKISKESKKVNISSSLESEDISLETTVPTDDISSSEEREGKVRITRQLIERKELLHNIQLLKIELSQKTMMIDNLKVDYLTKIEELEEKLNDALHQKQLLTLRLDNQLAFQQKDASKYQELMKQEMETILLRQKQLEETNLQLREKAGDVRRNLRDFELTEEQYIKLKAFPEDQLSIPEYVSVRFYELVNPLRKEICELQVKKNILAEELSTNKNQLKQLTETYEEDRKNYSEVQIRCQRLALELADTKQLIQQGDYRQENYDKVKSERDALEQEVIELRRKHEILEASHMIQTKERSELSKEVVTLEQTVTLLQKDKEYLNRQNMELSVRCAHEEDRLERLQAQLEESKKAREEMYEKYVASRDHYKTEYENKLHDELEQIRLKTNQEIDQLRNASREMYERENRKKRKKK

SEQ ID NO: 59112 - protein, 195 aa, Homo sapiens
MAAEDVVATGADPSDLESGGLLHEIFTSPLNLLLLGLCIFLLYKIVRGDQPAASGDSDDDEPPPLPRLKRRDFTPAELRRFDGVQDPRILMAINGKVFDVTKGRKFYGPEGPYGVFAGRDASRGLATFCLDKEALKDEYDDLSDLTAAQQETLSDWESQFTFKYHHVGKLLKEGEEPTVYSDEEEPKDESARKND

SEQ ID NO: 59113 - protein, 143 aa, Homo sapiens
MAAEDVVATGADPSDLESGGLLHEIFTSPLNLLLLGLCIFLLYKIVRGDQPAASGDSDDDEPPPLPRLKRRDFTPAELRRFDGVQDPRILMAINGKVFDVTKGRKFYGPVKYHHVGKLLKEGEEPTVYSDEEEPKDESARKND

SEQ ID NO: 59114 - protein, 223 aa, Homo sapiens
MAAGDGDVKLGTLGSGSESSNDGGSESPGDAGAAAEGGGWAAAALALLTGGGEMLLNVALVALVLLGAYRLWVRWGRRGLGAGAGAGEESPATSLPRMKKRDFSLEQLRQYDGSRNPRILLAVNGKVFDVTKGSKFYGPAGPYGIFAGRDASRGLATFCLDKDALRDEYDDLSDLNAVQMESVREWEMQFKEKYDYVGRLLKPGEEPSEYTDEEDTKDHNKQD

SEQ ID NO: 59115 - protein, 133 aa, Homo sapiens
MAAGDGDVKLGTLGSGSESSNDGGSESPGDAGAAAEGGGWAAAALALLTGGGEMLLNVALVALVLLGAYRLWVRWGRRGLGAGAGAGLQLGAAAPVRRLPQPAHPARGQWESLRRDQRQQVLRPGGSIWNICW

SEQ ID NO: 59116 - protein, 247 aa, Homo sapiens
MGGAGRGVGEGRGRGGGGRRWRAVMAAGDGDVKLGTLGSGSESSNDGGSESPGDAGAAAEGGGWAAAALALLTGGGEMLLNVALVALVLLGAYRLWVRWGRRGLGAGAGAGEESPATSLPRMKKRDFSLEQLRQYDGSRNPRILLAVNGKVFDVTKGSKFYGPAGPYGIFAGRDASRGLATFCLDKDALRDEYDDLSDLNAVQMESVREWEMQFKEKYDYVGRLLKPGEEPSEYTDEEDTKDHNKQD

SEQ ID NO: 59117 - protein, 346 aa, Homo sapiens
MAMAQKLSHLLPSLRQVIQEPQLSLQPEPVFTVDRAEVPPLFWKPYIYAGYRPLHQTWRFYFRTLFQQHNEAVNVWTHLLAALVLLLRLALFVETVDFWGDPHALPLFIIVLASFTYLSFSALAHLLQAKSEFWHYSFFFLDYVGVAVYQFGSALAHFYYAIEPAWHAQVQAVFLPMAAFLAWLSCIGSCYNKYIQKPGLLGRTCQEVPSVLAYALDISPVVHRIFVSSDPTTDDPALLYHKCQVVFFLLAAAFFSTFMPERWFPGSCHVFGQGHQLFHIFLVLCTLAQLEAVALDYEARRPIYEPLHTHWPHNFSGLFLLTVGSSILTAFLLSQLVQRKLDQKTK

SEQ ID NO: 59118 - protein, 288 aa, Homo sapiens
MQIPQAPWPVVWAVLQLGWRPGWFLDSPDRPWNPPTFSPALLVVTEGDNATFTCSFSNTSESFVLNWYRMSPSNQTDKLAAFPEDRSQPGQDCRFRVTQLPNGRDFHMSVVRARRNDSGTYLCGAISLAPKAQIKESLRAELRVTERRAEVPTAHPSPSPRPAGQFQTLVVGVVGGLLGSLVLLVWVLAVICSRAARGTIGARRTGQPLKEDPSAVPVFSVDYGELDFQWREKTPEPPVPCVPEQTEYATIVFPSGMGTSSPARRGSADGPRSAQPLRPEDGHCSWPL

SEQ ID NO: 59119 - protein, 179 aa, Homo sapiens
MQIPQAPWPVVWAVLQLGWRPGWFLDSPDRPWNPPTFSPALLVVTEGDNATFTCSFSNTSESFVLNWYRMSPSNQTDKLAAFPEDRSQPGQDCRFRVTQLPNGRDFHMSVVRARRNDSGTYLCGAISLAPKAQIKESLRAELRVTGTIGARRTGQPLKEDPSAVPVFSVDYGELDFQWR

SEQ ID NO: 59120 - protein, 212 aa, Homo sapiens
MRMTMEEMKNEAETTSMVSMPLYAVMYPVFNELERVNLSAAQTLRAAFIKAEKENPGLTQDIIMKILEKKSVEVNFTESLLRMAADDVEEYMIERPEPEFQDLNEKARALKQILSKIPDEINDRVRFLQTIKDIASAIKELLDTVNNVFKKYQYQNRRALEHQKKEFVKYSKSFSDTLKTYFKDGKAINVFVSANRLIHQTNLILQTFKTVA

SEQ ID NO: 59121 - protein, 212 aa, Homo sapiens; identical to SEQ ID NO: 59120

SEQ ID NO: 59122 - protein, 146 aa, Homo sapiens
MRMTMEEMKNEAETTSMVSMPLYAVMYPVFNELERVNLSAAQTLRAAFIKAEKENPGLTQDIIMKILEKKSVEVNFTESLLRMAADDVEEYMIERPEPEFQDLNEKARALKQILSKIPDEINDRVRFLQTIKDIASAIKELLDTVN

SEQ ID NO: 59123 - protein, 79 aa, Homo sapiens
MRMTMEEMKNEAETTSMVSMPLYAVMYPVFNELERVNLSAAQTLRAAFIKAEKENPGLTQDIIMKILEKKSVEVNFTES

SEQ ID NO: 59124 - protein, 212 aa, Homo sapiens; identical to SEQ ID NO: 59120

SEQ ID NO: 59125 - protein, 212 aa, Homo sapiens; identical to SEQ ID NO: 59120

SEQ ID NO: 59126 - protein, 202 aa, Homo sapiens
MRMTMEEMKNEAETTSMVSMPLYAVMYPVFNELERVNLSAAQTLRAAFIKAEKENPGLTQDIIMKILEKKSVEVNFTESLLRMAADDVEEYMIERPEPEFQDLNEKARALKQILSKIPDEINDRVRFLQTIKDIASAIKELLDTVNNVFKKYQYQNRRALEHQKKEFVKYSKSFSDTLKTYFKDGKAINVFVSANRLIHQTN

SEQ ID NO: 59127 - protein, 186 aa, Homo sapiens
MRMTMEEMKNEAETTSMVSMPLYAVMYPVFNELERVNLSAAQTLRAAFIKAEKENPGLTQDIIMKILEKKSVEVNFTESLLRMAADDVEEYMIERPEPEFQDLNEKARALKQILSKIPDEINDRVRFLQTIKDIASAIKELLDTVNNVFKKYQYQNRRALEHQKKEFVKYSKSFSDTLKTYFKDGK

SEQ ID NO: 59128 - protein, 134 aa, Homo sapiens
MRMTMEEMKNEAETTSMVSMPLYAVMYPVFNELERVNLSAAQTLRAAFIKAEKENPGLTQDIIMKILEKKSVEVNFTESLLRMAADDVEEYMIERPEPEFQDLNEKARALKQILSKIPDEINDRVRFLQTIKDI

SEQ ID NO: 59129 - protein, 212 aa, Homo sapiens; identical to SEQ ID NO: 59120

SEQ ID NO: 59130 - protein, 1871 aa, Homo sapiens
MANLEESFPRGGTRKIHKPEKAFQQSVEQDNLFDISTEEGSTKRKKSQKGPAKTKKLKIEKRESSKSAREKFEILSVESLCEGMRILGCVKEVNELELVISLPNGLQGFVQVTEICDAYTKKLNEQVTQEQPLKDLLHLPELFSPGMLVRCVVSSLGITDRGKKSVKLSLNPKNVNRVLSAEALKPGMLLTGTVSSLEDHGYLVDIGVDGTRAFLPLLKAQEYIRQKNKGAKLKVGQYLNCIVEKVKGNGGVVSLSVGHSEVSTAIATEQQSWNLNNLLPGLVVKAQVQKVTPFGLTLNFLTFFTGVVDFMHLDPKKAGTYFSNQAVRACILCVHPRTRVVHLSLRPIFLQPGRPLTRLSCQNLGAVLDDVPVQGFFKKAGATFRLKDGVLAYARLSHLSDSKNVFNPEAFKPGNTHKCRIIDYSQMDELALLSLRTSIIEAQYLRYHDIEPGAVVKGTVLTIKSYGMLVKVGEQMRGLVPPMHLADILMKNPEKKYHIGDEVKCRVLLCDPEAKKLMMTLKKTLIESKLPVITCYADAKPGLQTHGFIIRVKDYGCIVKFYNNVQGLVPKHELSTEYIPDPERVFYTGQVVKVVVLNCEPSKERMLLSFKLSSDPEPKKEPAGHSQKKGKAINIGQLVDVKVLEKTKDGLEVAVLPHNIRAFLPTSHLSDHVANGPLLHHWLQAGDILHRVLCLSQSEGRVLLCRKPALVSTVEGGQDPKNFSEIHPGMLLIGFVKSIKDYGVFIQFPSGLSGLAPKAIMSDKFVTSTSDHFVEGQTVAAKVTNVDEEKQRMLLSLRLSDCGLGDLAITSLLLLNQCLEELQGVRSLMSNRDSVLIQTLAEMTPGMFLDLVVQEVLEDGSVVFSGGPVPDLVLKASRYHRAGQEVESGQKKKVVILNVDLLKLEVHVSLHQDLVNRKARKLRKGSEHQAIVQHLEKSFAIASLVETGHLAAFSLTSHLNDTFRFDSEKLQVGQGVSLTLKTTEPGVTGLLLAVEGPAAKRTMRPTQKDSETVDEDEEVDPALTVGTIKKHTLSIGDMVTGTVKSIKPTHVVVTLEDGIIGCIHASHILDDVPEGTSPTTKLKVGKTVTARVIGGRDMKTFKYLPISHPRFVRTIPELSVRPSELEDGHTALNTHSVSPMEKIKQYQAGQTVTCFLKKYNVVKKWLEVEIAPDIRGRIPLLLTSLSFKVLKHPDKKFRVGQALRATVVGPDSSKTLLCLSLTGPHKLEEGEVAMGRVVKVTPNEGLTVSFPFGKIGTVSIFHMSDSYSETPLEDFVPQKVVRCYILSTADNVLTLSLRSSRTNPETKSKVEDPEINSIQDIKEGQLLRGYVGSIQPHGVFFRLGPSVVGLARYSHVSQHSPSKKALYNKHLPEGKLLTARVLRLNHQKNLVELSFLPGDTGKPDVLSASLEGQLTKQEERKTEAEERDQKGEKKNQKRNEKKNQKGQEEVEMPSKEKQQPQKPQAQKRGGRECRESGSEQERVSKKPKKAGLSEEDDSLVDVYYREGKEEAEETNVLPKEKQTKPAEAPRLQLSSGFAWNVGLDSLTPALPPLAESSDSEEDEKPHQATIKKSKKERELEKQKAEKELSRIEEALMDPGRQPESADDFDRLVLSSPNSSILWLQYMAFHLQATEIEKARAVAERALKTISFREEQEKLNVWVALLNLENMYGSQESLTKVFERAVQYNEPLKVFLHLADIYAKSEKFQEAGELYNRMLKRFRQEKAVWIKYGAFLLRRSQAAASHRVLQRALECLPSKEHVDVIAKFAQLEFQLGDAERAKAIFENTLSTYPKRTDVWSVYIDMTIKHGSQKDVRDIFERVIHLSLAPKRMKFFFKRYLDYEKQHGTEKDVQAVKAKALEYVEAKSSVLED

SEQ ID NO: 59131 - protein, 1234 aa, Homo sapiens
MANLEESFPRGGTRKIHKPEKAFQQSVEQDNLFDISTEEGSTKRKKSQKGPAKTKKLKIEKRESSKSAREKFEILSVESLCEGMRILGCVKEVNELELVISLPNGLQGFVQVTEICDAYTKKLNEQVTQEQPLKDLLHLPELFSPGMLVRCVVSSLGITDRGKKSVKLSLNPKNVNRVLSAEALKPGMLLTGTVSSLEDHGYLVDIGVDGTRAFLPLLKAQEYIRQKNKGAKLKVGQYLNCIVEKVKGNGGVVSLSVGHSEVSTAIATEQQSWNLNNLLPGLVVKAQVQKVTPFGLTLNFLTFFTGVVDFMHLDPKKAGTYFSNQAVRACILCVHPRTRVVHLSLRPIFLQPGRPLTRLSCQNLGAVLDDVPVQGFFKKAGATFRLKDGVLAYARLSHLSDSKNVFNPEAFKPGNTHKCRIIDYSQMDELALLSLRTSIIEAQYLRYHDIEPGAVVKGTVLTIKSYGMLVKVGEQMRGLVPPMHLADILMKNPEKKYHIGDEVKCRVLLCDPEAKKLMMTLKKTLIESKLPVITCYADAKPGLQTHGFIIRVKDYGCIVKFYNNVQGLVPKHELSTEYIPDPERVFYTGQVVKVVVLNCEPSKERMLLSFKLSSDPEPKKEPAGHSQKKGKAINIGQLVDVKVLEKTKDGLEVAVLPHNIRAFLPTSHLSDHVANGPLLHHWLQAGDILHRVLCLSQSEGRVLLCRKPALVSTVEGGQDPKNFSEIHPGMLLIGFVKSIKDYGVFIQFPSGLSGLAPKAIMSDKFVTSTSDHFVEGQTVAAKVTNVDEEKQRMLLSLRLSDCGLGDLAITSLLLLNQCLEELQGVRSLMSNRDSVLIQTLAEMTPGMFLDLVVQEVLEDGSVVFSGGPVPDLVLKASRYHRAGQEVESGQKKKVVILNVDLLKLEVHVSLHQDLVNRKARKLRKGSEHQAIVQHLEKSFAIASLVETGHLAAFSLTSHLNDTFRFDSEKLQVGQGVSLTLKTTEPGVTGLLLAVEGPAAKRTMRPTQKDSETVDEDEEVDPALTVGTIKKHTLSIGDMVTGTVKSIKPTHVVVTLEDGIIGCIHASHILDDVPEGTSPTTKLKVGKTVTARVIGGRDMKTFKYLPISHPRFVRTIPELSVRPSELEDGHTALNTHSVSPMEKIKQYQAGLSEEDDSLVDVYYREGKEEAEETNVLPKEKQTKPAEAPRLQLSSGFAWNVGLDSLTPALPPLAESSDSEEDEKPHQATQIKKSKK

SEQ ID NO: 59132 - protein, 311 aa, Homo sapiens
MAAAGARPVELGFAESAPAWRLRSEQFPSKVYAPLPGRPDAFHRCIFLFCCREQPCCAGLRVFRNQLPRKNDFYSYEPPSENPPPETGESVCLQLKSGAHLCRVCGCLGPKTCSRCHKAYYCSKEHQTLDWRLGHKQACAQPDHLDHIIPDHNFLFPEFEIVIETEDEIMPEVVEKEDYSEIIGSMGEALEEELDSMAKHESREDKIFQKFKTQIALEPEQILRYGRGIAPIWISGENIPQEKDIPDCPCGAKRILEFQVMPQLLNYLKADRLGKSIDWGILAVFTCAESCSLGTGYTEEFVWKQDVTDTP

SEQ ID NO: 59133 - protein, 228 aa, Homo sapiens
MAAAGARPVELGFAESAPAWRLRSEQFPSKVGGRPAWLGAAGLPGPQALACELCGRPLSFLLQVYAPLPGRPDAFHRCIFLFCCREQPCCAGLRVFRNQLPRKNDFYSYEPPSENPPPETGESVCLQLKSGAHLCRVCGCLGPKTCSRCHKAYYCSKEHQTLDWRLGHKQACAQPDHLDHIIPDHNFLFPEFEIVIETEDEIMPEVVEKEDYSEIIGSMGKQFQDFIH

SEQ ID NO: 59134 - protein, 344 aa, Homo sapiens
MAAAGARPVELGFAESAPAWRLRSEQFPSKVGGRPAWLGAAGLPGPQALACELCGRPLSFLLQVYAPLPGRPDAFHRCIFLFCCREQPCCAGLRVFRNQLPRKNDFYSYEPPSENPPPETGESVCLQLKSGAHLCRVCGCLGPKTCSRCHKAYYCSKEHQTLDWRLGHKQACAQPDHLDHIIPDHNFLFPEFEIVIETEDEIMPEVVEKEDYSEIIGSMGEALEEELDSMAKHESREDKIFQKFKTQIALEPEQILRYGRGIAPIWISGENIPQEKDIPDCPCGAKRILEFQVMPQLLNYLKADRLGKSIDWGILAVFTCAESCSLGTGYTEEFVWKQDVTDTP

SEQ ID NO: 59135 - protein, 195 aa, Homo sapiens
MAAAGARPVELGFAESAPAWRLRSEQFPSKVYAPLPGRPDAFHRCIFLFCCREQPCCAGLRVFRNQLPRKNDFYSYEPPSENPPPETGESVCLQLKSGAHLCRVCGCLGPKTCSRCHKAYYCSKEHQTLDWRLGHKQACAQPDHLDHIIPDHNFLFPEFEIVIETEDEIMPEVVEKEDYSEIIGSMGKQFQDFIH

SEQ ID NO: 59136 - protein, 188 aa, Homo sapiens
MAAAGARPVELGFAESAPAWRLRSEQFPSKVYAPLPGRPDAFHRCIFLFCCREQPCCAGLRVFRNQLPRKNDFYSYEPPSENPPPETGESVCLQLKSGAHLCRVCGCLGPKTCSRCHKAYYCSKEHQTLDWRLGHKQACAQPDHLDHIIPDHNFLFPEFEIVIETEDEIMPEVVEKEDYSEIIGSMGI

SEQ ID NO: 59137 - protein, 868 aa, Homo sapiens
MATFISVQLKKTSEVDLAKPLVKFIQQTYPSGGEEQAQYCRAAEELSKLRRAAVGRPLDKHEGALETLLRYYDQICSIEPKFPFSENQICLTFTWKDAFDKGSLFGGSVKLALASLGYEKSCVLFNCAALASQIAAEQNLDNDEGLKIAAKHYQFASGAFLHIKETVLSALSREPTVDISPDTVGTLSLIMLAQAQEVFFLKATRDKMKDAIIAKLANQAADYFGDAFKQCQYKDTLPKEVFPVLAAKHCIMQANAEYHQSILAKQQKKFGEEIARLQHAAELIKTVASRYDEYVNVKDFSDKINRALAAAKKDNDFIYHDRVPDLKDLDPIGKATLVKSTPVNVPISQKFTDLFEKMVPVSVQQSLAAYNQRKADLVNRSIAQMREATTLANGVLASLNLPAAIEDVSGDTVPQSILTKSRSVIEQGGIQTVDQLIKELPELLQRNREILDESLRLLDEEEATDNDLRAKFKERWQRTPSNELYKPLRAEGTNFRTVLDKAVQADGQVKECYQSHRDTIVLLCKPEPELNAAIPSANPAKTMQGSEVVNVLKSLLSNLDEVKKEREGLENDLKSVNFDMTSKFLTALAQDGVINEEALSVTELDRVYGGLTTKVQESLKKQEGLLKNIQVSHQEFSKMKQSNNEANLREEVLKNLATAYDNFVELVANLKEGTKFYNELTEILVRFQNKCSDIVFARKTERDELLKDLQQSIAREPSAPSIPTPAYQSSPAGGHAPTPPTPAPRTMPPTKPQPPARPPPPVLPANRAPSATAPSPVGAGTAAPAPSQTPGSAPPPQAQGPPYPTYPGYPGYCQMPMPMGYNPYAYGQYNMPYPPVYHQSPGQAPYPGPQQPSYPFPQPPQQSYYPQQ

SEQ ID NO: 59138 - protein, 873 aa, Homo sapiens
MATFISVQLKKTSEVDLAKPLVKFIQQTYPSGGEEQAQYCRAAEELSKLRRAAVGRPLDKHEGALETLLRYYDQICSIEPKFPFSENQICLTFTWKDAFDKGSLFGGSVKLALASLGYEKSCVLFNCAALASQIAAEQNLDNDEGLKIAAKHYQFASGAFLHIKETVLSALSREPTVDISPDTVGTLSLIMLAQAQEVFFLKATRDKMKDAIIAKLANQAADYFGDAFKQCQYKDTLPKYFYFQEVFPVLAAKHCIMQANAEYHQSILAKQQKKFGEEIARLQHAAELIKTVASRYDEYVNVKDFSDKINRALAAAKKDNDFIYHDRVPDLKDLDPIGKATLVKSTPVNVPISQKFTDLFEKMVPVSVQQSLAAYNQRKADLVNRSIAQMREATTLANGVLASLNLPAAIEDVSGDTVPQSILTKSRSVIEQGGIQTVDQLIKELPELLQRNREILDESLRLLDEEEATDNDLRAKFKERWQRTPSNELYKPLRAEGTNFRTVLDKAVQADGQVKECYQSHRDTIVLLCKPEPELNAAIPSANPAKTMQGSEVVNVLKSLLSNLDEVKKEREGLENDLKSVNFDMTSKFLTALAQDGVINEEALSVTELDRVYGGLTTKVQESLKKQEGLLKNIQVSHQEFSKMKQSNNEANLREEVLKNLATAYDNFVELVANLKEGTKFYNELTEILVRFQNKCSDIVFARKTERDELLKDLQQSIAREPSAPSIPTPAYQSSPAGGHAPTPPTPAPRTMPPTKPQPPARPPPPVLPANRAPSATAPSPVGAGTAAPAPSQTPGSAPPPQAQGPPYPTYPGYPGYCQMPMPMGYNPYAYGQYNMPYPPVYHQSPGQAPYPGPQQPSYPFPQPPQQSYYPQQ

SEQ ID NO: 59139 - protein, 485 aa, Homo sapiens
MALPPFFGQGRPGPPPPQPPPPAPFGCPPPPLPSPAFPPPLPQRPGPFPGASAPFLQPPLALQPRASAEASRGGGGAGAFYPVPPPPLPPPPPQCRPFPGTDAGERPRPPPPGPGPPWSPRWPEAPPPPADVLGDAALQRLRDRQWLEAVFGTPRRAGCPVPQRTHAGPSLGEVRARLLRALRLVRRLRGLSQALREAEADGAAWVLLYSQTAPLRAELAERLQPLTQAAYVGEARRRLERVRRRRLRLRERAREREAEREAEAARAVEREQEIDRWRVKCVQEVEEKKREQELKAAADGVLSEVRKKQADTKRMVDILRALEKLRKLRKEAAARKGVCPPASADETFTHHLQRLRKLIKKRSELYEAEERALRVMLEGEQEEERKRELEKKQRKEKEKILLQKREIESKLFGDPDEFPLAHLLEPFRQYYLQAEHSLPALIQIRHDWDQYLVPSDHPKGNFVPQGWVLPPLPSNDIWATAVKLH

SEQ ID NO: 59140 - protein, 279 aa, Homo sapiens
LMRSHSDSCHFSKHLRREHGPATILRPGSPRPPPPPSFSLRRLRERAREREAEREAEAARAVEREQEIDRWRVKCVQEVEEKKREQELKAAADGVLSEVRKKQADTKRMVDILRALEKLRKLRKEAAARKGVCPPASADETFTHHLQRLRKLIKKRSELYEAEERALRVMLEGEQEEERKRELEKKQRKEKEKILLQKREIESKLFGDPDEFPLAHLLEPFRQYYLQAEHSLPALIQIRHDWDQYLVPSDHPKGNFVPQGWVLPPLPSNDIWATAVKLH

SEQ ID NO: 59141 - protein, 270 aa, Homo sapiens
SHSDSCHFSKHLRREHGPATILRPGSPRRRRLRLRERAREREAEREAEAARAVEREQEIDRWRVKCVQEVEEKKREQELKAAADGVLSEVRKKQADTKRMVDILRALEKLRKLRKEAAARKGVCPPASADETFTHHLQRLRKLIKKRSELYEAEERALRVMLEGEQEEERKRELEKKQRKEKEKILLQKREIESKLFGDPDEFPLAHLLEPFRQYYLQAEHSLPALIQIRHDWDQYLVPSDHPKGNFVPQGWVLPPLPSNDIWATAVKLH

SEQ ID NO: 59142 - protein, 54 aa, Homo sapiens
MCTTLFLLSTLAMLWRRRFANRVQPEPSDVDGAARGSSLDADPQSSGREKEPLK

SEQ ID NO: 59143 - protein, 81 aa, Homo sapiens
MTRTESPATWMGQLGAAAWMRTLSPQAAQVLVRPLAQEDAVGAAAAARGRMGGSSTREVPRAHPVTGCSAEIINKKCQLDL

SEQ ID NO: 59144 - protein, 272 aa, Homo sapiens
MAAKVFESIGKFGLALAVAGGVVNSALYNVDAGHRAVIFDRFRGVQDIVVGEGTHFLIPWVQKPIIFDCRSRPRNVPVITGSKDLQNVNITLRILFRPVASQLPRIFTSIGEDYDERVLPSITTEILKSVVARFDAGELITQRELVSRQVSDDLTERAATFGLILDDVSLTHLTFGKEFTEAVEAKQVAQQEAERARFVVEKAEQQKKAAIISAEGDSKAAELIANSLATAGDGLIELRKLEAAEDIAYQLSRSRNITYLPAGQSVLLQLPQ

SEQ ID NO: 59145 - protein, 246 aa, Homo sapiens
MAAKVFESIGKFGLALAVAGGVVNSALYNVDAGHRAVIFDRFRGVQDIVVGEGTHFLIPWVQKPIIFDCRSRPRNVPVITGSKDLQNVNITLRILFRPVASQLPRIFTSIGEDYDERVLPSITTEILKSVVARFDAGELITQRELVSRQVSDDLTERAATFGLILDDVSLTHLTFGKEFTEAVEAKQVAQQEAERARFVVEKAEQQKKAAIISAEGDSKAAELIANSLATAGDGLIELRKLEAAED

SEQ ID NO: 59146 - protein, 124 aa, Homo sapiens
MAAKVFESIGKFGLALAVAGGVVNSALYNVDAGHRAVIFDRFRGVQDIVVGEGTHFLIPWVQKPIIFDCRSRPRNVPVITGSKDLQNVNITLRILFRPVASQLPRIFTSIGEDYDERVLPSITT

SEQ ID NO: 59147 - protein, 201 aa, Homo sapiens
MAAKVFESIGKFGLALAVAGGVVNSALYNVDAGHRAVIFDRFRGVQDIVVGEGTHFLIPWVQKPIIFDCRSRPRNVPVITGSKDLQNVNITLRILFRPVASQLPRIFTSIGEDYDERVLPSITTEILKSVVARFDAGELITQRELVSRQVSDDLTERAATFGLILDDVSLTHLTFGKEFTEAVEAKQVAQQEAERARFVVE

SEQ ID NO: 59148 - protein, 214 aa, Homo sapiens
MAAKVFESIGKFGLALAVAGGVVNSALYNVDAGHRAVIFDRFRGVQDIVVGEGTHFLIPWVQKPIIFDCRSRPRNVPVITGSKDLQNVNITLRILFRPVASQLPRIFTSIGEDYDERVLPSITTEILKSVVARFDAGELITQRELVSRQVSDDLTERAATFGLILDDVSLTHLTFGKEFTEAVEAKQVAQQEAERARFVVEKAEQQKKAAIISA

SEQ ID NO: 59149 - protein, 155 aa, Homo sapiens
MAAKVFESIGKFGLALAVAGGVVNSALYNVDAGHRAVIFDRFRGVQDIVVGEGTHFLIPWVQKPIIFDCRSRPRNVPVITGSKDLQNVNITLRILFRPVASQLPRIFTSIGEDYDERVLPSITTEILKSVVARFDAGELITYLPAGQSVLLQLPQ

SEQ ID NO: 59150 - protein, 204 aa, Homo sapiens
MAAKVFESIGKFGLALAVAGGVVNSALYNVDAGHRAVIFDRFRGVQDIVVGEGTHFLIPWVQKPIIFDCRSRPRNVPVITGSKDLQNVNITLRILFRPVASQLPRIFTSIGEDYDERVLPSITTEILKSVVARFDAGELITQRELVSRQVSDDLTERAATFGLILDDVSLTHLTFGKEFTEAVEAKQVAQQEAERARFVVEKVS

SEQ ID NO: 59151 - protein, 299 aa, Homo sapiens
MAQNLKDLAGRLPAGPRGMGTALKLLLGAGAVAYGVRESVFTVEGGHRAIFFNRIGGVQQDTILAEGLHFRIPWFQYPIIYDIRARPRKISSPTGSKDLQMVNISLRVLSRPNAQELPSMYQRLGLDYEERVLPSIVNEVLKSVVAKFNASQLITQRAQVSLLIRRELTERAKDFSLILDDVAITELSFSREYTAAVEAKQVAQQEAQRAQFLVEKAKQEQRQKIVQAEGEAEAAKMLGEALSKNPGYIKLRKIRAAQNISKTIATSQNRIYLTADNLVLNLQDESFTRYSDSLIKGKK

SEQ ID NO: 59152 - protein, 261 aa, Homo sapiens
MAQNLKDLAGRLPAGPRGMGTALKLLLGAGAVAYGVRESVFTVEGGHRAIFFNRIGGVQQDTILAEGLHFRIPWFQYPIIYDIRARPRKISSPTGSKDLQMVNISLRVLSRPNAQELPSMYQRLGLDYEERVLPSIVNEVLKSVVAKFNASQLITQRAQVSLLIRRELTERAKDFSLILDDVAITELSFSREYTAAVEAKQVALSKNPGYIKLRKIRAAQNISKTIATSQNRIYLTADNLVLNLQDESFTRGSDSLIKGKK

SEQ ID NO: 59153 - protein, 299 aa, Homo sapiens
MAQNLKDLAGRLPAGPRGMGTALKLLLGAGAVAYGVRESVFTVEGGHRAIFFNRIGGVQQDTILAEGLHFRIPWFQYPIIYDIRARPRKISSPTGSKDLQMVNISLRVLSRPNAQELPSMYQRLGLDYEERVLPSIVNEVLKSVVAKFNASQLITQRAQVSLLIRRELTERAKDFSLILDDVAITELSFSREYTAAVEAKQVAQQEAQRAQFLVEKAKQEQRQKIVQAEGEAEAAKMLGEALSKNPGYIKLRKIRAAQNISKTIATSQNRIYLTADNLVLNLQDESFTRGSDSLIKGKK

SEQ ID NO: 59154 - protein, 213 aa, Homo sapiens
MAQNLKDLAGRLPAGPRGMGTALKLLLGAGAVAYGVRESVFTVEGGHRAIFFNRIGGVQQDTILAEGLHFRIPWFQYPIIYDIRARPRKISSPTGSKDLQMVNISLRVLSRPNAQELPSMYQRLGLDYEERVLPSIVNEVLKSVVAKFNASQLITQRAQVSLLIRRELTERAKDFSLILDDVAITELSFSREYTAAVEAKQVGESQEPWGEGF

SEQ ID NO: 59155 - protein, 105 aa, Homo sapiens
MRGATRVSIMLLLVTVSDCAVITGACERDVQCGAGTCCAISLWLRGLRMCTPLGREGEECHPGSHKVPFFRKRKHHTCPCLPNLLCSRFPDGRYRCSMDLKNINF

SEQ ID NO: 59156 - protein, 129 aa, Homo sapiens
MRSLCCAPLLLLLLLPPLLLTPRAGDAAVITGACDKDSQCGGGMCCAVSIWVKSIRICTPMGKLGDSCHPLTRKNNFGNGRQERRKRKRSKRKKEVPFFGRRMHHTCPCLPGLACLRTSFNRFICLAQK

SEQ ID NO: 59157 - protein, 108 aa, Homo sapiens
MRSLCCAPLLLLLLLPPLLLTPRAGDAAVITGACDKDSQCGGGMCCAVSIWVKSIRICTPMGKLGDSCHPLTRKVPFFGRRMHHTCPCLPGLACLRTSFNRFICLAQK

SEQ ID NO: 59158 - protein, 384 aa, Homo sapiens
MAAQNGNTSFTPNFNPPQDHASSLSFNFSYGDYDLPMDEDEDMTKTRTFFAAKIVIGIALAGIMLVCGIGNFVFIAALTRYKKLRNLTNLLIANLAISDFLVAIICCPFEMDYYVVRQLSWEHGHVLCASVNYLRTVSLYVSTNALLAIAIDRYLAIVHPLKPRMNYQTASFLIALVWMVSILIAIPSAYFATETVLFIVKSQEKIFCGQIWPVDQQLYYKSYFLFIFGVEFVGPVVTMTLCYARISRELWFKAVPGFQTEQIRKRLRCRRKTVLVLMCILTAYVLCWAPFYGFTIVRDFFPTVFVKEKHYLTAFYVVECIAMSNSMINTVCFVTVKNNTMKYFKKMMLLHWRPSQRGSKSSADLDLRTNGVPTTEEVDCIRLK

SEQ ID NO: 59159 - protein, 384 aa, Homo sapiens; identical to SEQ ID NO: 59158

SEQ ID NO: 59160 - protein, 227 aa, Homo sapiens
MNIKGSPWKGSLLLLLVSNLLLCQSVAPLPICPGGAARCQVTLRDLFDRAVVLSHYIHNLSSEMFSEFDKRYTHGRGFITKAINSCHTSSLATPEDKEQAQQMNQKDFLSLIVSILRSWNEPLYHLVTEVRGMQEAPEAILSKAVEIEEQTKRLLEGMELIVSQVHPETKENEIYPVWSGLPSLQMADEESRLSAYYNLLHCLRRDSHKIDNYLKLLKCRIIHNNNC

SEQ ID NO: 59161 - protein, 196 aa, Homo sapiens
MNIKGSPWKGSLLLLLVSNLLLSHYIHNLSSEMFSEFDKRYTHGRGFITKAINSCHTSSLATPEDKEQAQQMNQKDFLSLIVSILRSWNEPLYHLVTEVRGMQEAPEAILSKAVEIEEQTKRLLEGMELIVSQVHPETKENEIYPVWSGLPSLQMADEESRLSAYYNLLHCLRRDSHKIDNYLKLLKCRIIHNNNC

SEQ ID NO: 59162 - protein, 376 aa, Homo sapiens
MKENVASATVFTLLLFLNTCLLNGQLPPGKPEIFKCRSPNKETFTCWWRPGTDGGLPTNYSLTYHREGETLMHECPDYITGGPNSCHFGKQYTSMWRTYIMMVNATNQMGSSFSDELYVDVTYIVQPDPPLELAVEVKQPEDRKPYLWIKWSPPTLIDLKTGWFTLLYEIRLKPEKAAEWEIHFAGQQTEFKILSLHPGQKYLVQVRCKPDHGYWSAWSPATFIQIPSDFTMNDTTVWISVAVLSAVICLIIVWAVALKGYSMVTCIFPPVPGPKIKGFDAHLLEKGKSEELLSALGCQDFPPTSDYEDLLVEYLEVDDSEDQHLMSVHSKEHPSQGDPLMLGASHYKNLKSYRPRKISSQGRLAVFTKATLTTVQ

SEQ ID NO: 59163 - protein, 349 aa, Homo sapiens
MKENVASATVFTLLLFLNTCLLNGQLPPGKPEIFKCRSPNKETFTCWWRPGTDGGLPTNYSLTYHREGETLMHECPDYITGGPNSCHFGKQYTSMWRTYIMMVNATNQMGSSFSDELYVDVTYIVQPDPPLELAVEVKQPEDRKPYLWIKWSPPTLIDLKTGWFTLLYEIRLKPEKAAEWEIHFAGQQTEFKILSLHPGQKYLVQVRCKPDHGYWSAWSPATFIQIPSDFTMNDTTVWISVAVLSAVICLIIVWAVALKGYSMVTCIFPPVPGPKIKGFDAHLLEKGKSEELLSALGCQDFPPTSDYEDLLVEYLEVDDSEDQHLMSVHSKEHPSQEREQRQAQEARDS

SEQ ID NO: 59164 - protein, 521 aa, Homo sapiens
MKENVASATVFTLLLFLNTCLLNVQPDPPLELAVEVKQPEDRKPYLWIKWSPPTLIDLKTGWFTLLYEIRLKPEKAAEWEIHFAGQQTEFKILSLHPGQKYLVQVRCKPDHGYWSAWSPATFIQIPSDFTMNDTTVWISVAVLSAVICLIIVWAVALKGYSMVTCIFPPVPGPKIKGFDAHLLEKGKSEELLSALGCQDFPPTSDYEDLLVEYLEVDDSEDQHLMSVHSKEHPSQGMKPTYLDPDTDSGRGSCDSPSLLSEKCEEPQANPSTFYDPEVIEKPENPETTHTWDPQCISMEGKIPYFHAGGSKCSTWPLPQPSQHNPRSSYHNITDVCELAVGPAGAPATLLNEAGKDALKSSQTIKSREEGKATQQREVESFHSETDQDTPWLLPQEKTPFGSAKPLDYVEIHKVNKDGALSLLPKQRENSGKPKKPGTPENNKEYAKVSGVMDNNILVLVPDPHAKNVACFEESAKEAPPSLEQNQAEKALANFTATSSKCRLQLGGLDYLDPACFTHSFH

SEQ ID NO: 59165 - protein, 268 aa, Homo sapiens
MKENVASATVFTLLLFLNTCLLNGQLPPGKPEIFKCRSPNKETFTCWWRPGTDGGLPTNYSLTYHREGETLMHECPDYITGGPNSCHFGKQYTSMWRTYIMMVNATNQMGSSFSDELYVDVTYIVQPDPPLELAVEVKQPEDRKPYLWIKWSPPTLIDLKTGWFTLLYEIRLKPEKAAEWEIHFAGQQTEFKILSLHPGQKYLVQVRCKPDHGYWSAWSPATFIQIPSGDPLMLGASHYKNLKSYRPRKISSQGRLAVFTKATLTTVQ

SEQ ID NO: 59166 - protein, 622 aa, Homo sapiens
MKENVASATVFTLLLFLNTCLLNGQLPPGKPEIFKCRSPNKETFTCWWRPGTDGGLPTNYSLTYHREGETLMHECPDYITGGPNSCHFGKQYTSMWRTYIMMVNATNQMGSSFSDELYVDVTYIVQPDPPLELAVEVKQPEDRKPYLWIKWSPPTLIDLKTGWFTLLYEIRLKPEKAAEWEIHFAGQQTEFKILSLHPGQKYLVQVRCKPDHGYWSAWSPATFIQIPSDFTMNDTTVWISVAVLSAVICLIIVWAVALKGYSMVTCIFPPVPGPKIKGFDAHLLEKGKSEELLSALGCQDFPPTSDYEDLLVEYLEVDDSEDQHLMSVHSKEHPSQGMKPTYLDPDTDSGRGSCDSPSLLSEKCEEPQANPSTFYDPEVIEKPENPETTHTWDPQCISMEGKIPYFHAGGSKCSTWPLPQPSQHNPRSSYHNITDVCELAVGPAGAPATLLNEAGKDALKSSQTIKSREEGKATQQREVESFHSETDQDTPWLLPQEKTPFGSAKPLDYVEIHKVNKDGALSLLPKQRENSGKPKKPGTPENNKEYAKVSGVMDNNILVLVPDPHAKNVACFEESAKEAPPSLEQNQAEKALANFTATSSKCRLQLGGLDYLDPACFTHSFH

SEQ ID NO: 59167 - protein, 197 aa, Homo sapiens
MHECPDYITGGPNSCHFGKQYTSMWRTYIMMVNATNQMGSSFSDELYVDVTYIVQPDPPLELAVEVKQPEDRKPYLWIKWSPPTLIDLKTGWFTLLYEIRLKPEKAAEWEIHFAGQQTEFKILSLHPGQKYLVQVRCKPDHGYWSAWSPATFIQIPSGDPLMLGASHYKNLKSYRPRKISSQGRLAVFTKATLTTVQ

SEQ ID NO: 59168 - protein, 103 aa, Homo sapiens
MKENVASATVFTLLLFLNTCLLNGQLPPGKPEIFKCRSPNKETFTCWWRPGTDGGLPTNYSLTYHREGETLMHECPDYITGGPNSCHFGKQYTSMWRTYIMMV

SEQ ID NO: 59169 - protein, 62 aa, Homo sapiens
MKENVASATVFTLLLFLNTCLLNGQLPPGKPEIFKCRSPNKETFTCWWRPGTDGGLPTNYSL

SEQ ID NO: 59170 - protein, 111 aa, Homo sapiens
MKENVASATVFTLLLFLNTCLLNGQLPPGKPEIFKCRSPNKETFTCWWRPGTDGGLPTNYSLTYHREGETLMHECPDYITGGPNSCHFGKQYTSMWRTYIMMVNATNQMGS

SEQ ID NO: 59171 - protein, 521 aa, Homo sapiens; identical to SEQ ID NO: 59164

SEQ ID NO: 59172 - protein, 288 aa, Homo sapiens
MKENVASATVFTLLLFLNTCLLNGQLPPGKPEIFKCRSPNKETFTCWWRPGTDGGLPTNYSLTYHREGETLMHECPDYITGGPNSCHFGKQYTSMWRTYIMMVNATNQMGSSFSDELYVDVTYIVQPDPPLELAVEVKQPEDRKPYLWIKWSPPTLIDLKTGWFTLLYEIRLKPEKAAEWEIHFAGQQTEFKILSLHPGQKYLVQVRCKPDHGYWSAWSPATFIQIPSDFTMNDTTVWISVAVLSAVICLIIVWAVALKGYSMVTCIFPPVPGPKIKGFDAHLLEVTP

SEQ ID NO: 59173 - protein, 120 aa, Homo sapiens
MKENVASATVFTLLLFLNTCLLNGQLPPGKPEIFKCRSPNKETFTCWWRPGTDGGLPTNYSLTYHREGETLMHECPDYITGGPNSCHFGKQYTSMWRTYIMMVNATNQMGSSFSDELYVD

SEQ ID NO: 59174 - protein, 34 aa, Homo sapiens
MKENVASATVFTLLLFLNTCLLNGQLPPGKPEIF

SEQ ID NO: 59175 - protein, 309 aa, Homo sapiens
MKENVASATVFTLLLFLNTCLLNGQLPPGKPEIFKCRSPNKETFTCWWRPGTDGGLPTNYSLTYHREGETLMHECPDYITGGPNSCHFGKQYTSMWRTYIMMVNATNQMGSSFSDELYVDVTYIVQPDPPLELAVEVKQPEDRKPYLWIKWSPPTLIDLKTGWFTLLYEIRLKPEKAAEWEIHFAGQQTEFKILSLHPGQKYLVQVRCKPDHGYWSAWSPATFIQIPSDFTMNDTTVWISVAVLSAVICLIIVWAVALKGYSMVTCIFPPVPGPKIKGFDAHLLEDRLCTPGRCCVSTGLTDLDYSCST

SEQ ID NO: 59176 - protein, 417 aa, Homo sapiens
MGRRRAPELYRAPFPLYALQVDPSTGLLIAAGGGGAAKTGIKNGVHFLQLELINGRLSASLLHSHDTETRATMNLALAGDILAAGQDAHCQLLRFQAHQQQGNKAEKAGSKEQGPRQRKGAAPAEKKCGAETQHEGLELRVENLQAVQTDFSSDPLQKVVCFNHDNTLLATGGTDGYVRVWKVPSLEKVLEFKAHEGEIEDLALGPDGKLVTVGRDLKASVWQKDQLVTQLHWQENGPTFSSTPYRYQACRFGQVPDQPAGLRLFTVQIPHKRLRQPPPCYLTAWDGSNFLPLRTKSCGHEVVSCLDVSESGTFLGLGTVTGSVAIYIAFSLQCLYYVREAHGIVVTDVAFLPEKGRGPELLGSHETALFSVAVDSRCQLHLLPSRRSVPVWLLLLLCVGLIIVTILLLQSAFPGFL

SEQ ID NO: 59177 - protein, 417 aa, Homo sapiens; identical to SEQ ID NO: 59176

SEQ ID NO: 59178 - protein, 146 aa, Homo sapiens
MRLLQLLFRASPATLLLVLCLQLGANKAQDNTRKIIIKNFDIPKSVRPNDEVTAVLAVQTELKECMVVKTYLISSIPLQGAFNYKYTACLCDDNPKTFYWDFYTNRTVQIAAVVDVIRELGICPDDAAVIPIKNNRFYTIEILKVE

SEQ ID NO: 59179 - protein, 394 aa, Homo sapiens
MSGEDEQQEQTIAEDLVVTKYKMGGDIANRVLRSLVEASSSGVSVLSLCEKGDAMIMEETGKIFKKEKEMKKGIAFPTSISVNNCVCHFSPLKSDQDYILKEGDLVKIDLGVHVDGFIANVAHTFVVDVAQGTQVTGRKADVIKAAHLCAEAALRLVKPGNQNTQVTEAWNKVAHSFNCTPIEGMLSHQLKQHVIDGEKTIIQNPTDQQKKDHEKAEFEVHEVYAVDVLVSSGEGKAKDAGQRTTIYKRDPSKQYGLKMKTSRAFFSEVERRFDAMPFTLRAFEDEKKARMGVVECAKHELLQPFNVLYEKEGEFVAQFKFTVLLMPNGPMRITSGPFEPDLYKSEMEVQDAELKALLQSSASRKTQKKKKKKASKTAENATSGETLEENEAGD

SEQ ID NO: 59180 - protein, 405 aa, Homo sapiens
ACPAPQPARSQLLALACLPAPLLARAFARPLLEDRGDSDHSPEDLVVTKYKMGGDIANRVLRSLVEASSSGVSVLSLCEKGDAMIMEETGKIFKKEKEMKKGIAFPTSISVNNCVCHFSPLKSDQDYILKEGDLVKIDLGVHVDGFIANVAHTFVVDVAQGTQVTGRKADVIKAAHLCAEAALRLVKPGNQNTQVTEAWNKVAHSFNCTPIEGMLSHQLKQHVIDGEKTIIQNPTDQQKKDHEKAEFEVHEVYAVDVLVSSGEGKAKDAGQRTTIYKRDPSKQYGLKMKTSRAFFSEVERRFDAMPFTLRAFEDEKKARMGVVECAKHELLQPFNVLYEKEGEFVAQFKFTVLLMPNGPMRITSGPFEPDLYKSEMEVQDAELKALLQSSASRKTQKKKKKKKKK

SEQ ID NO: 59181 - protein, 245 aa, Homo sapiens [sequence omitted]

SEQ ID NO: 59182 - protein, 600 aa, Homo sapiens
MALRRALPALRPCIPRFVPLSTAPASREQPAAGPAAVPGGGSATAVRPPVPAVDFGNAQEAYRSRRTWELARSLLVLRLCAWPALLARHEQLLYVSRKLLGQRLFNKLMKMTFYGHFVAGEDQESIQPLLRHYRAFGVSAILDYGVEEDLSPEEAEHKEMESCTSAAERDGSGTNKRDKQYQAHWAFGDRRNGVISARTYFYANEAKCDSHMETFLRCIEASGRVSDDGFIAIKLTALGRPQFLLQFSEVLAKWRCFFHQMAVEQGQAGLAAMDTKLEVAVLQESVAKLGIASRAEIEDWFTAETLGVSGTMDLLDWSSLIDSRTKLSKHLVVPNAQTGQLEPLLSRFTEEEELQMTRMLQRMDVLAKKATEMGVRLMVDAEQTYFQPAISRLTLEMQRKFNVEKPLIFNTYQCYLKDAYDNVTLDVELARREGWCFGAKLVRGAYLAQERARAAEIGYEDPINPTYEATNAMYHRCLDYVLEELKHNAKAKVMVASHNEDTVRFALRRMEELGLHPADHRVYFGQLLGMCDQISFPLGQAGYPVYKYVPYGPVMEVLPYLSRRALENSSLMKGTHRERQLLWLELLRRLRTGNLFHRPA

SEQ ID NO: 59183 - protein, 492 aa, Homo sapiens
MKMTFYGHFVAGEDQESIQPLLRHYRAFGVSAILDYGVEEDLSPEEAEHKEMESCTSAAERDGSGTNKRDKQYQAHWAFGDRRNGVISARTYFYANEAKCDSHMETFLRCIEASGRVSDDGFIAIKLTALGRPQFLLQFSEVLAKWRCFFHQMAVEQGQAGLAAMDTKLEVAVLQESVAKLGIASRAEIEDWFTAETLGVSGTMDLLDWSSLIDSRTKLSKHLVVPNAQTGQLEPLLSRFTEEEELQMTRMLQRMDVLAKKATEMGVRLMVDAEQTYFQPAISRLTLEMQRKFNVEKPLIFNTYQCYLKDAYDNVTLDVELARREGWCFGAKLVRGAYLAQERARAAEIGYEDPINPTYEATNAMYHRCLDYVLEELKHNAKAKVMVASHNEDTVRFALRRMEELGLHPADHRVYFGQLLGMCDQISFPLGQAGYPVYKYVPYGPVMEVLPYLSRRALENSSLMKGTHRERQLLWLELLRRLRTGNLFHRPA

SEQ ID NO: 59184 - protein, 536 aa, Homo sapiens
MSPRVVSNSSVLASQSVGITNVRTVFSNVFNNTTAFPILRGSNCHKITAPGLGKGQLVNLLPPENLPWCGGSQGPRMLRTCYVLCSQAGPPSRGWQSLSFDGGAFHLKGTGELTRALLVLRLCAWPPLVTHGLLLQAWSRRLLGSRLSGAFLRASVYGQFVAGETAEEVKGCVQQLRTLSLRPLLAVPTEEEPDSAAKSGEAWYEGNLGAMLRCVDLSRGLLEPPSLAEASLMQLKVTALTSTRLCKELASWVRRPGASLELSPERLAEAMDSGQNLQVSCLNAEQNQHLRASLSRLHRVAQYARAQHVRLLVDAEYTSLNPALSLLVAALAVRWNSPGEGGPWVWNTYQACLKDTFERLGRDAEAAHRAGLAFGVKLVRGAYLDKERAVAQLHGMEDPTQPDYEATSQSYSRCLELMLTHVARHGPMCHLMVASHNEESVRQATKRMWELGIPLDGTVCFGQLLGMCDHVSLALGQAGYVVYKSIPYGSLEEVIPYLIRRAQENRSVLQGARREQELLSQELWRRLLPGCRRIPH

SEQ ID NO: 59185 - protein, 253 aa, Homo sapiens
MPGRTEGGSWLRNAAAADVLRNLPEVEWREPQHCCPPTPRKRKQNPRVPLPHYPPNPAAAIAADTMPKRKKQNHHQPPTQQQPPLPEREETGDEEDGSPIGPPSLLGPPPMANGKPGDPKSALHRGPPGSRGPLIPPLLSLPPPPWGRGPIRRGLGPRSSPYGRGWWGVNAEPPFPGPGHGGPTRGSFHKEQRNPRRLKSWSLIKNTCPPKDDPQVMEDKSDRPVCRHFAKKGHCRYEDLCAFYHPGVNGPPL

SEQ ID NO: 59186 - protein, 167 aa, Homo sapiens
MPKRKKQNHHQPPTQQQPPLPEREETGDEEDGSPIALHRGPPGSRGPLIPPLLSLPPPPWGRGPIRRGLGPRSSPYGRGWWGVNAEPPFPGPGHGGPTRGSFHKEQRNPRRLKSWSLIKNTCPPKDDPQVMEDKSDRPVCRHFAKKGHCRYEDLCAFYHPGVNGPPL

SEQ ID NO: 59187 - protein, 188 aa, Homo sapiens
MPKRKKQNHHQPPTQQQPPLPEREETGDEEDGSPIGPPSLLGPPPMANGKPGDPKSALHRGPPGSRGPLIPPLLSLPPPPWGRGPIRRGLGPRSSPYGRGWWGVNAEPPFPGPGHGGPTRGSFHKEQRNPRRLKSWSLIKNTCPPKDDPQVMEDKSDRPVCRHFAKKGHCRYEDLCAFYHPGVNGPPL

SEQ ID NO: 59188 - protein, 188 aa, Homo sapiens; identical to SEQ ID NO: 59187

SEQ ID NO: 59189 - protein, 167 aa, Homo sapiens; identical to SEQ ID NO: 59186

SEQ ID NO: 59190 - protein, 167 aa, Homo sapiens; identical to SEQ ID NO: 59186

SEQ ID NO: 59191 - protein, 167 aa, Homo sapiens; identical to SEQ ID NO: 59186

SEQ ID NO: 59192 - protein, 188 aa, Homo sapiens; identical to SEQ ID NO: 59187

SEQ ID NO: 59193 - protein, 188 aa, Homo sapiens; identical to SEQ ID NO: 59187

SEQ ID NO: 59194 - protein, 167 aa, Homo sapiens; identical to SEQ ID NO: 59186

SEQ ID NO: 59195 - protein, 167 aa, Homo sapiens; identical to SEQ ID NO: 59186

SEQ ID NO: 59196 - protein, 167 aa, Homo sapiens; identical to SEQ ID NO: 59186

SEQ ID NO: 59197 - protein, 188 aa, Homo sapiens; identical to SEQ ID NO: 59187

SEQ ID NO: 59198 - protein, 188 aa, Homo sapiens; identical to SEQ ID NO: 59187

SEQ ID NO: 59199 - protein, 188 aa, Homo sapiens; identical to SEQ ID NO: 59187

SEQ ID NO: 59200 - protein, 253 aa, Homo sapiens; identical to SEQ ID NO: 59185

SEQ ID NO: 59201 - protein, 253 aa, Homo sapiens; identical to SEQ ID NO: 59185

SEQ ID NO: 59202 - protein, 253 aa, Homo sapiens; identical to SEQ ID NO: 59185

SEQ ID NO: 59203 - protein, 253 aa, Homo sapiens; identical to SEQ ID NO: 59185

SEQ ID NO: 59204 - protein, 253 aa, Homo sapiens; identical to SEQ ID NO: 59185

SEQ ID NO: 59205 - protein, 253 aa, Homo sapiens; identical to SEQ ID NO: 59185

SEQ ID NO: 59206 - protein, 134 aa, Homo sapiens
MLLVLLSVVLLALSSAQSTDNDVNYEDFTFTIPDVEDSSQRPDQGPQRPPPEGLLPRPPGDSGNQDDGPQQRPPKPGGHHRHPPPPPFQNQQRPPRRGHRQLSLPRFPSVSLQEASSFFQRDRPARHPQEQPLW

SEQ ID NO: 59207 - protein, 126 aa, Homo sapiens
MLLVLLSVVLLALSSAQSTDNDVNYEDFTFTIPDVEDSYLDPLVIVVTKMMVLSRDHQNQEAITAILPHLLFKISNDHPDEDTVNSLYPDFLLSACRKHHHSSRGTDQQDIPRSNHSGNLEFSGRK

SEQ ID NO: 59208 - protein, 65 aa, Homo sapiens
MLLVLLSVVLLALSSAQSTDNDVNYEDFTFTIPACRKHHHSSRGTDQQDIPRSNHSGNLEFSGRK

SEQ ID NO: 59209 - protein, 231 aa, Homo sapiens
MAVFLEAKDAHSVLKRFPRANEFLEELRQGTIERECMEEICSYEEVKEVFENKEKTMEFWKGYPNAVYSVRDPSQSSDAMYVVVPLLGVALLIVIALFIIWRCQLQKATRHHPSYAQNRYLASRAGHTLPRVMVYRGTVHSQGEPSGHREAANSPQVVLGPSRGGRTTVRLESTLYLPELSLSRLSSTTPPPSYEEVTAPQESSSEEASVSYSDPPPKYEEIVAANPGADK

SEQ ID NO: 59210 - protein, 102 aa, Homo sapiens
MAGLSRALSSVFLEAKDAHSVLKRFPRANEFLEELRQGTIERECMEEICSYEEVKEVFENKEKTACTTLGLVLGVGVASGIARTGPGNADQSEARKDTQPKA

SEQ ID NO: 59211 - protein, 91 aa, Homo sapiens
DPSQSSDAMYVVVPLLGVALLIVIALFIIWRCQLQKATRHHPSYAQNRRCFAVRLAAPSFASKYSNVGAFPFRLWAASLSLARIYLTNIPK

SEQ ID NO: 59212 - protein, 52 aa, Homo sapiens
MAVFLEAKDAHSVLKRFPRANEFLEELRQGTIERECMEEICSYEEVKEVFEN

SEQ ID NO: 59213 - protein, 231 aa, Homo sapiens; identical to SEQ ID NO: 59209

SEQ ID NO: 59214 - protein, 226 aa, Homo sapiens
MFTLLVLLSQLPTVTLGFPHCARGPKASKHAGEEVFTSKEEANFFIHRRLLYNRFDLELFTPGNLERECNEELCNYEEAREIFVDEDKTIAFWQEYSAKGPTTKSDGNREKIDVMGLLTGLIAAGVFLVIFGLLGYYLCITKCNRLQHPCSSAVYERGRHTPSIIFRRPEEAALSPLPPSVEDAGLPSYEQAVALTRKHSVSPPPPYPGHTKGFRVFKKSMSLPSH

SEQ ID NO: 59215 - protein, 124 aa, Homo sapiens
MLLRDLVLRRGCCWSSLLLHCALHPLWGFVQVTHGEPQKSCSKVTDSCRHVCQCRPPPPLPPPPPPPPPPRLLSAPAPNSTSCPTEESWWSGLVIIIAVCCASLVFLTVLVIICYKAIKRNHAI

SEQ ID NO: 59216 - protein, 153 aa, Homo sapiens
MLLRDLVLRRGCCWSSLLLHCALHPLWGFVQVTHGEPQKSCSKVTDSCRHVCQCRPPPPLPPPPPPPPPPRLLSAPAPNSTSCPTEESWWSGLVIIIAVCCASLVFLTVLVIICYKAIKRKPLRKDENGTSVAEYPMSASQSNKGVDVNNAVV

SEQ ID NO: 59217 - protein, 153 aa, Homo sapiens; identical to SEQ ID NO: 59216

SEQ ID NO: 59218 - protein, 275 aa, Homo sapiens
MWRAGSMSAELGVGCALRAVNERVQQAVARRPRDLPAIQPRLVAVSKTKPADMVIEAYGHGQRTFGENYVQELLEKASNPKILSLCPEIKWHFIGHLQKQNVNKLMAVPNLFMLETVDSVKLADKVNSSWQRKGSPERLKVMVQINTSGEESKHGLPPSETIAIVEHINAKCPNLEFVGLMTIGSFGHDLSQGPNPDFQLLLSLREELCKKLNIPADQVELSMGMSADFQHAVEVGSTNVRIGSTIFGERDYSKKPTPDKCAADVKAPLEVAQEH

SEQ ID NO: 59219 - protein, 382 aa, Homo sapiens
MRSPLCWLLPLLILASVAQGQPTRRPRPGTGPGRRPRPRPRPTPSFPQPDEPAEPTDLPPPLPPGPPSIFPDCPRECYCPPDFPSALYCDSRNLRKVPVIPPRIHYLYLQNNFITELPVESFQNATGLRWINLDNNRIRKIDQRVLEKLPGLVFLYMEKNQLEEVPSALPRNLEQLRLSQNHISRIPPGVFSKLENLLLLDLQHNRLSDGVFKPDTFHGLKNLMQLNLAHNILRKMPPRVPTAIHQLYLDSNKIETIPNGYFKSFPNLAFIRLNYNKLTDRGLPKNSFNISNLLVLHLSHNRISSVPAINNRLEHLYLNNNSIEKINGTQICPNDLVAFHDFSSDLENVPHLRYLRLDGNYLKPPIPLDLMMCFRLLQSVVI

SEQ ID NO: 59220 - protein, 333 aa, Homo sapiens
MEDLEEDVRFIVDETLDFGGLSPSDSREEEDITVLVTPEKPLRRGLSHRSDPNAVAPAPQGVRLSLGPLSPEKLEEILDEANRLAAQLEQCALQDRESAGEGLGPRRVKPSPRRETFVLKDSPVRDLLPTVNSLTRSTPSPSSLTPRLRSNDRKGSVRALRATSGKRPSNMKRESPTCNLFPASKSPASSPLTRSTPPVRGRAGPSGRAAASPPTPIRSVLAPQPSTSNSQRLPRPQGAAAKSSSQLPIPSAIPRPASRMPLTSRSVPPGRGALPPDSLSTRKGLPRPSTAGHRVRESGHKVPVSQRLNLPVMGATRSNLQPPRKVAVPGPTR

SEQ ID NO: 59221 - protein, 310 aa, Homo sapiens
MEDLEEDVRFIVDETLDFGGLSPSDSREEEDITVLVTPEKPLRRGLSHRSDPNAVAPAPQGVRLSLGPLSPEKLEEILDEANRLAAQLEQCALQDRESAGEGLGPRRVKPSPRRETFVLKDSPVRDLLPTVNSLTRSTPSPSSLTPRLRSNDRKGSVRALRATSGKRPSNMKRESPTCNLFPASKSPASSPLTRSTPPVRGRAGPSGRAAASEETRAAKLRACQPNATHQPECATWQRCPTSGFSVNSKRASKTKHCRTQSAGKWTQGSCFPATKSSCHGCHSQQSAAPQESGSPRTYQVKRSGQQARLQ

SEQ ID NO: 59222 - protein, 333 aa, Homo sapiens; identical to SEQ ID NO: 59220

SEQ ID NO: 59223 - protein, 333 aa, Homo sapiens; identical to SEQ ID NO: 59220

SEQ ID NO: 59224 - protein, 333 aa, Homo sapiens; identical to SEQ ID NO: 59220

SEQ ID NO: 59225 - protein, 221 aa, Homo sapiens
MEDLEEDVRFIVDETLDFGGLSPSDSREEEDITVLVTPEKPLRRGLSHRSDPNAVAPAPQGVRLSLGPLSPEKLEEILDEANRLAAQLEQCALQDRESAGEGLGPRRVKPSPRRETFVLKDSPVRDLLPTVNSLTRSTPSPSSLTPRLRSNDRKGSVRALRATSGKRPSNMKRESPTCNLFPASKSPASSPLTRSTPPVRGRAGPSGRAAASEETRAAKLR

SEQ ID NO: 59226 - protein, 232 aa, Homo sapiens
MEDLEEDVRFIVDETLDFGGLSPSDSREEEDITVLVTPEKPLRRGLSHRSDPNAVAPAPQGVRLSLGPLSPEKLEEILDEANRLAAQLEQCALQDRESAGEGLGPRRVKPSPRRETFVLKDSPVRDLLPTVNSLTRSTPSPSSLTPRLRSNDRKGSVRALRATSGKRPSNMKRESPTCNLFPASKSPASSPLTRSTPPVRGRAGPSGRAAASPPTPIRSVLAPQPSTSNSQR

SEQ ID NO: 59227 - protein, 363 aa, Homo sapiens
MEDLEEDVRFIVDETLDFGGLSPSDSREEEDITVLVTPEKPLRRGLSHRSDPNAVAPAPQGVRLSLGPLSPEKLEEILDEANRLAAQLEQCALQDRESAGEGLGPRRVKPSPRRETFVLKDSPVRDLLPTVNSLTRSTPSPSSLTPRLRSNDRKGSVRALRATSGKRPSNMKRESPTCNLFPASKSPASSPLTRSTPPVRGRAGPSGRAAASEETRAAKLRVSGSGEFVGLTLKFLHPSPPGPPTPIRSVLAPQPSTSNSQRLPRPQGAAAKSSSQLPIPSAIPRPASRMPLTSRSVPPGRGALPPDSLSTRKGLPRPSTAGHRVRESGHKVPVSQRLNLPVMGATRSNLQPPRKVAVPGPTR

SEQ ID NO: 59228 - protein, 90 aa, Homo sapiens
MRRLLLVTSLVVVLLWEAGAVPAPKVPIKMQVKHWPSEQDPEKAWGARVVEPPEKDDQLVVLFPVQKPKLLTTEEKPRGTKAWMESRARP

SEQ ID NO: 59229 - protein, 152 aa, Homo sapiens
MRRLLLVTSLVVVLLWEAGAVPAPKVPIKMQVKHWPSEQDPENRAWGARVVEPPEKDDQLVVLFPVQKPKLLTTEEKPRGQGRGPILPGTKAWMETEDTLGHVLSPEPDHDSLYHPPPEEDQGEERPRLWVMPNHQVLLGPEEDQDHIYHPQ

SEQ ID NO: 59230 - protein, 151 aa, Homo sapiens
MRRLLLVTSLVVVLLWEAGAVPAPKVPIKMQVKHWPSEQDPEKAWGARVVEPPEKDDQLVVLFPVQKPKLLTTEEKPRGQGRGPILPGTKAWMETEDTLGHVLSPEPDHDSLYHPPPEEDQGEERPRLWVMPNHQVLLGPEEDQDHIYHPQ

SEQ ID NO: 59231 - protein, 142 aa, Homo sapiens
MRRLLLVTSLVVVLLWEAGAVPAPKVPIKMQVKHWPSEQDPEKAWGARVVEPPEKDDQLVVLFPVQKPKLLTTEEKPRGTKAWMETEDTLGHVLSPEPDHDSLYHPPPEEDQGEERPRLWVMPNHQVLLGPEEDQDHIYHPQ

SEQ ID NO: 59232 - protein, 2157 aa, Homo sapiens
MSDRSGPTAKGKDGKKYSSLNLFDTYKGKSLEIQKPAVAPRHGLQSLGKVAIARRMPPPANLPSLKAENKGNDPNVSLVPKDGTGWASKQEQSDPKSSDASTAQPPESQPLPASQTPASNQPKRPPAAPENTPLVPSGVKSWAQASVTHGAHGDGGRASSLLSRFSREEFPTLQAAGDQDKAAKERESAEQSSGPGPSLRPQNSTTWRDGGGRGPDELEGPDSKLHHGHDPRGGLQPSGPPQFPPYRGMMPPFMYPPYLPFPPPYGPQGPYRYPTPDGPSRFPRVAGPRGSGPPMRLVEPVGRPSILKEDNLKEFDQLDQENDDGWAGAHEEVDYTEKLKFSDEEDGRDSDEEGAEGHRDSQSASGEERPPEADGKKGNSPNSEPPTPKTAWAETSRPPETEPGPPAPKPPLPPPHRGPAGNWGPPGDYPDRGGPPCKPPAPEDEDEAWRQRRKQSSSEISLAVERARRRREEEERRMQEERRAACAEKLKRLDEKFGAPDKRLKAEPAAPPAAPSTPAPPPAVPKELPAPPAPPPASAPTPETEPEEPAQAPPAQSTPTPGVAAAPTLVSGGGSTSSTSSGSFEASPVEPQLPSKEGPEPPEEVPPPTTPPVPKVEPKGDGIGPTRQPPSQGLGYPKYQKSLPPRFQRQQQEQLLKQQQQHQWQQHQQGSAPPTPVPPSPPQPVTLGAVPAPQAPPPPPKALYPGALGRPPPMPPMNFDPRWMMIPPYVDPRLLQGRPPLDFYPPGVHPSGLVPRERSDSGGSSSEPFDRHAPAMLRERGTPPVDPKLAWVGDVFTATPAEPRPLTSPLRQAADEDDKGMRSETPPVPPPPPYLASYPGFPENGAPGPPISRFPLEEPGPRPLPWPPGSDEVAKIQTPPPKKEPPKEETAQLTGPEAGRKPARGVGSGGQGPPPPRRESRTETRWGPRPGSSRRGIPPEEPGAPPRRAGPIKKPPPPTKVEELPPKPLEQGDETPKPPKPDPLKITKGKLGGPKETPPNGNLSPAPRLRRDYSYERVGPTSCRGRGRGEYFARGRGFRGTYGGRGRGARSREFRSYREFRGDDGRGGGTGGPNHPPAPRGRTASETRSEGSEYEEIPKRRRQRGSETGSETHESDLAPSDKEAPTPKEGTLTQVPLAPPPPGAPPSPAPARFTARGGRVFTPRGVPSRRGRGGGRPPPQVCPGWSPPAKSLAPKKPPTGPLPPSKEPLKEKLIPGPLSPVARGGSNGGSNVGMEDGERPRRRRHGRAQQQDKPPRFRRLKQERENAARGSEGKPSLTLPASAPGPEEALTTVTVAPAPRRAAAKSPDLSNQNSDQANEEWETASESSDFTSERRGDKEAPPPVLLTPKAVGTPGGGGGGAVPGISAMSRGDLSQRAKDLSKRSFSSQRPGMERQNRRPGPGGKAGSSGSSSGGGGGGPGGRTGPGRGDKRSWPSPKNRSRPPEERPPGLPLPPPPPSSSAVFRLDQVIHSNPAGIQQALAQLSSRQGSVTAPGGHPRHKPGLPQAPQGPSPRPPTRYEPQRVNSGLSSDPHFEEPGPMVRGVGGTPRDSAGVSPFPPKRRERPPRKPELLQEESLPPPHSSGFLGSKPEGPGPQAESRDTGTEALTPHIWNRLHTATSRKSYRPSSMEPWMEPLSPFEDVAGTEMSQSDSGVDLSGDSQVSSGPCSQRSSPDGGLKGAAEGPPKRPGGSSPLNAVPCEGPPGSEPPRRPPPAPHDGDRKELPREQPLPPGPIGTERSQRTDRGTEPGPIRPSHRPGPPVQFGTSDKDSDLRLVVGDSLKAEKELTASVTEAIPVSRDWELLPSAAASAEPQSKNLDSGHCVPEPSSSGQRLYPEVFYGSAGPSSSQISGGAMDSQLHPNSGGFRPGTPSLHPYRSQPLYLPPGPAPPSALLSGLALKGQFLDFSTMQATELGKLPAGGVLYPPPSFLYSPAFCPSPLPDTSLLQVRQDLPSPSDFYSTPLQPGGQSGFLPSGAPAQQMLLPMVDSQLPVVNFGSLPPAPPPAPPPLSLLPVGPALQPPSLAVRPPPAPATRVLPSPARPFPASLGRAELHPVELKPFQDYQKLSSNLGGPGSSRTPPTGRSFSGLNSRLKATPSTYSGVFRTQRVDLYQQASPPDALRWIPKPWERTGPPPREGPSRRAEEPGSRGDKEPGLPPPR

SEQ ID NO: 59233 - protein, 1382 aa, Homo sapiens
MLRERGTPPVDPKLAWVGDVFTATPAEPRPLTSPLRQAADEDDKGMRSETPPVPPPPPYLASYPGFPENGAPGPPISRFPLEEPGPRPLPWPPGSDEVAKIQTPPPKKEPPKEETAQLTGPEAGRKPARGVGSGGQGPPPPRRESRTETRWGPRPGSSRRGIPPEEPGAPPRRAGPIKKPPPPTKVEELPPKPLEQGDETPKPPKPDPLKITKGKLGGPKETPPNGNLSPAPRLRRDYSYERVGPTSCRGRGRGEYFARGRGFRGTYGGRGRGARSREFRSYREFRGDDGRGGGTGGPNHPPAPRGRTASETRSEGSEYEEIPKRRRQRGSETGSETHESDLAPSDKEAPTPKEGTLTQVPLAPPPPGAPPSPAPARFTARGGRVFTPRGVPSRRGRGGGRPPPQVCPGWSPPAKSLAPKKPPTGPLPPSKEPLKEKLIPGPLSPVARGGSNGGSNVGMEDGERPRRRRHGRAQQQDKPPRFRRLKQERENAARGSEGKPSLTLPASAPGPEEALTTVTVAPAPRRAAAKSPDLSNQNSDQANEEWETASESSDFTSERRGDKEAPPPVLLTPKAVGTPGGGGGGAVPGISAMSRGDLSQRAKDLSKRSFSSQRPGMERQNRRPGPGGKAGSSGSSSGGGGGGPGGRTGPGRGDKRSWPSPKNRSRPPEERPPGLPLPPPPPSSSAVFRLDQVIHSNPAGIQQALAQLSSRQGSVTAPGGHPRHKPGLPQAPQGPSPRPPTRYEPQRVNSGLSSDPHFEEPGPMVRGVGGTPRDSAGVSPFPPKRRERPPRKPELLQEESLPPPHSSGFLGSKPEGPGPQAESRDTGTEALTPHIWNRLHTATSRKSYRPSSMEPWMEPLSPFEDVAGTEMSQSDSGVDLSGDSQVSSGPCSQRSSPDGGLKGAAEGPPKRPGGSSPLNAVPCEGPPGSEPPRRPPPAPHDGDRKELPREQPLPPGPIGTERSQRTDRGTEPGPIRPSHRPGPPVQFGTSDKDSDLRLVVGDSLKAEKELTASVTEAIPVSRDWELLPSAAASAEPQSKNLDSGHCVPEPSSSGQRLYPEVFYGSAGPSSSQISGGAMDSQLHPNSGGFRPGTPSLHPYRSQPLYLPPGPAPPSALLSGLALKGQFLDFSTMQATELGKLPAGGVLYPPPSFLYSPAFCPSPLPDTSLLQVRQDLPSPSDFYSTPLQPGGQSGFLPSGAPAQQMLLPMVDSQLPVVNFGSLPPAPPPAPPPLSLLPVGPALQPPSLAVRPPPAPATRVLPSPARPFPASLGRAELHPVELKPFQDYQKLSSNLGGPGSSRTPPTGRSFSGLNSRLKATPSTYSGVFRTQRVDLYQQASPPDALRWIPKPWERTGPPPREGPSRRAEEPGSRGDKEPGLPPPR

SEQ ID NO: 59234 - protein, 2157 aa, Homo sapiens; identical to SEQ ID NO: 59232

SEQ ID NO: 59235 - protein, 2157 aa, Homo sapiens
MSDRSGPTAKGKDGKKYSSLNLFDTYKGKSLEIQKPAVAPRHGLQSLGKVAIARRMPPPANLPSLKAENKGNDPNVSLVPKDGTGWASKQEQSDPKSSDASTAQPPESQPLPASQTPASNQPKRPPAAPENTPLVPSGVKSWAQASVTHGAHGDGGRASSLLSRFSREEFPTLQAAGDQDKAAKERESAEQSSGPGPSLRPQNSTTWRDGGGRGPDELEGPDSKLHHGHDPRGGLQPSGPPQFPPYRGMMPPFMYPPYLPFPPPYGPQGPYRYPTPDGPSRFPRVAGPRGSGPPMRLVEPVGRPSILKEDNLKEFDQLDQENDDGWAGAHEEVDYTEKLKFSDEEDGRDSDEEGAEGHRDSQSASGEERPPEADGKKGNSPNSEPPTPKTAWAETSRPPETEPGPPAPKPPLPPPHRGPAGNWGPPGDYPDRGGPPCKPPAPEDEDEAWRQRRKQSSSEISLAVERARRRREEEERRMQEERRAACAEKLKRLDEKFGAPDKRLKAEPAAPPAAPSTPAPPPAVPKELPAPPAPPPASAPTPEKEPEEPAQAPPAQSTPTPGVAAAPTLVSGGGSTSSTSSGSFEASPVEPQLPSKEGPEPPEEVPPPTTPPVPKVEPKGDGIGPTRQPPSQGLGYPKYQKSLPPRFQRQQQEQLLKQQQQHQWQQHQQGSAPPTPVPPSPPQPVTLGAVPAPQAPPPPPKALYPGALGRPPPMPPMNFDPRWMMIPPYVDPRLLQGRPPLDFYPPGVHPSGLVPRERSDSGGSSSEPFDRHAPAMLRERGTPPVDPKLAWVGDVFTATPAEPRPLTSPLRQAADEDDKGMRSETPPVPPPPPYLASYPGFPENGAPGPPISRFPLEEPGPRPLPWPPGSDEVAKIQTPPPKKEPPKEETAQLTGPEAGRKPARGVGSGGQGPPPPRRESRTETRWGPRPGSSRRGIPPEEPGAPPRRAGPIKKPPPPTKVEELPPKPLEQGDETPKPPKPDPLKITKGKLGGPKETPPNGNLSPAPRLRRDYSYERVGPTSCRGRGRGEYFARGRGFRGTYGGRGRGARSREFRSYREFRGDDGRGGGTGGPNHPPAPRGRTASETRSEGSEYEEIPKRRRQRGSETGSETHESDLAPSDKEAPTPKEGTLTQVPLAPPPPGAPPSPAPARFTARGGRVFTPRGVPSRRGRGGGRPPPQVCPGWSPPAKSLAPKKPPTGPLPPSKEPLKEKLIPGPLSPVARGGSNGGSNVGMEDGERPRRRRHGRAQQQDKPPRFRRLKQERENAARGSEGKPSLTLPASAPGPEEALTTVTVAPAPRRAAAKSPDLSNQNSDQANEEWETASESSDFTSERRGDKEAPPPVLLTPKAVGTPGGGGGGAVPGISAMSRGDLSQRAKDLSKRSFSSQRPGMERQNRRPGPGGKAGSSGSSSGGGGGGPGGRTGPGRGDKRSWPSPKNRSRPPEERPPGLPLPPPPPSSSAVFRLDQVIHSNPAGIQQALAQLSSRQGSVTAPGGHPRHKPGPPQAPQGPSPRPPTRYEPQRVNSGLSSDPHFEEPGPMVRGVGGTPRDSAGVSPFPPKRRERPPRKPELLQEESLPPPHSSGFLGSKPEGPGPQAESRDTGTEALTPHIWNRLHTATSRKSYRPSSMEPWMEPLSPFEDVAGTEMSQSDSGVDLSGDSQVSSGPCSQRSSPDGGLKGAAEGPPKRPGGSSPLNAVPCEGPPGSEPPRRPPPAPHDGDRKELPREQPLPPGPIGTERSQHTDRGTEPGPIRPSHRPGPPVQFGTSDKDSDLRLVVGDSLKAEKELTASVTEAIPVSRDWELLPSAAASAEPQSKNLDSGHCVPEPSSSGQRLYPEVFYGSAGPSSSQISGGAMDSQLHPNSGGFRPGTPSLHPYRSQPLYLPPGPAPPSALLSGVALKGQFLDFSTMQATELGKLPAGGVLYPPPSFLYSPAFCPSPLPDTSLLQVRQDLPSPSDFYSTPLQPGGQSGFLPSGAPAQQMLLPMVDSQLPVVNFGSLPPAPPPAPPSLSLLPVGPALQPPSLAVRPPPAPATRVLPSPARPFPASLGRAELHPVELKPFQDYQKLSSNLGGPGSSRTPPTGRSFSGLNSRLKATPSTYSGVFRTQRVDLYQQASPPDALRWIPKPWERTGPPPREGPSRRAEEPGSRGDKEPGLPPPR

SEQ ID NO: 59236 - protein, 2157 aa, Homo sapiens; identical to SEQ ID NO: 59235

SEQ ID NO: 59237 - protein, 2157 aa, Homo sapiens
MSDRSGPTAKGKDGKKYSSLNLFDTYKGKSLEIQKPAVAPRHGLQSLGKVAIARRMPPPANLPSLKAENKGNDPNVSLVPKDGTGWASKQEQSDPKSSDASTAQPPESQPLPASQTPASNQPKRPPAAPENTPLVPSGVKSWAQASVTHGAHGDGGRASSLLSRFSREEFPTLQAAGDQDKAAKERESAEQSSGPGPSLRPQNSTTWRDGGGRGPDELEGPDSKLHHGHDPRGGLQPSGPPQFPPYRGMMPPFMYPPYLPFPPPYGPQGPYRYPTPDGPSRFPRVAGPRGSGPPMRLVEPVGRPSILKEDNLKEFDQLDQENDDGWAGAHEEVDYTEKLKFSDEEDGRDSDEEGAEGHRDSQSASGEERPPEADGKKGNSPNSEPPTPKTAWAETSRPPETEPGPPAPKPPLPPPHRGPAGNWGPPGDYPDRGGPPCKPPAPEDEDEAWRQRRKQSSSEISLAVERARRRREEEERRMQEERRAACAEKLKRLDEKFGAPDKRLKAEPAAPPAAPSTPAPPPAVPKELPAPPAPPPASAPTPETEPEEPAQAPPAQSTPTPGVAAAPTLVSGGGSTSSTSSGSFEASPVEPQLPSKEGPEPPEEVPPPTTPPVPKVEPKGDGIGPTRQPPSQGLGYPKYQKSLPPRFQRQQQEQLLKQQQQHQWQQHQQGSAPPTPVPPSPPQPVTLGAVPAPQAPPPPPKALYPGALGRPPPMPPMNFDPRWMMIPPYVDPRLLQGRPPLDFYPPGVHPSGLVPRERSDSGGSSSEPFDRHAPAMLRERGTPPVDPKLAWVGDVFTATPAEPRPLTSPLRQAADEDDKGMRSETPPVPPPPPYLASYPGFPENGAPGPPISRFPLEEPGPRPLPWPPGSDEVAKIQTPPPKKEPPKEETAQLTGPEAGRKPARGVGSGGQGPPPPRRESRTETRWGPRPGSSRRGIPPEEPGAPPRRAGPIKKPPPPTKVEELPPKPLEQGDETPKPPKPDPLKITKGKLGGPKETPPNGNLSPAPRLRRDYSYERVGPTSCRGRGRGEYFARGRGFRGTYGGRGRGARSREFRSYREFRGDDGRGGGTGGPNHPPAPRGRTASETRSEGSEYEEIPKRRRQRGSETGSETHESDLAPSDKEAPTPKEGTLTQVPLAPPPPGAPPSPAPARFTARGGRVFTPRGVPSRRGRGGGRPPPQVCPGWSPPAKSLAPKKPPTGPLPPSKEPLKEKLIPGPLSPVARGGSNGGSNVGMEDGERPRRRRHGRAQQQDKPPRFRRLKQERENAARGSEGKPSLTLPASAPGPEEALTTVTVAPAPRRAAAKSPDLSNQNSDQANEEWETASESSDFTSERRGDKEAPPPVLLTPKAVGTPGGGGGGAVPGISAMSRGDLSQRAKDLSKRSFSSQRPGMERQNRRPGPGGKAGSSGSSSGGGGGGPGGRTGPGRGDKRSWPSPKNRSRPPEERPPGLPLPPPPPSSSAVFRLDQVIHSNPAGIQQALAQLSSRQGSVTAPGGHPRHKPGLPQAPQGPSPRPPTRYEPQRVNSGLSSDPHFEEPGPMVRGVGGTPRDSAGVSPFPPKRRERPPRKPELLQEESLPPPHSSGFLGSKPEGPGPQAESRDTGTEALTPHIWNRLHTATSRKSYRPSSMEPWMEPLSPFEDVAGTEMSQSDSGVDLSGDSQVSSGPCSQRSSPDGGLKGAAEGPPKRPGGSSPLNAVPCEGPPGSEPPRRPPPAPHDGDRKELPREQPLPPGPIGTERSQRTDRGTEPGPIRPSHRPGPPVQFGTSDKDSDLRLVVGDSLKAEKELTASVTEAIPVSRDWELLPSAAASAEPQSKNLDSGHCVPEPSSSGQRLYPEVFYGSAGPSSSQISGGAMDSQLHPNSGGFRPGTPSLHPYRSQPLYLPPGPAPPSALLSGVALKGQFLDFSTMQATELGKLPAGGVLYPPPSFLYSPAFCPSPLPDTSLLQVRQDLPSPSDFYSTPLQPGGQSGFLPSGAPAQQMLLPMVDSQLPVVNFGSLPPAPPPAPPPLSLLPVGPALQPPSLAVRPPPAPATRVLPSPARPFPASLGRAELHPVELKPFQDYQKLSSNLGGPGSSRTPPTGRSFSGLNSRLKATPSTYSGVFRTQRVDLYQQASPPDALRWIPKPWERTGPPPREGPSRRAEEPGSRGDKEPGLPPPR

SEQ ID NO: 59238 - protein, 2157 aa, Homo sapiens
MSDRSGPTAKGKDGKKYSSLNLFDTYKGKSLEIQKPAVAPRHGLQSLGKVAIARRMPPPANLPSLKAENKGNDPNVSLVPKDGTGWASKQEQSDPKSSDASTAQPLESQPLPASQTPASNQPKRPPAAPENTPLVPSGVKSWAQASVTHGAHGDGGRASSLLSRFSREEFPTLQAAGDQDKAAKERESAEQSSGPGPSLRPQNSTTWRDGGGRGPDELEGPDSKLHHGHDPRGGLQPSGPPQFPPYRGMMPPFMYPPYLPFPPPYGPQGPYRYPTPDGPSRFPRVAGPRGSGPPMRLVEPVGRPSILKEDNLKEFDQLDQENDDGWAGAHEEVDYTEKLKFSDEEDGRDSDEEGAEGHRDSQSASGEERPPEADGKKGNSPNSEPPTPKTAWAETSRPPETEPGPPAPKPPLPPPHRGPAGNWGPPGDYPDRGGPPCKPPAPEDEDEAWRQRRKQSSSEISLAVERARRRREEEERRMQEERRAACAEKLKRLDEKFGAPDKRLKAEPAAPPAAPSTPAPPPAVPKELPAPPAPPPASAPTPEKEPEEPAQAPPAQSTPTPGVAAAPTLVSGGGSTSSTSSGSFEASPVEPQLPSKEGPEPPEEVPPPTTPPVPKVEPKGDGIGPTRQPPSQGLGYPKYQKSLPPRFQRQQQEQLLKQQQQHQWQQHQQGSAPPTPVPPSPPQPVTLGAVPAPQAPPPPPKALYPGALGRPPPMPPMNFDPRWMMIPPYVDPRLLQGRPPLDFYPPGVHPSGLVPRERSDSGGSSSEPFDRHAPAMLRERGTPPVDPKLAWVGDVFTATPAEPRPLTSPLRQAADEDDKGMRSETPPVPPPPPYLASYPGFPENGAPGPPISRFPLEEPGPRPLPWPPGSDEVAKIQTPPPKKEPPKEETAQLTGPEAGRKPARGVGSGGQGPPPPRRESRTETRWGPRPGSSRRGIPPEEPGAPPRRAGPIKKPPPPTKVEELPPKPLEQGDETPKPPKPDPLKITKGKLGGPKETPPNGNLSPAPRLRRDYSYERVGPTSCRGRGRGEYFARGRGFRGTYGGRGRGARSREFRSYREFRGDDGRGGGTGGPNHPPAPRGRTASETRSEGSEYEEIPKRRRQRGSETGSETHESDLAPSDKEAPTPKEGTLTQVPLAPPPPGAPPSPAPARFTARGGRVFTPRGVPSRRGRGGGRPPPQVCPGWSPPAKSLAPKKPPTGPLPPSKEPLKEKLIPGPLSPVARGGSNGGSNVGMEDGERPRRRRHGRAQQQDKPPRFRRLKQERENAARGSEGKPSLTLPASAPGPEEALTTVTVAPAPRRAAAKSPDLSNQNSDQANEEWETASESSDFTSERRGDKEAPPPVLLTPKAVGTPGGGGGGAVPGISAMSRGDLSQRAKDLSKRSFSSQRPGMERQNRRPGPGGKAGSSGSSSGGGGGGPGGRTGPGRGDKRSWPSPKNRSRPPEERPPGLPLPPPPPSSSAVFRLDQVIHSNPAGIQQALAQLSSRQGSVTAPGGHPRHKPGPPQAPQGPSPRPPTRYEPQRVNSGLSSDPHFEEPGPMVRGVGGTPRDSAGVSPFPPKRRERPPRKPELLQEESLPPPHSSGFLGSKPEGPGPQAESRDTGTEALTPHIWNRLHTATSRKSYRPSSMEPWMEPLSPFEDVAGTEMSQSDSGVDLSGDSQVSSGPCSQRSSPDGGLKGAAEGPPKRPGGSSPLNAVPCEGPPGSEPPRRPPPAPHDGDRKELPREQPLPPGPIGTERSQRTDRGTEPGPIRPSHRPGPPVQFGTSDKDSDLRLVVGDSLKAEKELTASVTEAIPVSRDWELLPSAAASAEPQSKNLDSGHCVPEPSSSGQRLYPEVFYGSAGPSSSQISGGAMDSQLHPNSGGFRPGTPSLHPYRSQPLYLPPGPAPPSALLSGVALKGQFLDFSTMQATELGKLPAGGVLYPPPSFLYSPAFCPSPLPDTSLLQVRQDLPSPSDFYSTPLQPGGQSGFLPSGAPAQQMLLPMVDSQLPVVNFGSLPPAPPPAPPPLSLLPVGPALQPPSLAVRPPPAPATRVLPSPARPFPASLGRAELHPVELKPFQDYQKLSSNLGGPGSSRTPPTGRSFSGLNSRLKATPSTYSGVFRTQRVDLYQQASPPDALRWIPKPWERTGPPPREGPSRRAEEPGSRGDKEPGLPPPR

SEQ ID NO: 59239 - protein, 2157 aa, Homo sapiens; identical to SEQ ID NO: 59235

SEQ ID NO: 59240 - protein, 2149 aa, Homo sapiens
MSDRSGPTAKGKDGKKYSSLNLFDTYKGKSLEIQKPAVAPRHGLQSLGKVAIARRMPPPANLPSLKAENKGNDPNVSLVPKDGTGWASKQEQSDPKSSDASTAQPPESQPLPASQTPASNQPKRPPAAPENTPLVPSGVKSWAQASVTHGAHGDGGRASSLLSRFSREEFPTLQAAGDQDKAAKERESAEQSSGPGPSLRPQNSTTWRDGGGRGPDELEGPDSKLHHGHDPRGGLQPSGPPQFPPYRGMMPPFMYPPYLPFPPPYGPQGPYRYPTPDGPSRFPRVAGPRGSGPPMRLVEPVGRPSILKEDNLKEFDQLDQENDDGWAGAHEEVDYTEKLKFSDEEDGRDSDEEGAEGHRDSQSASGEERPPEADGKKGNSPNSEPPTPKTAWAETSRPPETEPGPPAPKPPLPPPHRGPAGNWGPPGDYPDRGGPPCKPPAPEDEDEAWRQRRKQSSSEISLAVERARRRREEEERRMQEERRAACAEKLKRLDEKFGAPDKRLKAEPAAPPAAPSTPAPPPAVPKELPAPPAPPPASAPTPETEPEEPAQAPPAQSTPTPGVAAAPTLVSGGGSTSSTSSGSFEASPVEPQLPSKEGPEPPEEVPPPTTPPVPKVEPKGDGIGPTRQPPSQGLGYPKYQKSLPPRFQRQQQEQLLKQQQQHQWQQHQQGSAPPTPVPPSPPQPVTLGAVPAPQAPPPPPKALYPGALGRPPPMPPMNFDPRWMMIPPYVDPRLLQGRPPLDFYPPGVHPSGLVPRERSDSGGSSSEPFDRHAPAMLRERGTPPVDPKLAWVGDVFTATPAEPRPLTSPLRQAADEDDKGMRSETPPVPPPPPYLASYPGFPENGAPGPPISRFPLEEPGPRPLPWPPGSDEVAKIQTPPPKKEPPKEETAQLTGPEAGRKPARGVGSGGQGPPPPRRESRTETRWGPRPGSSRRGIPPEEPGAPPRRAGPIKKPPPPTKVEELPPKPLEQGDETPKPPKPDPLKITKGKLGGPKETPPNGNLSPAPRLRRDYSYERVGPTSCRGRGRGEYFARGRGFRGTYGGRGRGAAGNSAVTESFEEMMGVEVGQGDQTTLLLPEAALPARHGARVQSMRKSPSGAGSGAQKQAARPMRVIWLLQTRRLPHPRREHSPRSRSPTTRSPTFPAPARFTPGVGESSLPEGISPGPRRREPPQVCPGWSPPAKSLAPKKPPTGPLPPSKEPLKEKLIPGPLSPVARGGSNGGSNVGMEDGERPRRRRHGRAQQQDKPPRFRRLKQERENAARGSEGKPSLTLPASAPGPEEALTTVTVAPAPRRAAAKSPDLSNQNSDQANEEWETASESSDFTSERRGDKEAPPPVLLTPKAVGTPGGGGGGAVPGISAMSRGDLSQRAKDLSKRSFSSQRPGMERQNRRPGPGGKAGSSGSSSGGGGGGPGGRTGPGRGDKRSWPSPKNRSRPPEERPPGLPLPPPPPSSSAVFRLDQVIHSNPAGIQQALAQLSSRQGSVTAPGGHPRHKPGLPQAPQGPSPRPPTRYEPQRVNSGLSSDPHFEEPGPMVRGVGGTPRDSAGVSPFPPKRRERPPRKPELLQEESLPPPHSSGFLGSKPEGPGPQAESRDTGTEALTPHIWNRLHTATSRKSYRPSSMEPWMEPLSPFEDVAGTEMSQSDSGVDLSGDSQVSSGPCSQRSSPDGGLKGAAEGPPKRPGGSSPLNAVPCEGPPGSEPPRRPPPAPHDGDRKELPREQPLPPGPIGTERSQRTDRGTEPGPIRPSHRPGPPVQFGTSDKDSDLRLVVGDSLKAEKELTASVTEAIPVSRDWELLPSAAASAEPQSKNLDSGHCVPEPSSSGQRLYPEVFYGSAGPSSSQISGGHGLSITSKQWRRPGTPSLHPYRSQPLYLPPGPAPPSALLSGLALKGQFLDFSTMQATELGKLPAGGVLYPPPSFLYSPAFCPSPLPDTSLLQVRQDLPSPSDFYSTPLQPGGQSGFLPSGAPAQQMLLPMVDSQLPVVNFGSLPPAPPPAPPPLSLLPVGPALQPPSLAVRPPPAPATRVLPSPARPFPASLGRAELHPVELKPFQDYQKLSSNLGGPGSSRTPPTGRSFSGLNSRLKATPSTYSGVFRTQRVDLYQQASPPDALRWIPKPWERTGPPPREGPSRRAEEPGSRGDKEPGLPPPR

SEQ ID NO: 59241 - protein, 2157 aa, Homo sapiens; identical to SEQ ID NO: 59235

SEQ ID NO: 59242 - protein, 2157 aa, Homo sapiens; identical to SEQ ID NO: 59235

SEQ ID NO: 59243 - protein, 2157 aa, Homo sapiens
MSDRSGPTAKGKDGKKYSSLNLFDTYKGKSLEIQKPAVAPRHGLQSLGKVAIARRMPPPANLPSLKAENKGNDPNVSLVPKDGTGWASKQEQSDPKSSDASTAQPPESQPLPASQTPASNQPKRPPAAPENTPLVPSGVKSWAQASVTHGAHGDGGRASSLLSRFSREEFPTLQAAGDQDKAAKERESAEQSSGPGPSLRPQNSTTWRDGGGRGPDELEGPDSKLHHGHDPRGGLQPSGPPQFPPYRGMMPPFMYPPYLPFPPPYGPQGPYRYPTPDGPSRFPRVAGPRGSGPPMRLVEPVGRPSILKEDNLKEFDQLDQENDDGWAGAHEEVDYTEKLKFSDEEDGRDSDEEGAEGHRDSQSASGEERPPEADGKKGNSPNSEPPTPKTAWAETSRPPETEPGPPAPKPPLPPPHRGPAGNWGPPGDYPDRGGPPCKPPAPEDEDEAWRQRRKQSSSEISLAVERARRRREEEERRMQEERRAACAEKLKRLDEKFGAPDKRLKAEPAAPPAAPSTPAPPPAVPKELPAPPAPPPASAPTPEKEPEEPAQAPPAQSTPTPGVAAAPTLVSGGGSTSSTSSGSFEASPVEPQLPSKEGPEPPEEVPPPTTPPVPKVEPKGDGIGPTRQPPSQGLGYPKYQKSLPPRFQRQQQEQLLKQQQQHQWQQHQQGSAPPTPVPPSPPQPVTLGAVPAPQAPPPPPKALYPGALGRPPPMPPMNFDPRWMMIPPYVDPRLLQGRPPLDFYPPGVHPSGLVPRERSDSGGSSSEPFDRHAPAMLRERGTPPVDPKLAWVGDVFTATPAEPRPLTSPLRQAADEDDKGMRSETPPVPPPPPYLASYPGFPENGAPGPPISRFPLEEPGPRPLPWPPGSDEVAKIQTPPPKKEPPKEETAQLTGPEAGRKPARGVGSGGQGPPPPRRESRTETRWGPRPGSSRRGIPPEEPGAPPRRAGPIKKPPPPTKVEELPPKPLEQGDETPKPPKPDPLKITKGKLGGPKETPPNGNLSPAPRLRRDYSYERVGPTSCRGRGRGEYFARGRGFRGTYGGRGRGARSREFRSYREFRGDDGRGGGTGGPNHPPAPRGRTASETRSEGSEYEEIPKRRRQRGSETGSETHESDLAPSDKEAPTPKEGTLTQVPLAPPPPGAPPSPAPARFTARGGRVFTPRGVPSRRGRGGGRPPPQVCPGWSPPAKSLAPKKPPTGPLPPSKEPLKEKLIPGPLSPVARGGSNGGSNVGMEDGERPRRRRHGRAQQQDKPPRFRRLKQERENAARGSEGKPSLTLPASAPGPEEALTTVTVAPAPRRAAAKSPDLSNQNSDQANEEWETASESSDFTSERRGDKEAPPPVLLTPKAVGTPGGGGGGAVPGISAMSRGDLSQRAKDLSKRSFSSQRPGMERQNRRPGPGGKAGSSGSSSGGGGGGPGGRTGPGRGDKRSWPSPKNRSRPPEERPPGLPLPPPPPSSSAVFRLDQVIHSNPAGIQQALAQLSSRQGSVTAPGGHPRHKPGPPQAPQGPSPRPPTRYEPQRVNSGLSSDPHFEEPGPMVRGVGGTPRDSAGVSPFPPKRRERPPRKPELLQEESLPPPHSSGFLGSKPEGPGPQAESRDTGTEALTPHIWNRLHTATSRKSYRPSSMEPWMEPLSPFEDVAGTEMSQSDSGVDLSGDSQVSSGPCSQRSSPDGGLKGAAEGPPKRPGGSSPLNAVPCEGPPGSEPPRRPPPAPHDGDRKELPREQPLPPGPIGTERSQRTDRGTEPGPIRPSHRPGPPVQFGTSDKDSDLRLVVGDSLKAEKELTASVTEAIPVSRDWELLPSAAASAEPQSKNLDSGHCVPEPSSSGQRLYPEVFYGSAGPSSSQISGGAMDSQLHPNSGGFRPGTPSLHPYRSQPLYLPPGPAPPSALLSGVALKGQFLDFSTMQATELGKLPAGGVLYPPPSFLYSPAFCPSPLPDTSLLQVRQDLPSPSDFYSTPLQPGGQSGFLPSGAPAQQMLLPMVDSQLPVVNFGSLPPAPPPAPPPLSLLPVGPALQPPSLAVRPPPAPATRVLPSPARPFPASLGRAELHPVELKPFQDYQKLSSNLGGPGSSRTPPTGRSFSGLNSRLKATPSTYSGVFRTQRVDLYQQASPPDALRWIPKPWERTGPPPREGPSRRAEEPGSRGDKEPGLPPPR

SEQ ID NO: 59244 - protein, 2138 aa, Homo sapiens
MSDRSGPTAKGKDGKKYSSLNLFDTYKGKSLEIQKPAVAPRHGLQSLGKVAIARRMPPPANLPSLKAENKGNDPNVSLVPKDGTGWASKQEQSDPKSSDASTAQPPESQPLPASQTPASNQPKRPPAAPENTPLVPSGVKSWAQASVTHGAHGDGGRASSLLSRFSREEFPTLQAAGDQDKAAKERESAEQSSGPGPSLRPQNSTTWRDGGGRGPDELEGPDSKLHHGHDPRGGLQPSGPPQFPPYRGMMPPFMYPPYLPFPPPYGPQGPYRYPTPDGPSRFPRVAGPRGSGPPMRLVEPVGRPSILKEDNLKEFDQLDQENDDGWAGAHEEVDYTEKLKFSDEEDGRDSDEEGAEGHRDSQSASGEERPPEADGKKGNSPNSEPPTPKTAWAETSRPPETEPGPPAPKPPLPPPGDYPDRGGPPCKPPAPEDEDEAWRQRRKQSSSEISLAVERARRRREEEERRMQEERRAACAEKLKRLDEKFGAPDKRLKAEPAAPPAAPSTPAPPPAVPKELPAPPAPPPASAPTPETEPEEPAQAPPAQSTPTPGVAAAPTLVSGGGSTSSTSSGSFEASPVEPQLPSKEGPEPPEEVPPPTTPPVPKVEPKGDGIGPTRQPPSQGLGYPKYQKSLPPRFQRQQQEQLLKQQQQHQWQQHQQGSAPPTPVPPSPPQPVTLGAVPAPQAPPPPPKALYPGALGRPPPMPPMNFDPRWMMIPPYVDPRLLQGRPPLDFYPPGVHPSGLVPRERSDSGGSSSEPFDRHAPAMLRERGTPPVDPKLAWVGDVFTATPAEPRPLTSPLRQAADEDDKGMRSETPPVPPPPPYLASYPGFPENGAPGPPISRFPLEEPGPRPLPWPPGSDEVAKIQTPPPKKEPPKEETAQLTGPEAGRKPARGVGSGGQGPPPPRRESRTETRWGPRPGSSRRGIPPEEPGAPPRRAGPIKKPPPPTKVEELPPKPLEQGDETPKPPKPDPLKITKGKLGGPKETPPNGNLSPAPRLRRDYSYERVGPTSCRGRGRGEYFARGRGFRGTYGGRGRGAAGNSAVTESFEEMMGVEVGQGDQTTLLLPEAALPARHGARVQSMRKSPSGAGSGAQKQAARPMRVIWLLQTRRLPHPRREHSPRSRSPTTRSPTFPAPARFTPGVGESSLPEGISPGPRRREPPQVCPGWSPPAKSLAPKKPPTGPLPPSKEPLKEKLIPGPLSPVARGGSNGGSNVGMEDGERPRRRRHGRAQQQDKPPRFRRLKQERENAARGSEGKPSLTLPASAPGPEEALTTVTVAPAPRRAAAKSPDLSNQNSDQANEEWETASESSDFTSERRGDKEAPPPVLLTPKAVGTPGGGGGGAVPGISAMSRGDLSQRAKDLSKRSFSSQRPGMERQNRRPGPGGKAGSSGSSSGGGGGGPGGRTGPGRGDKRSWPSPKNRSRPPEERPPGLPLPPPPPSSSAVFRLDQVIHSNPAGIQQALAQLSSRQGSVTAPGGHPRHKPGLPQAPQGPSPRPPTRYEPQRVNSGLSSDPHFEEPGPMVRGVGGTPRDSAGVSPFPPKRRERPPRKPELLQEESLPPPHSSGFLGSKPEGPGPQAESRDTGTEALTPHIWNRLHTATSRKSYRPSSMEPWMEPLSPFEDVAGTEMSQSDSGVDLSGDSQVSSGPCSQRSSPDGGLKGAAEGPPKRPGGSSPLNAVPCEGPPGSEPPRRPPPAPHDGDRKELPREQPLPPGPIGTERSQRTDRGTEPGPIRPSHRPGPPVQFGTSDKDSDLRLVVGDSLKAEKELTASVTEAIPVSRDWELLPSAAASAEPQSKNLDSGHCVPEPSSSGQRLYPEVFYGSAGPSSSQISGGHGLSITSKQWRRPGTPSLHPYRSQPLYLPPGPAPPSALLSGLALKGQFLDFSTMQATELGKLPAGGVLYPPPSFLYSPAFCPSPLPDTSLLQVRQDLPSPSDFYSTPLQPGGQSGFLPSGAPAQQMLLPMVDSQLPVVNFGSLPPAPPPAPPPLSLLPVGPALQPPSLAVRPPPAPATRVLPSPARPFPASLGRAELHPVELKPFQDYQKLSSNLGGPGSSRTPPTGRSFSGLNSRLKATPSTYSGVFRTQRVDLYQQASPPDALRWIPKPWERTGPPPREGPSRRAEEPGSRGDKEPGLPPPR

SEQ ID NO: 59245 - protein, 2157 aa, Homo sapiens; identical to SEQ ID NO: 59235

SEQ ID NO: 59246 - protein, 2157 aa, Homo sapiens; identical to SEQ ID NO: 59238

SEQ ID NO: 59247 - protein, 2157 aa, Homo sapiens; identical to SEQ ID NO: 59243

SEQ ID NO: 59248 - protein, 2157 aa, Homo sapiens; identical to SEQ ID NO: 59237

SEQ ID NO: 59249 - protein, 2149 aa, Homo sapiens
MSDRSGPTAKGKDGKKYSSLNLFDTYKGKSLEIQKPAVAPRHGLQSLGKVAIARRMPPPANLPSLKAENKGNDPNVSLVPKDGTGWASKQEQSDPKSSDASTAQPPESQPLPASQTPASNQPKRPPAAPENTPLVPSGVKSWAQASVTHGAHGDGGRASSLLSRFSREEFPTLQAAGDQDKAAKERESAEQSSGPGPSLRPQNSTTWRDGGGRGPDELEGPDSKLHHGHDPRGGLQPSGPPQFPPYRGMMPPFMYPPYLPFPPPYGPQGPYRYPTPDGPSRFPRVAGPRGSGPPMRLVEPVGRPSILKEDNLKEFDQLDQENDDGWAGAHEEVDYTEKLKFSDEEDGRDSDEEGAEGHRDSQSASGEERPPEADGKKGNSPNSEPPTPKTAWAETSRPPETEPGPPAPKPPLPPPHRGPAGNWGPPGDYPDRGGPPCKPPAPEDEDEAWRQRRKQSSSEISLAVERARRRREEEERRMQEERRAACAEKLKRLDEKFGAPDKRLKAEPAAPPAAPSTPAPPPAVPKELPAPPAPPPASAPTPETEPEEPAQAPPAQSTPTPGVAAAPTLVSGGGSTSSTSSGSFEASPVEPQLPSKEGPEPPEEVPPPTTPPVPKVEPKGDGIGPTRQPPSQGLGYPKYQKSLPPRFQRQQQEQLLKQQQQHQWQQHQQGSAPPTPVPPSPPQPVTLGAVPAPQAPPPPPKALYPGALGRPPPMPPMNFDPRWMMIPPYVDPRLLQGRPPLDFYPPGVHPSGLVPRERSDSGGSSSEPFDRHAPAMLRERGTPPVDPKLAWVGDVFTATPAEPRPLTSPLRQAADEDDKGMRSETPPVPPPPPYLASYPGFPENGAPGPPISRFPLEEPGPRPLPWPPGSDEVAKIQTPPPKKEPPKEETAQLTGPEAGRKPARGVGSGGQGPPPPRRESRTETRWGPRPGSSRRGIPPEEPGAPPRRAGPIKKPPPPTKVEELPPKPLEQGDETPKPPKPDPLKITKGKLGGPKETPPNGNLSPAPRLRRDYSYERVGPTSCRGRGRGEYFARGRGFRGTYGGRGRGAAGNSAVTESFEEMMGVEVGQGDQTTLLLPEAALPARHGARVQSMRKSPSGAGSGAQKQAARPMRVIWLLQTRRLPHPRREHSPRSRSPTTRSPTFPAPARFTPGVGESSLPEGISPGPRRREPPQVCPGWSPPAKSLAPKKPPTGPLPPSKEPLKEKLIPGPLSPVARGGSNGGSNVGMEDGERPRRRRHGRAQQQDKPPRFRRLKQERENAARGSEGKPSLTLPASAPGPEEALTTVTVAPAPRRAAAKSPDLSNQNSDQANEEWETASESSDFTSERRGDKEAPPPVLLTPKAVGTPGGGGGGAVPGISAMSRGDLSQRAKDLSKRSFSSQRPGMERQNRRPGPGGKAGSSGSSSGGGGGGPGGRTGPGRGDKRSWPSPKNRSRPPEERPPGLPLPPPPPSSSAVFRLDQVIHSNPAGIQQALAQLSSRQGSVTAPGGHPRHKPGLPQAPQGPSPRPPTRYEPQRVNSGLSSDPHFEEPGPMVRGVGGTPRDSAGVSPFPPKRRERPPRKPELLQEESLPPPHSSGFLGSKPEGPGPQAESRDTGTEALTPHIWNRLHTATSRKSYRPSSMEPWMEPLSPFEDVAGTEMSQSDSGVDLSGDSQVSSGPCSQRSSPDGGLKGAAEGPPKRPGGSSPLNAVPCEGPPGSEPPRRPPPAPHDGDRKELPREQPLPPGPIGTERSQRTDRGTEPGPIRPSHRPGPPVQFGTSDKDSDLRLVVGDSLKAEKELTASVTEAIPVSRDWELLPSAAASAEPQSKNLDSGHCVPEPSSSGQRLYPEVFYGSAGPSSSQISGGHGLSITSKQWRRPGTPSLHPYRSQPLYLPPGPAPPSALLSGVALKGQFLDFSTMQATELGKLPAGGVLYPPPSFLYSPAFCPSPLPDTSLLQVRQDLPSPSDFYSTPLQPGGQSGFLPSGAPAQQMLLPMVDSQLPVVNFGSLPPAPPPAPPPLSLLPVGPALQPPSLAVRPPPAPATRVLPSPARPFPASLGRAELHPVELKPFQDYQKLSSNLGGPGSSRTPPTGRSFSGLNSRLKATPSTYSGVFRTQRVDLYQQASPPDALRWIPKPWERTGPPPREGPSRRAEEPGSRGDKEPGLPPPR

SEQ ID NO: 59250 - protein, 549 aa, Homo sapiens
MSDRSGPTAKGKDGKKYSSLNLFDTYKGKSLEIQKPAVAPRHGLQSLGKVAIARRMPPPANLPSLKAENKGNDPNVSLVPKDGTGWASKQEQSDPKSSDASTAQPPESQPLPASQTPASNQPKRPPAAPENTPLVPSGVKSWAQASVTHGAHGDGGRASSLLSRFSREEFPTLQAAGDQDKAAKERESAEQSSGPGPSLRPQNSTTWRDGGGRGPDELEGPDSKLHHGHDPRGGLQPSGPPQFPPYRGMMPPFMYPPYLPFPPPYGPQGPYRYPTPDGPSRFPRVAGPRGSGPPMRLVEPVGRPSILKEDNLKEFDQLDQENDDGWAGAHEEVDYTEKLKFSDEEDGRDSDEEGAEGHRDSQSASGEERPPEADGKKGNSPNSEPPTPKTAWAETSRPPETEPGPPAPKPPLPPPHRGPAGNWGPPGDYPDRGGPPCKPPAPEDEDEAWRQRRKQSSSEISLAVERARRRREEEERRMQEERRAACAEKLKRLDEKFGAPDKRLKAEPAAPPAAPSTPAPPPAASEVPLMEDSRGQQRDPPRGLEAPHP

SEQ ID NO: 59251 - protein, 2138 aa, Homo sapiens
MSDRSGPTAKGKDGKKYSSLNLFDTYKGKSLEIQKPAVAPRHGLQSLGKVAIARRMPPPANLPSLKAENKGNDPNVSLVPKDGTGWASKQEQSDPKSSDASTAQPPESQPLPASQTPASNQPKRPPAAPENTPLVPSGVKSWAQASVTHGAHGDGGRASSLLSRFSREEFPTLQAAGDQDKAAKERESAEQSSGPGPSLRPQNSTTWRDGGGRGPDELEGPDSKLHHGHDPRGGLQPSGPPQFPPYRGMMPPFMYPPYLPFPPPYGPQGPYRYPTPDGPSRFPRVAGPRGSGPPMRLVEPVGRPSILKEDNLKEFDQLDQENDDGWAGAHEEVDYTEKLKFSDEEDGRDSDEEGAEGHRDSQSASGEERPPEADGKKGNSPNSEPPTPKTAWAETSRPPETEPGPPAPKPPLPPPGDYPDRGGPPCKPPAPEDEDEAWRQRRKQSSSEISLAVERARRRREEEERRMQEERRAACAEKLKRLDEKFGAPDKRLKAEPAAPPAAPSTPAPPPAVPKELPAPPAPPPASAPTPEKEPEEPAQAPPAQSTPTPGVAAAPTLVSGGGSTSSTSSGSFEASPVEPQLPSKEGPEPPEEVPPPTTPPVPKVEPKGDGIGPTRQPPSQGLGYPKYQKSLPPRFQRQQQEQLLKQQQQHQWQQHQQGSAPPTPVPPSPPQPVTLGAVPAPQAPPPPPKALYPGALGRPPPMPPMNFDPRWMMIPPYVDPRLLQGRPPLDFYPPGVHPSGLVPRERSDSGGSSSEPFDRHAPAMLRERGTPPVDPKLAWVGDVFTATPAEPRPLTSPLRQAADEDDKGMRSETPPVPPPPPYLASYPGFPENGAPGPPISRFPLEEPGPRPLPWPPGSDEVAKIQTPPPKKEPPKEETAQLTGPEAGRKPARGVGSGGQGPPPPRRESRTETRWGPRPGSSRRGIPPEEPGAPPRRAGPIKKPPPPTKVEELPPKPLEQGDETPKPPKPDPLKITKGKLGGPKETPPNGNLSPAPRLRRDYSYERVGPTSCRGRGRGEYFARGRGFRGTYGGRGRGAAGNSAVTESFEEMMGVEVGQGDQTTLLLPEAALPARHGARVQSMRKSPSGAGSGAQKQAARPMRVIWLLQTRRLPHPRREHSPRSRSPTTRSPTFPAPARFTPGVGESSLPEGISPGPRRREPPQVCPGWSPPAKSLAPKKPPTGPLPPSKEPLKEKLIPGPLSPVARGGSNGGSNVGMEDGERPRRRRHGRAQQQDKPPRFRRLKQERENAARGSEGKPSLTLPASAPGPEEALTTVTVAPAPRRAAAKSPDLSNQNSDQANEEWETASESSDFTSERRGDKEAPPPVLLTPKAVGTPGGGGGGAVPGISAMSRGDLSQRAKDLSKRSFSSQRPGMERQNRRPGPGGKAGSSGSSSGGGGGGPGGRTGPGRGDKRSWPSPKNRSRPPEERPPGLPLPPPPPSSSAVFRLDQVIHSNPAGIQQALAQLSSRQGSVTAPGGHPRHKPGPPQAPQGPSPRPPTRYEPQRVNSGLSSDPHFEEPGPMVRGVGGTPRDSAGVSPFPPKRRERPPRKPELLQEESLPPPHSSGFLGSKPEGPGPQAESRDTGTEALTPHIWNRLHTATSRKSYRPSSMEPWMEPLSPFEDVAGTEMSQSDSGVDLSGDSQVSSGPCSQRSSPDGGLKGAAEGPPKRPGGSSPLNAVPCEGPPGSEPPRRPPPAPHDGDRKELPREQPLPPGPIGTERSQHTDRGTEPGPIRPSHRPGPPVQFGTSDKDSDLRLVVGDSLKAEKELTASVTEAIPVSRDWELLPSAAASAEPQSKNLDSGHCVPEPSSSGQRLYPEVFYGSAGPSSSQISGGHGLSVTSKQWRRPGTPSLHPYRSQPLYLPPGPAPPSALLSGVALKGQFLDFSTMQATELGKLPAGGVLYPPPSFLYSPAFCPSPLPDTSLLQVRQDLPSPSDFYSTPLQPGGQSGFLPSGAPAQQMLLPMVDSQLPVVNFGSLPPAPPPAPPSLSLLPVGPALQPPSLAVRPPPAPATRVLPSPARPFPASLGRAELHPVELKPFQDYQKLSSNLGGPGSSRTPPTGRSFSGLNSRLKATPSTYSGVFRTQRVDLYQQASPPDALRWIPKPWERTGPPPREGPSRRAEEPGSRGDKEPGLPPPR

SEQ ID NO: 59252 - protein, 2149 aa, Homo sapiens
MSDRSGPTAKGKDGKKYSSLNLFDTYKGKSLEIQKPAVAPRHGLQSLGKVAIARRMPPPANLPSLKAENKGNDPNVSLVPKDGTGWASKQEQSDPKSSDASTAQPPESQPLPASQTPASNQPKRPPAAPENTPLVPSGVKSWAQASVTHGAHGDGGRASSLLSRFSREEFPTLQAAGDQDKAAKERESAEQSSGPGPSLRPQNSTTWRDGGGRGPDELEGPDSKLHHGHDPRGGLQPSGPPQFPPYRGMMPPFMYPPYLPFPPPYGPQGPYRYPTPDGPSRFPRVAGPRGSGPPMRLVEPVGRPSILKEDNLKEFDQLDQENDDGWAGAHEEVDYTEKLKFSDEEDGRDSDEEGAEGHRDSQSASGEERPPEADGKKGNSPNSEPPTPKTAWAETSRPPETEPGPPAPKPPLPPPHRGPAGNWGPPGDYPDRGGPPCKPPAPEDEDEAWRQRRKQSSSEISLAVERARRRREEEERRMQEERRAACAEKLKRLDEKFGAPDKRLKAEPAAPPAAPSTPAPPPAVPKELPAPPAPPPASAPTPEKEPEEPAQAPPAQSTPTPGVAAAPTLVSGGGSTSSTSSGSFEASPVEPQLPSKEGPEPPEEVPPPTTPPVPKVEPKGDGIGPTRQPPSQGLGYPKYQKSLPPRFQRQQQEQLLKQQQQHQWQQHQQGSAPPTPVPPSPPQPVTLGAVPAPQAPPPPPKALYPGALGRPPPMPPMNFDPRWMMIPPYVDPRLLQGRPPLDFYPPGVHPSGLVPRERSDSGGSSSEPFDRHAPAMLRERGTPPVDPKLAWVGDVFTATPAEPRPLTSPLRQAADEDDKGMRSETPPVPPPPPYLASYPGFPENGAPGPPISRFPLEEPGPRPLPWPPGSDEVAKIQTPPPKKEPPKEETAQLTGPEAGRKPARGVGSGGQGPPPPRRESRTETRWGPRPGSSRRGIPPEEPGAPPRRAGPIKKPPPPTKVEELPPKPLEQGDETPKPPKPDPLKITKGKLGGPKETPPNGNLSPAPRLRRDYSYERVGPTSCRGRGRGEYFARGRGFRGTYGGRGRGAAGNSAVTESFEEMMGVEVGQGDQTTLLLPEAALPARHGARVQSMRKSPSGAGSGAQKQAARPMRVIWLLQTRRLPHPRREHSPRSRSPTTRSPTFPAPARFTPGVGESSLPEGISPGPRRREPPQVCPGWSPPAKSLAPKKPPTGPLPPSKEPLKEKLIPGPLSPVARGGSNGGSNVGMEDGERPRRRRHGRAQQQDKPPRFRRLKQERENAARGSEGKPSLTLPASAPGPEEALTTVTVAPAPRRAAAKSPDLSNQNSDQANEEWETASESSDFTSERRGDKEAPPPVLLTPKAVGTPGGGGGGAVPGISAMSRGDLSQRAKDLSKRSFSSQRPGMERQNRRPGPGGKAGSSGSSSGGGGGGPGGRTGPGRGDKRSWPSPKNRSRPPEERPPGLPLPPPPPSSSAVFRLDQVIHSNPAGIQQALAQLSSRQGSVTAPGGHPRHKPGPPQAPQGPSPRPPTRYEPQRVNSGLSSDPHFEEPGPMVRGVGGTPRDSAGVSPFPPKRRERPPRKPELLQEESLPPPHSSGFLGSKPEGPGPQAESRDTGTEALTPHIWNRLHTATSRKSYRPSSMEPWMEPLSPFEDVAGTEMSQSDSGVDLSGDSQVSSGPCSQRSSPDGGLKGAAEGPPKRPGGSSPLNAVPCEGPPGSEPPRRPPPAPHDGDRKELPREQPLPPGPIGTERSQHTDRGTEPGPIRPSHRPGPPVQFGTSDKDSDLRLVVGDSLKAEKELTASVTEAIPVSRDWELLPSAAASAEPQSKNLDSGHCVPEPSSSGQRLYPEVFYGSAGPSSSQISGGHGLSVTSKQWRRPGTPSLHPYRSQPLYLPPGPAPPSALLSGVALKGQFLDFSTMQATELGKLPAGGVLYPPPSFLYSPAFCPSPLPDTSLLQVRQDLPSPSDFYSTPLQPGGQSGFLPSGAPAQQMLLPMVDSQLPVVNFGSLPPAPPPAPPSLSLLPVGPALQPPSLAVRPPPAPATRVLPSPARPFPASLGRAELHPVELKPFQDYQKLSSNLGGPGSSRTPPTGRSFSGLNSRLKATPSTYSGVFRTQRVDLYQQASPPDALRWIPKPWERTGPPPREGPSRRAEEPGSRGDKEPGLPPPR

SEQ ID NO: 59253 - protein, 549 aa, Homo sapiens; identical to SEQ ID NO: 59250

SEQ ID NO: 59254 - protein, 549 aa, Homo sapiens; identical to SEQ ID NO: 59250

SEQ ID NO: 59255 - protein, 1382 aa, Homo sapiens
MLRERGTPPVDPKLAWVGDVFTATPAEPRPLTSPLRQAADEDDKGMRSETPPVPPPPPYLASYPGFPENGAPGPPISRFPLEEPGPRPLPWPPGSDEVAKIQTPPPKKEPPKEETAQLTGPEAGRKPARGVGSGGQGPPPPRRESRTETRWGPRPGSSRRGIPPEEPGAPPRRAGPIKKPPPPTKVEELPPKPLEQGDETPKPPKPDPLKITKGKLGGPKETPPNGNLSPAPRLRRDYSYERVGPTSCRGRGRGEYFARGRGFRGTYGGRGRGARSREFRSYREFRGDDGRGGGTGGPNHPPAPRGRTASETRSEGSEYEEIPKRRRQRGSETGSETHESDLAPSDKEAPTPKEGTLTQVPLAPPPPGAPPSPAPARFTARGGRVFTPRGVPSRRGRGGGRPPPQVCPGWSPPAKSLAPKKPPTGPLPPSKEPLKEKLIPGPLSPVARGGSNGGSNVGMEDGERPRRRRHGRAQQQDKPPRFRRLKQERENAARGSEGKPSLTLPASAPGPEEALTTVTVAPAPRRAAAKSPDLSNQNSDQANEEWETASESSDFTSERRGDKEAPPPVLLTPKAVGTPGGGGGGAVPGISAMSRGDLSQRAKDLSKRSFSSQRPGMERQNRRPGPGGKAGSSGSSSGGGGGGPGGRTGPGRGDKRSWPSPKNRSRPPEERPPGLPLPPPPPSSSAVFRLDQVIHSNPAGIQQALAQLSSRQGSVTAPGGHPRHKPGPPQAPQGPSPRPPTRYEPQRVNSGLSSDPHFEEPGPMVRGVGGTPRDSAGVSPFPPKRRERPPRKPELLQEESLPPPHSSGFLGSKPEGPGPQAESRDTGTEALTPHIWNRLHTATSRKSYRPSSMEPWMEPLSPFEDVAGTEMSQSDSGVDLSGDSQVSSGPCSQRSSPDGGLKGAAEGPPKRPGGSSPLNAVPCEGPPGSEPPRRPPPAPHDGDRKELPREQPLPPGPIGTERSQHTDRGTEPGPIRPSHRPGPPVQFGTSDKDSDLRLVVGDSLKAEKELTASVTEAIPVSRDWELLPSAAASAEPQSKNLDSGHCVPEPSSSGQRLYPEVFYGSAGPSSSQISGGAMDSQLHPNSGGFRPGTPSLHPYRSQPLYLPPGPAPPSALLSGVALKGQFLDFSTMQATELGKLPAGGVLYPPPSFLYSPAFCPSPLPDTSLLQVRQDLPSPSDFYSTPLQPGGQSGFLPSGAPAQQMLLPMVDSQLPVVNFGSLPPAPPPAPPSLSLLPVGPALQPPSLAVRPPPAPATRVLPSPARPFPASLGRAELHPVELKPFQDYQKLSSNLGGPGSSRTPPTGRSFSGLNSRLKATPSTYSGVFRTQRVDLYQQASPPDALRWIPKPWERTGPPPREGPSRRAEEPGSRGDKEPGLPPPR

SEQ ID NO: 59256 - protein, 2138 aa, Homo sapiens
MSDRSGPTAKGKDGKKYSSLNLFDTYKGKSLEIQKPAVAPRHGLQSLGKVAIARRMPPPANLPSLKAENKGNDPNVSLVPKDGTGWASKQEQSDPKSSDASTAQPLESQPLPASQTPASNQPKRPPAAPENTPLVPSGVKSWAQASVTHGAHGDGGRASSLLSRFSREEFPTLQAAGDQDKAAKERESAEQSSGPGPSLRPQNSTTWRDGGGRGPDELEGPDSKLHHGHDPRGGLQPSGPPQFPPYRGMMPPFMYPPYLPFPPPYGPQGPYRYPTPDGPSRFPRVAGPRGSGPPMRLVEPVGRPSILKEDNLKEFDQLDQENDDGWAGAHEEVDYTEKLKFSDEEDGRDSDEEGAEGHRDSQSASGEERPPEADGKKGNSPNSEPPTPKTAWAETSRPPETEPGPPAPKPPLPPPGDYPDRGGPPCKPPAPEDEDEAWRQRRKQSSSEISLAVERARRRREEEERRMQEERRAACAEKLKRLDEKFGAPDKRLKAEPAAPPAAPSTPAPPPAVPKELPAPPAPPPASAPTPEKEPEEPAQAPPAQSTPTPGVAAAPTLVSGGGSTSSTSSGSFEASPVEPQLPSKEGPEPPEEVPPPTTPPVPKVEPKGDGIGPTRQPPSQGLGYPKYQKSLPPRFQRQQQEQLLKQQQQHQWQQHQQGSAPPTPVPPSPPQPVTLGAVPAPQAPPPPPKALYPGALGRPPPMPPMNFDPRWMMIPPYVDPRLLQGRPPLDFYPPGVHPSGLVPRERSDSGGSSSEPFDRHAPAMLRERGTPPVDPKLAWVGDVFTATPAEPRPLTSPLRQAADEDDKGMRSETPPVPPPPPYLASYPGFPENGAPGPPISRFPLEEPGPRPLPWPPGSDEVAKIQTPPPKKEPPKEETAQLTGPEAGRKPARGVGSGGQGPPPPRRESRTETRWGPRPGSSRRGIPPEEPGAPPRRAGPIKKPPPPTKVEELPPKPLEQGDETPKPPKPDPLKITKGKLGGPKETPPNGNLSPAPRLRRDYSYERVGPTSCRGRGRGEYFARGRGFRGTYGGRGRGAAGNSAVTESFEEMMGVEVGQGDQTTLLLPEAALPARHGARVQSMRKSPSGAGSGAQKQAARPMRVIWLLQTRRLPHPRREHSPRSRSPTTRSPTFPAPARFTPGVGESSLPEGISPGPRRREPPQVCPGWSPPAKSLAPKKPPTGPLPPSKEPLKEKLIPGPLSPVARGGSNGGSNVGMEDGERPRRRRHGRAQQQDKPPRFRRLKQERENAARGSEGKPSLTLPASAPGPEEALTTVTVAPAPRRAAAKSPDLSNQNSDQANEEWETASESSDFTSERRGDKEAPPPVLLTPKAVGTPGGGGGGAVPGISAMSRGDLSQRAKDLSKRSFSSQRPGMERQNRRPGPGGKAGSSGSSSGGGGGGPGGRTGPGRGDKRSWPSPKNRSRPPEERPPGLPLPPPPPSSSAVFRLDQVIHSNPAGIQQALAQLSSRQGSVTAPGGHPRHKPGPPQAPQGPSPRPPTRYEPQRVNSGLSSDPHFEEPGPMVRGVGGTPRDSAGVSPFPPKRRERPPRKPELLQEESLPPPHSSGFLGSKPEGPGPQAESRDTGTEALTPHIWNRLHTATSRKSYRPSSMEPWMEPLSPFEDVAGTEMSQSDSGVDLSGDSQVSSGPCSQRSSPDGGLKGAAEGPPKRPGGSSPLNAVPCEGPPGSEPPRRPPPAPHDGDRKELPREQPLPPGPIGTERSQRTDRGTEPGPIRPSHRPGPPVQFGTSDKDSDLRLVVGDSLKAEKELTASVTEAIPVSRDWELLPSAAASAEPQSKNLDSGHCVPEPSSSGQRLYPEVFYGSAGPSSSQISGGHGLSITSKQWRRPGTPSLHPYRSQPLYLPPGPAPPSALLSGVALKGQFLDFSTMQATELGKLPAGGVLYPPPSFLYSPAFCPSPLPDTSLLQVRQDLPSPSDFYSTPLQPGGQSGFLPSGAPAQQMLLPMVDSQLPVVNFGSLPPAPPPAPPPLSLLPVGPALQPPSLAVRPPPAPATRVLPSPARPFPASLGRAELHPVELKPFQDYQKLSSNLGGPGSSRTPPTGRSFSGLNSRLKATPSTYSGVFRTQRVDLYQQASPPDALRWIPKPWERTGPPPREGPSRRAEEPGSRGDKEPGLPPPR

SEQ ID NO: 59257 - protein, 2138 aa, Homo sapiens; identical to SEQ ID NO: 59251

SEQ ID NO: 59258 - protein, 2138 aa, Homo sapiens
MSDRSGPTAKGKDGKKYSSLNLFDTYKGKSLEIQKPAVAPRHGLQSLGKVAIARRMPPPANLPSLKAENKGNDPNVSLVPKDGTGWASKQEQSDPKSSDASTAQPPESQPLPASQTPASNQPKRPPAAPENTPLVPSGVKSWAQASVTHGAHGDGGRASSLLSRFSREEFPTLQAAGDQDKAAKERESAEQSSGPGPSLRPQNSTTWRDGGGRGPDELEGPDSKLHHGHDPRGGLQPSGPPQFPPYRGMMPPFMYPPYLPFPPPYGPQGPYRYPTPDGPSRFPRVAGPRGSGPPMRLVEPVGRPSILKEDNLKEFDQLDQENDDGWAGAHEEVDYTEKLKFSDEEDGRDSDEEGAEGHRDSQSASGEERPPEADGKKGNSPNSEPPTPKTAWAETSRPPETEPGPPAPKPPLPPPGDYPDRGGPPCKPPAPEDEDEAWRQRRKQSSSEISLAVERARRRREEEERRMQEERRAACAEKLKRLDEKFGAPDKRLKAEPAAPPAAPSTPAPPPAVPKELPAPPAPPPASAPTPETEPEEPAQAPPAQSTPTPGVAAAPTLVSGGGSTSSTSSGSFEASPVEPQLPSKEGPEPPEEVPPPTTPPVPKVEPKGDGIGPTRQPPSQGLGYPKYQKSLPPRFQRQQQEQLLKQQQQHQWQQHQQGSAPPTPVPPSPPQPVTLGAVPAPQAPPPPPKALYPGALGRPPPMPPMNFDPRWMMIPPYVDPRLLQGRPPLDFYPPGVHPSGLVPRERSDSGGSSSEPFDRHAPAMLRERGTPPVDPKLAWVGDVFTATPAEPRPLTSPLRQAADEDDKGMRSETPPVPPPPPYLASYPGFPENGAPGPPISRFPLEEPGPRPLPWPPGSDEVAKIQTPPPKKEPPKEETAQLTGPEAGRKPARGVGSGGQGPPPPRRESRTETRWGPRPGSSRRGIPPEEPGAPPRRAGPIKKPPPPTKVEELPPKPLEQGDETPKPPKPDPLKITKGKLGGPKETPPNGNLSPAPRLRRDYSYERVGPTSCRGRGRGEYFARGRGFRGTYGGRGRGAAGNSAVTESFEEMMGVEVGQGDQTTLLLPEAALPARHGARVQSMRKSPSGAGSGAQKQAARPMRVIWLLQTRRLPHPRREHSPRSRSPTTRSPTFPAPARFTPGVGESSLPEGISPGPRRREPPQVCPGWSPPAKSLAPKKPPTGPLPPSKEPLKEKLIPGPLSPVARGGSNGGSNVGMEDGERPRRRRHGRAQQQDKPPRFRRLKQERENAARGSEGKPSLTLPASAPGPEEALTTVTVAPAPRRAAAKSPDLSNQNSDQANEEWETASESSDFTSERRGDKEAPPPVLLTPKAVGTPGGGGGGAVPGISAMSRGDLSQRAKDLSKRSFSSQRPGMERQNRRPGPGGKAGSSGSSSGGGGGGPGGRTGPGRGDKRSWPSPKNRSRPPEERPPGLPLPPPPPSSSAVFRLDQVIHSNPAGIQQALAQLSSRQGSVTAPGGHPRHKPGLPQAPQGPSPRPPTRYEPQRVNSGLSSDPHFEEPGPMVRGVGGTPRDSAGVSPFPPKRRERPPRKPELLQEESLPPPHSSGFLGSKPEGPGPQAESRDTGTEALTPHIWNRLHTATSRKSYRPSSMEPWMEPLSPFEDVAGTEMSQSDSGVDLSGDSQVSSGPCSQRSSPDGGLKGAAEGPPKRPGGSSPLNAVPCEGPPGSEPPRRPPPAPHDGDRKELPREQPLPPGPIGTERSQRTDRGTEPGPIRPSHRPGPPVQFGTSDKDSDLRLVVGDSLKAEKELTASVTEAIPVSRDWELLPSAAASAEPQSKNLDSGHCVPEPSSSGQRLYPEVFYGSAGPSSSQISGGHGLSITSKQWRRPGTPSLHPYRSQPLYLPPGPAPPSALLSGVALKGQFLDFSTMQATELGKLPAGGVLYPPPSFLYSPAFCPSPLPDTSLLQVRQDLPSPSDFYSTPLQPGGQSGFLPSGAPAQQMLLPMVDSQLPVVNFGSLPPAPPPAPPPLSLLPVGPALQPPSLAVRPPPAPATRVLPSPARPFPASLGRAELHPVELKPFQDYQKLSSNLGGPGSSRTPPTGRSFSGLNSRLKATPSTYSGVFRTQRVDLYQQASPPDALRWIPKPWERTGPPPREGPSRRAEEPGSRGDKEPGLPPPR

SEQ ID NO: 59259 - protein, 2138 aa, Homo sapiens; identical to SEQ ID NO: 59251

SEQ ID NO: 59260 - protein, 2138 aa, Homo sapiens
MSDRSGPTAKGKDGKKYSSLNLFDTYKGKSLEIQKPAVAPRHGLQSLGKVAIARRMPPPANLPSLKAENKGNDPNVSLVPKDGTGWASKQEQSDPKSSDASTAQPPESQPLPASQTPASNQPKRPPAAPENTPLVPSGVKSWAQASVTHGAHGDGGRASSLLSRFSREEFPTLQAAGDQDKAAKERESAEQSSGPGPSLRPQNSTTWRDGGGRGPDELEGPDSKLHHGHDPRGGLQPSGPPQFPPYRGMMPPFMYPPYLPFPPPYGPQGPYRYPTPDGPSRFPRVAGPRGSGPPMRLVEPVGRPSILKEDNLKEFDQLDQENDDGWAGAHEEVDYTEKLKFSDEEDGRDSDEEGAEGHRDSQSASGEERPPEADGKKGNSPNSEPPTPKTAWAETSRPPETEPGPPAPKPPLPPPGDYPDRGGPPCKPPAPEDEDEAWRQRRKQSSSEISLAVERARRRREEEERRMQEERRAACAEKLKRLDEKFGAPDKRLKAEPAAPPAAPSTPAPPPAVPKELPAPPAPPPASAPTPEKEPEEPAQAPPAQSTPTPGVAAAPTLVSGGGSTSSTSSGSFEASPVEPQLPSKEGPEPPEEVPPPTTPPVPKVEPKGDGIGPTRQPPSQGLGYPKYQKSLPPRFQRQQQEQLLKQQQQHQWQQHQQGSAPPTPVPPSPPQPVTLGAVPAPQAPPPPPKALYPGALGRPPPMPPMNFDPRWMMIPPYVDPRLLQGRPPLDFYPPGVHPSGLVPRERSDSGGSSSEPFDRHAPAMLRERGTPPVDPKLAWVGDVFTATPAEPRPLTSPLRQAADEDDKGMRSETPPVPPPPPYLASYPGFPENGAPGPPISRFPLEEPGPRPLPWPPGSDEVAKIQTPPPKKEPPKEETAQLTGPEAGRKPARGVGSGGQGPPPPRRESRTETRWGPRPGSSRRGIPPEEPGAPPRRAGPIKKPPPPTKVEELPPKPLEQGDETPKPPKPDPLKITKGKLGGPKETPPNGNLSPAPRLRRDYSYERVGPTSCRGRGRGEYFARGRGFRGTYGGRGRGAAGNSAVTESFEEMMGVEVGQGDQTTLLLPEAALPARHGARVQSMRKSPSGAGSGAQKQAARPMRVIWLLQTRRLPHPRREHSPRSRSPTTRSPTFPAPARFTPGVGESSLPEGISPGPRRREPPQVCPGWSPPAKSLAPKKPPTGPLPPSKEPLKEKLIPGPLSPVARGGSNGGSNVGMEDGERPRRRRHGRAQQQDKPPRFRRLKQERENAARGSEGKPSLTLPASAPGPEEALTTVTVAPAPRRAAAKSPDLSNQNSDQANEEWETASESSDFTSERRGDKEAPPPVLLTPKAVGTPGGGGGGAVPGISAMSRGDLSQRAKDLSKRSFSSQRPGMERQNRRPGPGGKAGSSGSSSGGGGGGPGGRTGPGRGDKRSWPSPKNRSRPPEERPPGLPLPPPPPSSSAVFRLDQVIHSNPAGIQQALAQLSSRQGSVTAPGGHPRHKPGPPQAPQGPSPRPPTRYEPQRVNSGLSSDPHFEEPGPMVRGVGGTPRDSAGVSPFPPKRRERPPRKPELLQEESLPPPHSSGFLGSKPEGPGPQAESRDTGTEALTPHIWNRLHTATSRKSYRPSSMEPWMEPLSPFEDVAGTEMSQSDSGVDLSGDSQVSSGPCSQRSSPDGGLKGAAEGPPKRPGGSSPLNAVPCEGPPGSEPPRRPPPAPHDGDRKELPREQPLPPGPIGTERSQRTDRGTEPGPIRPSHRPGPPVQFGTSDKDSDLRLVVGDSLKAEKELTASVTEAIPVSRDWELLPSAAASAEPQSKNLDSGHCVPEPSSSGQRLYPEVFYGSAGPSSSQISGGHGLSITSKQWRRPGTPSLHPYRSQPLYLPPGPAPPSALLSGVALKGQFLDFSTMQATELGKLPAGGVLYPPPSFLYSPAFCPSPLPDTSLLQVRQDLPSPSDFYSTPLQPGGQSGFLPSGAPAQQMLLPMVDSQLPVVNFGSLPPAPPPAPPPLSLLPVGPALQPPSLAVRPPPAPATRVLPSPARPFPASLGRAELHPVELKPFQDYQKLSSNLGGPGSSRTPPTGRSFSGLNSRLKATPSTYSGVFRTQRVDLYQQASPPDALRWIPKPWERTGPPPREGPSRRAEEPGSRGDKEPGLPPPR

SEQ ID NO: 59261 - protein, 1382 aa, Homo sapiens
MLRERGTPPVDPKLAWVGDVFTATPAEPRPLTSPLRQAADEDDKGMRSETPPVPPPPPYLASYPGFPENGAPGPPISRFPLEEPGPRPLPWPPGSDEVAKIQTPPPKKEPPKEETAQLTGPEAGRKPARGVGSGGQGPPPPRRESRTETRWGPRPGSSRRGIPPEEPGAPPRRAGPIKKPPPPTKVEELPPKPLEQGDETPKPPKPDPLKITKGKLGGPKETPPNGNLSPAPRLRRDYSYERVGPTSCRGRGRGEYFARGRGFRGTYGGRGRGARSREFRSYREFRGDDGRGGGTGGPNHPPAPRGRTASETRSEGSEYEEIPKRRRQRGSETGSETHESDLAPSDKEAPTPKEGTLTQVPLAPPPPGAPPSPAPARFTARGGRVFTPRGVPSRRGRGGGRPPPQVCPGWSPPAKSLAPKKPPTGPLPPSKEPLKEKLIPGPLSPVARGGSNGGSNVGMEDGERPRRRRHGRAQQQDKPPRFRRLKQERENAARGSEGKPSLTLPASAPGPEEALTTVTVAPAPRRAAAKSPDLSNQNSDQANEEWETASESSDFTSERRGDKEAPPPVLLTPKAVGTPGGGGGGAVPGISAMSRGDLSQRAKDLSKRSFSSQRPGMERQNRRPGPGGKAGSSGSSSGGGGGGPGGRTGPGRGDKRSWPSPKNRSRPPEERPPGLPLPPPPPSSSAVFRLDQVIHSNPAGIQQALAQLSSRQGSVTAPGGHPRHKPGLPQAPQGPSPRPPTRYEPQRVNSGLSSDPHFEEPGPMVRGVGGTPRDSAGVSPFPPKRRERPPRKPELLQEESLPPPHSSGFLGSKPEGPGPQAESRDTGTEALTPHIWNRLHTATSRKSYRPSSMEPWMEPLSPFEDVAGTEMSQSDSGVDLSGDSQVSSGPCSQRSSPDGGLKGAAEGPPKRPGGSSPLNAVPCEGPPGSEPPRRPPPAPHDGDRKELPREQPLPPGPIGTERSQRTDRGTEPGPIRPSHRPGPPVQFGTSDKDSDLRLVVGDSLKAEKELTASVTEAIPVSRDWELLPSAAASAEPQSKNLDSGHCVPEPSSSGQRLYPEVFYGSAGPSSSQISGGAMDSQLHPNSGGFRPGTPSLHPYRSQPLYLPPGPAPPSALLSGVALKGQFLDFSTMQATELGKLPAGGVLYPPPSFLYSPAFCPSPLPDTSLLQVRQDLPSPSDFYSTPLQPGGQSGFLPSGAPAQQMLLPMVDSQLPVVNFGSLPPAPPPAPPPLSLLPVGPALQPPSLAVRPPPAPATRVLPSPARPFPASLGRAELHPVELKPFQDYQKLSSNLGGPGSSRTPPTGRSFSGLNSRLKATPSTYSGVFRTQRVDLYQQASPPDALRWIPKPWERTGPPPREGPSRRAEEPGSRGDKEPGLPPPR

SEQ ID NO: 59262 - protein, 2149 aa, Homo sapiens
MSDRSGPTAKGKDGKKYSSLNLFDTYKGKSLEIQKPAVAPRHGLQSLGKVAIARRMPPPANLPSLKAENKGNDPNVSLVPKDGTGWASKQEQSDPKSSDASTAQPPESQPLPASQTPASNQPKRPPAAPENTPLVPSGVKSWAQASVTHGAHGDGGRASSLLSRFSREEFPTLQAAGDQDKAAKERESAEQSSGPGPSLRPQNSTTWRDGGGRGPDELEGPDSKLHHGHDPRGGLQPSGPPQFPPYRGMMPPFMYPPYLPFPPPYGPQGPYRYPTPDGPSRFPRVAGPRGSGPPMRLVEPVGRPSILKEDNLKEFDQLDQENDDGWAGAHEEVDYTEKLKFSDEEDGRDSDEEGAEGHRDSQSASGEERPPEADGKKGNSPNSEPPTPKTAWAETSRPPETEPGPPAPKPPLPPPHRGPAGNWGPPGDYPDRGGPPCKPPAPEDEDEAWRQRRKQSSSEISLAVERARRRREEEERRMQEERRAACAEKLKRLDEKFGAPDKRLKAEPAAPPAAPSTPAPPPAVPKELPAPPAPPPASAPTPEKEPEEPAQAPPAQSTPTPGVAAAPTLVSGGGSTSSTSSGSFEASPVEPQLPSKEGPEPPEEVPPPTTPPVPKVEPKGDGIGPTRQPPSQGLGYPKYQKSLPPRFQRQQQEQLLKQQQQHQWQQHQQGSAPPTPVPPSPPQPVTLGAVPAPQAPPPPPKALYPGALGRPPPMPPMNFDPRWMMIPPYVDPRLLQGRPPLDFYPPGVHPSGLVPRERSDSGGSSSEPFDRHAPAMLRERGTPPVDPKLAWVGDVFTATPAEPRPLTSPLRQAADEDDKGMRSETPPVPPPPPYLASYPGFPENGAPGPPISRFPLEEPGPRPLPWPPGSDEVAKIQTPPPKKEPPKEETAQLTGPEAGRKPARGVGSGGQGPPPPRRESRTETRWGPRPGSSRRGIPPEEPGAPPRRAGPIKKPPPPTKVEELPPKPLEQGDETPKPPKPDPLKITKGKLGGPKETPPNGNLSPAPRLRRDYSYERVGPTSCRGRGRGEYFARGRGFRGTYGGRGRGAAGNSAVTESFEEMMGVEVGQGDQTTLLLPEAALPARHGARVQSMRKSPSGAGSGAQKQAARPMRVIWLLQTRRLPHPRREHSPRSRSPTTRSPTFPAPARFTPGVGESSLPEGISPGPRRREPPQVCPGWSPPAKSLAPKKPPTGPLPPSKEPLKEKLIPGPLSPVARGGSNGGSNVGMEDGERPRRRRHGRAQQQDKPPRFRRLKQERENAARGSEGKPSLTLPASAPGPEEALTTVTVAPAPRRAAAKSPDLSNQNSDQANEEWETASESSDFTSERRGDKEAPPPVLLTPKAVGTPGGGGGGAVPGISAMSRGDLSQRAKDLSKRSFSSQRPGMERQNRRPGPGGKAGSSGSSSGGGGGGPGGRTGPGRGDKRSWPSPKNRSRPPEERPPGLPLPPPPPSSSAVFRLDQVIHSNPAGIQQALAQLSSRQGSVTAPGGHPRHKPGPPQAPQGPSPRPPTRYEPQRVNSGLSSDPHFEEPGPMVRGVGGTPRDSAGVSPFPPKRRERPPRKPELLQEESLPPPHSSGFLGSKPEGPGPQAESRDTGTEALTPHIWNRLHTATSRKSYRPSSMEPWMEPLSPFEDVAGTEMSQSDSGVDLSGDSQVSSGPCSQRSSPDGGLKGAAEGPPKRPGGSSPLNAVPCEGPPGSEPPRRPPPAPHDGDRKELPREQPLPPGPIGTERSQRTDRGTEPGPIRPSHRPGPPVQFGTSDKDSDLRLVVGDSLKAEKELTASVTEAIPVSRDWELLPSAAASAEPQSKNLDSGHCVPEPSSSGQRLYPEVFYGSAGPSSSQISGGHGLSITSKQWRRPGTPSLHPYRSQPLYLPPGPAPPSALLSGVALKGQFLDFSTMQATELGKLPAGGVLYPPPSFLYSPAFCPSPLPDTSLLQVRQDLPSPSDFYSTPLQPGGQSGFLPSGAPAQQMLLPMVDSQLPVVNFGSLPPAPPPAPPPLSLLPVGPALQPPSLAVRPPPAPATRVLPSPARPFPASLGRAELHPVELKPFQDYQKLSSNLGGPGSSRTPPTGRSFSGLNSRLKATPSTYSGVFRTQRVDLYQQASPPDALRWIPKPWERTGPPPREGPSRRAEEPGSRGDKEPGLPPPR

SEQ ID NO: 59263 - protein, 2149 aa, Homo sapiens
MSDRSGPTAKGKDGKKYSSLNLFDTYKGKSLEIQKPAVAPRHGLQSLGKVAIARRMPPPANLPSLKAENKGNDPNVSLVPKDGTGWASKQEQSDPKSSDASTAQPLESQPLPASQTPASNQPKRPPAAPENTPLVPSGVKSWAQASVTHGAHGDGGRASSLLSRFSREEFPTLQAAGDQDKAAKERESAEQSSGPGPSLRPQNSTTWRDGGGRGPDELEGPDSKLHHGHDPRGGLQPSGPPQFPPYRGMMPPFMYPPYLPFPPPYGPQGPYRYPTPDGPSRFPRVAGPRGSGPPMRLVEPVGRPSILKEDNLKEFDQLDQENDDGWAGAHEEVDYTEKLKFSDEEDGRDSDEEGAEGHRDSQSASGEERPPEADGKKGNSPNSEPPTPKTAWAETSRPPETEPGPPAPKPPLPPPHRGPAGNWGPPGDYPDRGGPPCKPPAPEDEDEAWRQRRKQSSSEISLAVERARRRREEEERRMQEERRAACAEKLKRLDEKFGAPDKRLKAEPAAPPAAPSTPAPPPAVPKELPAPPAPPPASAPTPEKEPEEPAQAPPAQSTPTPGVAAAPTLVSGGGSTSSTSSGSFEASPVEPQLPSKEGPEPPEEVPPPTTPPVPKVEPKGDGIGPTRQPPSQGLGYPKYQKSLPPRFQRQQQEQLLKQQQQHQWQQHQQGSAPPTPVPPSPPQPVTLGAVPAPQAPPPPPKALYPGALGRPPPMPPMNFDPRWMMIPPYVDPRLLQGRPPLDFYPPGVHPSGLVPRERSDSGGSSSEPFDRHAPAMLRERGTPPVDPKLAWVGDVFTATPAEPRPLTSPLRQAADEDDKGMRSETPPVPPPPPYLASYPGFPENGAPGPPISRFPLEEPGPRPLPWPPGSDEVAKIQTPPPKKEPPKEETAQLTGPEAGRKPARGVGSGGQGPPPPRRESRTETRWGPRPGSSRRGIPPEEPGAPPRRAGPIKKPPPPTKVEELPPKPLEQGDETPKPPKPDPLKITKGKLGGPKETPPNGNLSPAPRLRRDYSYERVGPTSCRGRGRGEYFARGRGFRGTYGGRGRGAAGNSAVTESFEEMMGVEVGQGDQTTLLLPEAALPARHGARVQSMRKSPSGAGSGAQKQAARPMRVIWLLQTRRLPHPRREHSPRSRSPTTRSPTFPAPARFTPGVGESSLPEGISPGPRRREPPQVCPGWSPPAKSLAPKKPPTGPLPPSKEPLKEKLIPGPLSPVARGGSNGGSNVGMEDGERPRRRRHGRAQQQDKPPRFRRLKQERENAARGSEGKPSLTLPASAPGPEEALTTVTVAPAPRRAAAKSPDLSNQNSDQANEEWETASESSDFTSERRGDKEAPPPVLLTPKAVGTPGGGGGGAVPGISAMSRGDLSQRAKDLSKRSFSSQRPGMERQNRRPGPGGKAGSSGSSSGGGGGGPGGRTGPGRGDKRSWPSPKNRSRPPEERPPGLPLPPPPPSSSAVFRLDQVIHSNPAGIQQALAQLSSRQGSVTAPGGHPRHKPGPPQAPQGPSPRPPTRYEPQRVNSGLSSDPHFEEPGPMVRGVGGTPRDSAGVSPFPPKRRERPPRKPELLQEESLPPPHSSGFLGSKPEGPGPQAESRDTGTEALTPHIWNRLHTATSRKSYRPSSMEPWMEPLSPFEDVAGTEMSQSDSGVDLSGDSQVSSGPCSQRSSPDGGLKGAAEGPPKRPGGSSPLNAVPCEGPPGSEPPRRPPPAPHDGDRKELPREQPLPPGPIGTERSQRTDRGTEPGPIRPSHRPGPPVQFGTSDKDSDLRLVVGDSLKAEKELTASVTEAIPVSRDWELLPSAAASAEPQSKNLDSGHCVPEPSSSGQRLYPEVFYGSAGPSSSQISGGHGLSITSKQWRRPGTPSLHPYRSQPLYLPPGPAPPSALLSGVALKGQFLDFSTMQATELGKLPAGGVLYPPPSFLYSPAFCPSPLPDTSLLQVRQDLPSPSDFYSTPLQPGGQSGFLPSGAPAQQMLLPMVDSQLPVVNFGSLPPAPPPAPPPLSLLPVGPALQPPSLAVRPPPAPATRVLPSPARPFPASLGRAELHPVELKPFQDYQKLSSNLGGPGSSRTPPTGRSFSGLNSRLKATPSTYSGVFRTQRVDLYQQASPPDALRWIPKPWERTGPPPREGPSRRAEEPGSRGDKEPGLPPPR

SEQ ID NO: 59264 - protein, 1382 aa, Homo sapiens
MLRERGTPPVDPKLAWVGDVFTATPAEPRPLTSPLRQAADEDDKGMRSETPPVPPPPPYLASYPGFPENGAPGPPISRFPLEEPGPRPLPWPPGSDEVAKIQTPPPKKEPPKEETAQLTGPEAGRKPARGVGSGGQGPPPPRRESRTETRWGPRPGSSRRGIPPEEPGAPPRRAGPIKKPPPPTKVEELPPKPLEQGDETPKPPKPDPLKITKGKLGGPKETPPNGNLSPAPRLRRDYSYERVGPTSCRGRGRGEYFARGRGFRGTYGGRGRGARSREFRSYREFRGDDGRGGGTGGPNHPPAPRGRTASETRSEGSEYEEIPKRRRQRGSETGSETHESDLAPSDKEAPTPKEGTLTQVPLAPPPPGAPPSPAPARFTARGGRVFTPRGVPSRRGRGGGRPPPQVCPGWSPPAKSLAPKKPPTGPLPPSKEPLKEKLIPGPLSPVARGGSNGGSNVGMEDGERPRRRRHGRAQQQDKPPRFRRLKQERENAARGSEGKPSLTLPASAPGPEEALTTVTVAPAPRRAAAKSPDLSNQNSDQANEEWETASESSDFTSERRGDKEAPPPVLLTPKAVGTPGGGGGGAVPGISAMSRGDLSQRAKDLSKRSFSSQRPGMERQNRRPGPGGKAGSSGSSSGGGGGGPGGRTGPGRGDKRSWPSPKNRSRPPEERPPGLPLPPPPPSSSAVFRLDQVIHSNPAGIQQALAQLSSRQGSVTAPGGHPRHKPGPPQAPQGPSPRPPTRYEPQRVNSGLSSDPHFEEPGPMVRGVGGTPRDSAGVSPFPPKRRERPPRKPELLQEESLPPPHSSGFLGSKPEGPGPQAESRDTGTEALTPHIWNRLHTATSRKSYRPSSMEPWMEPLSPFEDVAGTEMSQSDSGVDLSGDSQVSSGPCSQRSSPDGGLKGAAEGPPKRPGGSSPLNAVPCEGPPGSEPPRRPPPAPHDGDRKELPREQPLPPGPIGTERSQRTDRGTEPGPIRPSHRPGPPVQFGTSDKDSDLRLVVGDSLKAEKELTASVTEAIPVSRDWELLPSAAASAEPQSKNLDSGHCVPEPSSSGQRLYPEVFYGSAGPSSSQISGGAMDSQLHPNSGGFRPGTPSLHPYRSQPLYLPPGPAPPSALLSGVALKGQFLDFSTMQATELGKLPAGGVLYPPPSFLYSPAFCPSPLPDTSLLQVRQDLPSPSDFYSTPLQPGGQSGFLPSGAPAQQMLLPMVDSQLPVVNFGSLPPAPPPAPPPLSLLPVGPALQPPSLAVRPPPAPATRVLPSPARPFPASLGRAELHPVELKPFQDYQKLSSNLGGPGSSRTPPTGRSFSGLNSRLKATPSTYSGVFRTQRVDLYQQASPPDALRWIPKPWERTGPPPREGPSRRAEEPGSRGDKEPGLPPPR

SEQ ID NO: 59265 - protein, 1382 aa, Homo sapiens; identical to SEQ ID NO: 59264

SEQ ID NO: 59266 - protein, 2149 aa, Homo sapiens; identical to SEQ ID NO: 59252

SEQ ID NO: 59267 - protein, 1382 aa, Homo sapiens; identical to SEQ ID NO: 59255

SEQ ID NO: 59268 - protein, 2149 aa, Homo sapiens; identical to SEQ ID NO: 59252

SEQ ID NO: 59269 - protein, 549 aa, Homo sapiens; identical to SEQ ID NO: 59250

SEQ ID NO: 59270 - protein, 549 aa, Homo sapiens; identical to SEQ ID NO: 59250

SEQ ID NO: 59271 - protein, 1382 aa, Homo sapiens; identical to SEQ ID NO: 59255

SEQ ID NO: 59272 - protein, 327 aa, Homo sapiens
MTVVSVPQREPLVLGGRLAPLGFSSRGYFGALPMVTTAPPPLPRIPDPRALPPTLFLPHFLGGDGPCLTPQPRAPAALPNRSLAVAGGTPRAAPKKRRKKKVRASPAGQLPSRFHQYQQHRPSLEGGRSPATGPSGAQEVPGPAAALAPSPAAAAGTEGASPDLAPLRPAAPGQTPLRKEVLKSKMGKSEKIALPHGQLVHGIHLYEQPKINRQKSKYNLPLTKITSAKRNENNFWQDSVSSDRIQKQEKKPFKNTENIKNSHLKKSAFLTEVSQKENYAGAKFSDPPSPSVLPKPPSHWMGSTVENSNQNRELMAVHLKTLLKVQT

SEQ ID NO: 59273 - protein, 142 aa, Homo sapiens
MGKSEKIALPHGQLVHGIHLYEQPKINRQKSKYNLPLTKITSAKRNENNFWQDSVSSDRIQKQEKKPFKNTENIKNSHLKKSAFLTEVSQKENYAGAKFSDPPSPSVLPKPPSHWMGSTVENSNQNRELMAVHLKTLLKVQT

SEQ ID NO: 59274 - protein, 142 aa, Homo sapiens; identical to SEQ ID NO: 59273

SEQ ID NO: 59275 - protein, 139 aa, Homo sapiens
MGGGERYNIPAPQSRNVSKNQQQLNRQKTKEQNSQMKIVHKKKERGHGYNSSAAAWQAMQNGGKNKNFPNNQSWNSSLSGPRLLFKSQANQNYAGAKFSEPPSPSVLPKPPSHWVPVSFNPSDKEIMTFQLKTLLKVQV

SEQ ID NO: 59276 - protein, 139 aa, Homo sapiens; identical to SEQ ID NO: 59275

SEQ ID NO: 59277 - protein, 198 aa, Homo sapiens
MLLILLSVALLALSSAQNLNEDVSQEESPSLIAGNPQGPSPQGGNKPQGPPPPPGKPQGPPPQGGNKPQGPPPPGKPQGPPPQGDKSRSPRSPPGKPQGPPPQGGKPQGPPPQGGNKPQGPPPPGKPQGPPAQGGSKSQSARSPPGKPQGPPQQEGNNPQGPPPPAGGNPQQPQAPPAGQPQGPPRPPQGGRPSRPPQ

SEQ ID NO: 59278 - protein, 178 aa, Homo sapiens
MLLILLSVALLALSSAQNLNEDVSQEESPSLIAGNPQGPSPQGGNKPQGPPPPPGKPQGPPPQGGNKPQGPPPPGKPQGPPPQGDKSRSPRSPPGKPQGPPPQGGKPQGPPAQGGSKSQSARSPPGKPQGPPQQEGNNPQGPPPPAGGNPQQPQAPPAGQPQGPPRPPQGGRPSRPPQ

SEQ ID NO: 59279 - protein, 198 aa, Homo sapiens; identical to SEQ ID NO: 59277

SEQ ID NO: 59280 - protein, 416 aa, Homo sapiens
MLLILLSVALLALSSAQNLNEDVSQEESPSLIAGNPQGAPPQGGNKPQGPPSPPGKPQGPPPQGGNQPQGPPPPPGKPQGPPPQGGNKPQGPPPPGKPQGPPPQGDKSRSPRSPPGKPQGPPPQGGNQPQGPPPPPGKPQGPPPQGGNKPQGPPPPGKPQGPPPQGDNKSRSSRSPPGKPQGPPPQGGNQPQGPPPPPGKPQGPPPQGGNKPQGPPPPGKPQGPPPQGDNKSQSARSPPGKPQGPPPQGGNQPQGPPPPPGKPQGPPPQGGNKPQGPPPPGKPQGPPPQGGSKSRSSRSPPGKPQGPPPQGGNQPQGPPPPPGKPQGPPPQGGNKPQGPPPPGKPQGPPPQGGSKSRSARSPPGKPQGPPQQEGNNPQGPPPPAGGNPQQPQAPPAGQPQGPPRPPQGGRPSRPPQ

SEQ ID NO: 59281 - protein, 247 aa, Homo sapiens
MLLILLSVALLALSSAESSSEDVSQEESLFLISGKPEGRRPQGGNQPQRPPPPPGKPQGPPPQGGNQSQGPPPPPGKPEGRPPQGGNQSQGPPPHPGKPERPPPQGGNQSQGTPPPPGKPERPPPQGGNQSHRPPPPPGKPERPPPQGGNQSQGPPPHPGKPEGPPPQEGNKSRSARSPPGKPQGPPQQEGNKPQGPPPPGKPQGPPPAGGNPQQPQAPPAGKPQGPPPPPQGGRPPRPAQGQQPPQ

SEQ ID NO: 59282 - protein, 247 aa, Homo sapiens; identical to SEQ ID NO: 59281

SEQ ID NO: 59283 - protein, 178 aa, Homo sapiens
MLLILLSVALLALSSAESSSEDVSQEESLFLISGKPEGRRPQGGNQPQRPPPPPGKPQGPPPQGGNQSQGPPPPPGKPEGRPPQGGNQSQGPPPHPGKPERPPPQGGNQSQGKPQGPPQQEGNKPQGPPPPGKPQGPPPAGGNPQQPQAPPAGKPQGPPPPPQGGRPPRPAQGQQPPQ

SEQ ID NO: 59284 - protein, 166 aa, Homo sapiens
MLLILLSVALLAFSSAQDLNEDVSQEDVPLVISDGGDSEQFLDEERQGPPLGGQQSQPSAGDGNQDDGPQQGPPQQGGQQQQGPPPPQGKPQGPPQQGGHPPPPQGRPQGPPQQGGHPRPPRGRPQGPPQQGGHQQGPPPPPPGKPQGPPPQGGRPQGPPQGQSPQ

SEQ ID NO: 59285 - protein, 96 aa, Homo sapiens
MLLILLSVALLAFSSAQDLDEDVSQEDVPLVISDGGDSEQFIDEEGHKDHPNREAISKVLPHLLLESPRDHLPKGAAHKDLHRGSLLSNLGFNDRK

SEQ ID NO: 59286 - protein, 166 aa, Homo sapiens
MLLILLSVALLAFSSAQDLDEDVSQEDVPLVISDGGDSEQFIDEERQGPPLGGQQSQPSAGDGNQNDGPQQGPPQQGGQQQQGPPPPQGKPQGPPQQGGHPPPPQGRPQGPPQQGGHPRPPRGRPQGPPQQGGHQQGPPPPPPGKPQGPPPQGGRPQGPPQGQSPQ

SEQ ID NO: 59287 - protein, 166 aa, Homo sapiens; identical to SEQ ID NO: 59286

SEQ ID NO: 59288 - protein, 299 aa, Homo sapiens
MAASSSEISEMKGVEESPKVPGEGPGHSEAETGPPQVLAGVPDQPEAPQPGPNTTAAPVDSGPKAGLAPETTETPAGASETAQATDLSLSPGGESKANCSPEDPCQETVSKPEVSKEATADQGSRLESAAPPEPAPEPAPQPDPRPDSQPTPKPALQPELPTQEDPTPEILSESVGEKQENGAVVPLQAGDGEEGPAPEPHSPPSKKSPPANGAPPRVLQQLVEEDRMRRAHSGHPGSPRGSLSRHPSSQLAGPGVEGGEGTQKPRDYIILAILSCFCPMWPVNIVAFAYAVMVSPMGP

SEQ ID NO: 59289 - protein, 340 aa, Homo sapiens
MAASSSEISEMKGVEESPKVPGEGPGHSEAETGPPQVLAGVPDQPEAPQPGPNTTAAPVDSGPKAGLAPETTETPAGASETAQATDLSLSPGGESKANCSPEDPCQETVSKPEVSKEATADQGSRLESAAPPEPAPEPAPQPDPRPDSQPTPKPALQPELPTQEDPTPEILSESVGEKQENGAVVPLQAGDGEEGPAPEPHSPPSKKSPPANGAPPRVLQQLVEEDRMRRAHSGHPGSPRGSLSRHPSSQLAGPGVEGGEGTQKPRDYIILAILSCFCPMWPVNIVAFAYAVMSRNSLQQGDVDGAQRLGRVAKLLSIVALVGGVLIIIASCVINLGVYK

SEQ ID NO: 59290 - protein, 396 aa, Homo sapiens
MPQLQFKDAFWCRDFTAHTGYEVLLQRLLDGRKMCKDMEELLRQRAQAEERYGKELVQIARKAGGQTEINSLRASFDSLKQQMENVGSSHIQLALTLREELRSLEEFRERQKEQRKKYEAVMDRVQKSKLSLYKKAMESKKTYEQKCRDADDAEQAFERISANGHQKQVEKSQNKARQCKDSATEAERVYRQSIAQLEKVRAEWEQEHRTTCEAFQLQEFDRLTILRNALWVHSNQLSMQCVKDDELYEEVRLTLEGCSIDADIDSFIQAKSTGTEPPGEVRLADSAASRFSGLLHGSPKTTSLAASAASTETLTPTPERNEGVYTAIAVQEIQGNPASPAQEYRALYDYTAQNPDELDLSAGDILEVILEGEDGWWTVERNGQRGFVPGSYLEKL

SEQ ID NO: 59291 - protein, 416 aa, Homo sapiens
MMPQLQFKDAFWCRDFTAHTGYEVLLQRLLDGRKMCKDMEELLRQRAQAEERYGKELVQIARKAGGQTEINSLRASFDSLKQQMENVGSSHIQLALTLREELRSLEEFRERQKEQRKKYEAVMDRVQKSKLSLYKKAMESKKTYEQKCRDADDAEQAFERISANGHQKQVEKSQNKARQCKDSATEAERVYRQSIAQLEKVRAEWEQEHRTTCEAFQLQEFDRLTILRNALWVHSNQLSMQCVKDDELYEEVRLTLEGCSIDADIDSFIQAKSTGTEPPAPVPYQNYYDREVTPLTSSPGIQPSCGMIKRFSGLLHGSPKTTSLAASAASTETLTPTPERNEGVYTAIAVQEIQGNPASPAQEYRALYDYTAQNPDELDLSAGDILEVILEGEDGWWTVERNGQRGFVPGSYLEKL

SEQ ID NO: 59292 - protein, 534 aa, Homo sapiens
MIWYILIIGILLPQSLAHPGFFTSIGQMTDLIHTEKDLVTSLKDYIKAEEDKLEQIKKWAEKLDRLTSTATKDPEGFVGHPVNAFKLMKRLNTEWSELENLVLKDMSDGFISNLTIQRQYFPNDEDQVGAAKALLRLQDTYNLDTDTISKGNLPGVKHKSFLTAEDCFELGKVAYTEADYYHTELWMEQALRQLDEGEISTIDKVSVLDYLSYAVYQQGDLDKALLLTKKLLELDPEHQRANGNLKYFEYIMAKEKDVNKSASDDQSDQKTTPKKKGVAVDYLPERQKYEMLCRGEGIKMTPRRQKKLFCRYHDGNRNPKFILAPAKQEDEWDKPRIIRFHDIISDAEIEIVKDLAKPRLSRATVHDPETGKLTTAQYRVSKSAWLSGYENPVVSRINMRIQDLTGLDVSTAEELQVANYGVGGQYEPHFDFARKDEPDAFKELGTGNRIATWLFYMSDVSAGGATVFPEVGASVWPKKGTAVFWYNLFASGEGDYSTRHAACPVLVGNKWVSNKWLHERGQEFRRPCTLSELE

SEQ ID NO: 59293 - protein, 534 aa, Homo sapiens
MIWYILIIGILLPQSLAHPGFFTSIGQMTDLIHTEKDLVTSLKDYIKAEEDKLEQIKKWAEKLDRLTSTATKDPEGFVGHPVNAFKLMKRLNTEWSELENLVLKDMSDGFISNLTIQRQYFPNDEDQVGAAKALLRLQDTYNLDTDTISKGNLPGVKHKSFLTAEDCFELGKVAYTEADYYHTELWMEQALRQLDEGEISTIDKVSVLDYLSYAVYQQGDLDKALLLTKKLLELDPEHQRANGNLKYFEYIMAKEKDVNKSASDDQSDQKTTPKKKGVAVDYLPERQKYEMLCRGEGIKMTPRRQKKLFCRYHDGNRNPKFILAPAKQEDEWDKPRIIRFHDIISDAEIEIVKDLAKPRLRRATISNPITGDLETVHYRISKSAWLSGYENPVVSRINMRIQDLTGLDVSTAEELQVANYGVGGQYEPHFDFARKDEPDAFKELGTGNRIATWLFYMSDVSAGGATVFPEVGASVWPKKGTAVFWYNLFASGEGDYSTRHAACPVLVGNKWVSNKWLHERGQEFRRPCTLSELE

SEQ ID NO: 59294 - protein, 534 aa, Homo sapiens; identical to SEQ ID NO: 59292

SEQ ID NO: 59295 - protein, 534 aa, Homo sapiens; identical to SEQ ID NO: 59293

SEQ ID NO: 59296 - protein, 534 aa, Homo sapiens; identical to SEQ ID NO: 59293

SEQ ID NO: 59297 - protein, 516 aa, Homo sapiens
MIWYILIIGILLPQSLAHPGFFTSIGQMTDLIHTEKDLVTSLKDYIKAEEDKLEQIKKWAEKLDRLTSTATKDPEGFVGHPVNAFKLMKRLNTEWSELENLVLKDMSDGFISNLTIQRQYFPNDEDQVGAAKALLRLQDTYNLDTDTISKGNLPGVKHKSFLTAEDCFELGKVAYTEADYYHTELWMEQALRQLDEGEISTIDKVSVLDYLSYAVYQQGDLDKALLLTKKLLELDPEHQRANGNLKYFEYIMAKEKDVNKSASDDQSDQKTTPKKKGVAVDYLPERQKYEMLCRGEGIKMTPRRQKKLFCRYHDGNRNPKFILAPAKQEDEWDKPRIIRFHDIISDAEIEIVKDLAKPRLSRATVHDPETGKLTTAQYRVSKSAWLSGYENPVVSRINMRIQDLTGLDVSTAEELQKDEPDAFKELGTGNRIATWLFYMSDVSAGGATVFPEVGASVWPKKGTAVFWYNLFASGEGDYSTRHAACPVLVGNKWVSNKWLHERGQEFRRPCTLSELE

SEQ ID NO: 59298 - protein, 535 aa, Homo sapiens
MKLWVSALLMAWFGVLSCVQAEFFTSIGHMTDLIYAEKELVQSLKEYILVEEAKLSKIKSWANKMEALTSKSAADAEGYLAHPVNAYKLVKRLNTDWPALEDLVLQDSAAGFIANLSVQRQFFPTDEDEIGAAKALMRLQDTYRLDPGTISRGELPGTKYQAMLSVDDCFGMGRSAYNEGDYYHTVLWMEQVLKQLDAGEEATTTKSQVLDYLSYAVFQLGDLHRALELTRRLLSLDPSHERAGGNLRYFEQLLEEEREKTLTNQTEAELATPEGIYERPVDYLPERDVYESLCRGEGVKLTPRRQKRLFCRYHHGNRAPQLLIAPFKEEDEWDSPHIVRYYDVMSDEEIERIKEIAKPKLARATVRDPKTGVLTVASYRVSKSSWLEEDDDPVVARVNRRMQHITGLTVKTAELLQVANYGVGGQYEPHFDFSRNDERDTFKHLGTGNRVATFLNYMSDVEAGGATVFPDLGAAIWPKKGTAVFWYNLLRSGEGDYRTRHAACPVLVGCKWVSNKWFHERGQEFLRPCGSTEVD

SEQ ID NO: 59299 - protein, 533 aa, Homo sapiens
MKLWVSALLMAWFGVLSCVQAEFFTSIGHMTDLIYAEKELVQSLKEYILVEEAKLSKIKSWANKMEALTSKSAADAEGYLAHPVNAYKLVKRLNTDWPALEDLVLQDSAAGFIANLSVQRQFFPTDEDEIGAAKALMRLQDTYRLDPGTISRGELPGTKYQAMLSVDDCFGMGRSAYNEGDYYHTVLWMEQVLKQLDAGEEATTTKSQVLDYLSYAVFQLGDLHRALELTRRLLSLDPSHERAGGNLRYFEQLLEEEREKTLTNQTEAELATPEGIYERPVDYLPERDVYESLCRGEGVKLTPRRQKRLFCRYHHGNRAPQLLIAPFKEEDEWDSPHIVRYYDVMSDEEIERIKEIAKPKLARATVRDPKTGVLTVASYRVSKSSWLEEDDDPVVARVNRRMQHITGLTVKTAELLQVANYGVGGQYEPHFDFSRRPFDSGLKTEGNRLATFLNYMSDVEAGGATVFPDLGAAIWPKKGTAVFWYNLLRSGEGDYRTRHAACPVLVGCKWVSNKWFHERGQEFLRPCGSTEVD

SEQ ID NO: 59300 - protein, 533 aa, Homo sapiens; identical to SEQ ID NO: 59299

SEQ ID NO: 59301 - protein, 533 aa, Homo sapiens; identical to SEQ ID NO: 59299

SEQ ID NO: 59302 - protein, 535 aa, Homo sapiens; identical to SEQ ID NO: 59298

SEQ ID NO: 59303 - protein, 167 aa, Homo sapiens
MKLWVSALLMAWFGVLSCVQAEFFTSIGHMTDLIYAEKELVQSLKEYILVEEAKLSKIKSWANKMEALTSKSAADAEGYLAHPVNAYKLVKRLNTDWPALEDLVLQDSAAGFIANLSVQRQFFPTDEDEIGAAKALMRLQDTYRLDPGTISRGELPGTKYQAMLSVD

SEQ ID NO: 59304 - protein, 535 aa, Homo sapiens; identical to SEQ ID NO: 59298

SEQ ID NO: 59305 - protein, 101 aa, Homo sapiens
MKLWVSALLMAWFGVLSCVQAEFFTSIGHMTDLIYAEKELVQSLKEYILVEEAKLSKIKSWANKMEALTSKSAADAEGYLAHPVNAYKLVKRLNTDWPALE

SEQ ID NO: 59306 - protein, 204 aa, Homo sapiens
MKLWVSALLMAWFGVLSCVQAEFFTSIGHMTDLIYAEKELVQSLKEYILVEEAKLSKIKSWANKMEALTSKSAADAEGYLAHPVNAYKLVKRLNTDWPALEDLVLQDSAAGFIANLSVQRQFFPTDEDEIGAAKALMRLQDTYRLDPGTISRGELPGTKYQAMLSVDDCFGMGRSAYNEGDYYHTVLWMEQVLKQLDAGEEATT

SEQ ID NO: 59307 - protein, 114 aa, Homo sapiens
MKLWVSALLMAWFGVLSCVQAEFFTSIGHMTDLIYAEKELVQSLKEYILVEEAKLSKIKSWANKMEALTSKSAADAEGYLAHPVNAYKLVKRLNTDWPALEDLVLQDSAAGFIA

SEQ ID NO: 59308 - protein, 147 aa, Homo sapiens
MKLWVSALLMAWFGVLSCVQAEFFTSIGHMTDLIYAEKELVQSLKEYILVEEAKLSKIKSWANKMEALTSKSAADAEGYLAHPVNAYKLVKRLNTDWPALEDLVLQDSAAGFIANLSVQRQFFPTDEDEIGAAKALMRLQDTYRLDP

SEQ ID NO: 59309 - protein, 50 aa, Homo sapiens
MKLWVSALLMAWFGVLSCVQAEFFTSIGHMTDLIYAEKELVQSLKEYILV

SEQ ID NO: 59310 - protein, 184 aa, Homo sapiens
MKLWVSALLMAWFGVLSCVQAEFFTSIGHMTDLIYAEKELVQSLKEYILVEEAKLSKIKSWANKMEALTSKSAADAEGYLAHPVNAYKLVKRLNTDWPALEDLVLQDSAAGFIANLSVQRQFFPTDEDEIGAAKALMRLQDTYRLDPGTISRGELPGTKYQAMLSVDDCFGMGRSAYNEGDYYH

SEQ ID NO: 59311 - protein, 153 aa, Homo sapiens
MKLWVSALLMAWFGVLSCVQAEFFTSIGHMTDLIYAEKELVQSLKEYILVEEAKLSKIKSWANKMEALTSKSAADAEGYLAHPVNAYKLVKRLNTDWPALEDLVLQDSAAGFIANLSVQRQFFPTDEDEIGAAKALMRLQDTYRLDPGTISRG

SEQ ID NO: 59312 - protein, 544 aa, Homo sapiens
MGPGARLAALLAVLALGTGDPERAAARGDTFSALTSVARALAPERRLLGLLRRYLRGEEARLRDLTRFYDKVLSLHEDSTTPVANPLLAFTLIKRLQSDWRNVVHSLEASENIRALKDGYEKVEQDLPAFEDLEGAARALMRLQDVYMLNVKGLARGVFQRVTGSAITDLYSPKRLFSLTGDDCFQVGKVAYDMGDYYHAIPWLEEAVSLFRGSYGEWKTEDEASLEDALDHLAFAYFRAGNVSCALSLSREFLLYSPDNKRMARNVLKYERLLAESPNHVVAEAVIQRPNIPHLQTRDTYEGLCQTLGSQPTLYQIPSLYCSYETNSNAYLLLQPIRKEVIHLEPYIALYHDFVSDSEAQKIRELAEPWLQRSVVASGEKQLQVEYRISKSAWLKDTVDPKLVTLNHRIAALTGLDVRPPYAEYLQVVNYGIGGHYEPHFDHATSPSSPLYRMKSGNRVATFMIYLSSVEAGGATAFIYANLSVPVVRNAALFWWNLHRSGEGDSDTLHAGCPVLVGDKWVANKWIHEYGQEFRRPCSSSPED

SEQ ID NO: 59313 - protein, 604 aa, Homo sapiens
MGPGARLAALLAVLALGTGDPERAAARGDTFSALTSVARALAPERRLLGLLRRYLRGEEARLRDLTRFYDKVLSLHEDSTTPVANPLLAFTLIKRLQSDWRNVVHSLEASENIRALKDGYEKVEQDLPAFEDLEGAARALMRLQDVYMLNVKGLARGVFQRVTGSAITDLYSPKRLFSLTGDDCFQVGKVAYDMGDYYHAIPWLEEAVSLFRGSYGEWKTEDEASLEDALDHLAFAYFRAGNVSCALSLSREFLLYSPDNKRMARNVLKYERLLAESPNHVVAEAVIQRPNIPHLQTRDTYEGLCQTLGSQPTLYQIPSLYCSYETNSNAYLLLQPIRKEVIHLEPYIALYHDFVSDSEAQKIRELAEPWLQRSVVASGEKQLQVEYRISKSAWLKDTVDPKLVTLNHRIAALTGLDVRPPYAEYLQVVNYGIGGHYEPHFDHATSPSSPLYRMKSGNRVATFMIYLSSVEAGGATAFIYANLSVPVVRHCFGGTCTGVVKGTVTHFMLAVLSWWEISGWPTSGYMSMDRNSADPAAPALKTELLAERSWWSPVAFQRSQEPKAGVGEEKAEQPPGRRPCQLCLCLANQRQGRGCYQGTLRMYI

SEQ ID NO: 59314 - protein, 508 aa, Homo sapiens
MLRRALLCLAVAALVRADAPEEEDHVLVLRKSNFAEALAAHKYLLVEFYAPWCGHCKALAPEYAKAAGKLKAEGSEIRLAKVDATEESDLAQQYGVRGYPTIKFFRNGDTASPKEYTAGREADDIVNWLKKRTGPAATTLPDGAAAESLVESSEVAVIGFFKDVESDSAKQFLQAAEAIDDIPFGITSNSDVFSKYQLDKDGVVLFKKFDEGRNNFEGEVTKENLLDFIKHNQLPLVIEFTEQTAPKIFGGEIKTHILLFLPKSVSDYDGKLSNFKTAAESFKGKILFIFIDSDHTDNQRILEFFGLKKEECPAVRLITLEEEMTKYKPESEELTAERITEFCHRFLEGKIKPHLMSQELPEDWDKQPVKVLVGKNFEDVAFDEKKNVFVEFYAPWCGHCKQLAPIWDKLGETYKDHENIVIAKMDSTANEVEAVKVHSFPTLKFFPASADRTVIDYNGERTLDGFKKFLESGGQDGAGDDDDLEDLEEAEEPDMEEDDDQKAVKDEL

SEQ ID NO: 59315 - protein, 492 aa, Homo sapiens
MLRRALLCLAVAALVRADAPEEEDHKYLLVEFYAPWCGHCKALAPEYAKAAGKLKAEGSEIRLAKVDATEESDLAQQYGVRGYPTIKFFRNGDTASPKEYTAGREADDIVNWLKKRTGPAATTLPDGAAAESLVESSEVAVIGFFKDVESDSAKQFLQAAEAIDDIPFGITSNSDVFSKYQLDKDGVVLFKKFDEGRNNFEGEVTKENLLDFIKHNQLPLVIEFTEQTAPKIFGGEIKTHILLFLPKSVSDYDGKLSNFKTAAESFKGKILFIFIDSDHTDNQRILEFFGLKKEECPAVRLITLEEEMTKYKPESEELTAERITEFCHRFLEGKIKPHLMSQELPEDWDKQPVKVLVGKNFEDVAFDEKKNVFVEFYAPWCGHCKQLAPIWDKLGETYKDHENIVIAKMDSTANEVEAVKVHSFPTLKFFPASADRTVIDYNGERTLDGFKKFLESGGQDGAGDDDDLEDLEEAEEPDMEEDDDQKAVKDEL

SEQ ID NO: 59316 - protein, 451 aa, Homo sapiens
MLRRALLCLAVAALVRADAPEEEDHVLVLRKSNFAEALAAHKYLLVEFYAPWCGHCKALAPEYAKAAGKLKAEGSEIRLAKVDATEESDLAQQYGVRGYPTIKFFRNGDTASPKEYTAGREADDIPFGITSNSDVFSKYQLDKDGVVLFKKFDEGRNNFEGEVTKENLLDFIKHNQLPLVIEFTEQTAPKIFGGEIKTHILLFLPKSVSDYDGKLSNFKTAAESFKGKILFIFIDSDHTDNQRILEFFGLKKEECPAVRLITLEEEMTKYKPESEELTAERITEFCHRFLEGKIKPHLMSQELPEDWDKQPVKVLVGKNFEDVAFDEKKNVFVEFYAPWCGHCKQLAPIWDKLGETYKDHENIVIAKMDSTANEVEAVKVHSFPTLKFFPASADRTVIDYNGERTLDGFKKFLESGGQDGAGDDDDLEDLEEAEEPDMEEDDDQKAVKDEL

SEQ ID NO: 59317 - protein, 710 aa, Homo sapiens
MLSLQYPDVYRDETAVQDYHGHKICDPYAWLEDPDSEQTKAFVEAQNKITVPFLEQCPIRGLYKERMTELYDYPKYSCHFKKGKRYFYFYNTGLQNQRVLYVQDSLEGEARVFLDPNILSDDGTVALRGYAFSEDGEYFAYGLSASGSDWVTIKFMKVDGAKELPDVLERVKFSCMAWTHDGKGMFYNSYPQQDGKSDGTETSTNLHQKLYYHVLGTDQSEDILCAEFPDEPKWMGGAELSDDGRYVLLSIREGCDPVNRLWYCDLQQESSGIAGILKWVKLIDNFEGEYDYVTNEGTVFTFKTNRQSPNYRVINIDFRDPEESKWKVLVPEHEKDVLEWIACVRSNFLVLCYLHDVKNILQLHDLTTGALLKTFPLDVGSIVGYSGQKKDTEIFYQFTSFLSPGIIYHCDLTKEELEPRVFREVTVKGIDASDYQTVQIFYPSKDGTKIPMFIVHKKGIKLDGSHPAFLYGYGGFNISITPNYSVSRLIFVRHMGGILAVANIRGGGEYGETWHKGGILANKQNCFDDFQCAAEYLIKEGYTSPKRLTINGGSNGGLLVAACANQRPDLFGCVIAQVGVMDMLKFHKYTIGHAWTTDYGCSDSKQHFEWLVKYSPLHNVKLPEADDIQYPSMLLLTADHDDRVVPLHSLKFIATLQYIVGRSRKQSNPLLIHVDTKAGHGAGKPTAKVIEEVSDMFAFIARCLNVDWIP

SEQ ID NO: 59318 - protein, 45 aa, Homo sapiens
  VARIANT 1: note = MOD_RES - Any amino acid
XIIYHCDLTKEELEPRVFREVTVKGIDASDYQTVQLPKGTESSRN

SEQ ID NO: 59319 - protein, 44 aa, Homo sapiens
IIYHCDLTKEELEPRVFREVTVKGIDASDYQTVQLPKGTESSRN

SEQ ID NO: 59320 - protein, 727 aa, Homo sapiens
MQQKTKLFLQALKYSIPHLGKCMQKQHLNHYNFADHCYNRIKLKKYHLTKCLQNKPKISELARNIPSRSFSCKDLQPVKQENEKPLPENMDAFEKVRTKLETQPQEEYEIINVEVKHGGFVYYQEGCCLVRSKDEEADNDNYEVLFNLEELKLDQPFIDCIRVAPDEKYVAAKIRTEDSEASTCVIIKLSDQPVMEASFPNVSSFEWVKDEEDEDVLFYTFQRNLRCHDVYRATFGDNKRNERFYTEKDPSYFVFLYLTKDSRFLTINIMNKTTSEVWLIDGLSPWDPPVLIQKRIHGVLYYVEHRDDELYILTNVGEPTEFKLMRTAADTPAIMNWDLFFTMKRNTKVIDLDMFKDHCVLFLKHSNLLYVNVIGLADDSVRSLKLPPWACGFIMDTNSDPKNCPFQLCSPIRPPKYYTYKFAEGKLFEETGHEDPITKTSRVLRLEAKSKDGKLVPMTVFHKTDSEDLQKKPLLVHVYGAYGMDLKMNFRPERRVLVDDGWILAYCHVRGGGELGLQWHADGRLTKKLNGLADLEACIKTLHGQGFSQPSLTTLTAFSAGGVLAGALCNSNPELVRAVTLEAPFLDVLNTMMDTTLPLTLEELEEWGNPSSDEKHKNYIKRYCPYQNIKPQHYPSIHITAYENDERVPLKGIVSYTEKLKEAIAEHAKDTGEGYQTPNIILDIQPGGNHVIEDSHKKITAQIKFLYEELGLDSTSVFEDLKKYLKF

SEQ ID NO: 59321 - protein, 665 aa, Homo sapiens
MQQKTKLFLQALKYSIPHLGKCMQKQHLNHYNFADHCYNRIKLKKYHLTKCLQNKPKISELARNIPSRSFSCKDLQPVKQENEKPLPENMDAFEKVRTKLETQPQEEYEIINVEVKHGGFVYYQEGCCLVRSKDEEADNDNYEVLFNLEELKLDQPFIDCIRVAPDEKYVAAKIRTEDSEASTCVIIKLSDQPVMEASFPNVSSFEWVKDEEDEDVLFYTFQRNLRCHDVYRATFGDNKRNERFYTEKDPSYFVFLYLTKDSRFLTINIMNKTTSEVWLIDGLSPWDPPVLIQKRIHGVLYYVEHRDDELYILTNVGEPTEFKLPPWACGFIMDTNSDPKNCPFQLCSPIRPPKYYTYKFAEGKLFEETGHEDPITKTSRVLRLEAKSKDGKLVPMTVFHKTDSEDLQKKPLLVHVYGAYGMDLKMNFRPERRVLVDDGWILAYCHVRGGGELGLQWHADGRLTKKLNGLADLEACIKTLHGQGFSQPSLTTLTAFSAGGVLAGALCNSNPELVRAVTLEAPFLDVLNTMMDTTLPLTLEELEEWGNPSSDEKHKNYIKRYCPYQNIKPQHYPSIHITAYENDERVPLKGIVSYTEKLKEAIAEHAKDTGEGYQTPNIILDIQPGGNHVIEDSHKKITAQIKFLYEELGLDSTSVFEDLKKYLKF

SEQ ID NO: 59322 - protein, 661 aa, Homo sapiens
MQQKTKLFLQALKYSIPHLGKCMQKQHLNHYNFADHCYNRIKLKKYHLTKCLQNKPKISELARNIPSRSFSCKDLQPVKQENEKPLPENMDAFEKVRTKLETQPQEEYEIINVEVKHGGFVYYQEGCCLVRSKDEEADNDNYEVLFNLEELKLDQPFIDCIRVAPDEKYVAAKIRTEDSEASTCVIIKLSDQPVMEASFPNVSSFEWVKDEEDEDVLFYTFQRNLRCHDVYRATFGDNKRNERFYTEKDPSYFVFLYLTKDSRFLTINIMNKTTSEVWLIDGLSPWDPPVLIQKRIHGVLYYVEHRDDELYILTNVGEPTEFKLMRTAADTPAIMNWDLFFTMKRNTKVIDLDMFKDHCVLFLKHSNLLYVNVIGLADDSVRSLKDGKLVPMTVFHKTDSEDLQKKPLLVHVYGAYGMDLKMNFRPERRVLVDDGWILAYCHVRGGGELGLQWHADGRLTKKLNGLADLEACIKTLHGQGFSQPSLTTLTAFSAGGVLAGALCNSNPELVRAVTLEAPFLDVLNTMMDTTLPLTLEELEEWGNPSSDEKHKNYIKRYCPYQNIKPQHYPSIHITAYENDERVPLKGIVSYTEKLKEAIAEHAKDTGEGYQTPNIILDIQPGGNHVIEDSHKKITAQIKFLYEELGLDSTSVFEDLKKYLKF

SEQ ID NO: 59323 - protein, 727 aa, Homo sapiens; identical to SEQ ID NO: 59320

SEQ ID NO: 59324 - protein, 727 aa, Homo sapiens; identical to SEQ ID NO: 59320

SEQ ID NO: 59325 - protein, 727 aa, Homo sapiens; identical to SEQ ID NO: 59320

SEQ ID NO: 59326 - protein, 727 aa, Homo sapiens; identical to SEQ ID NO: 59320

SEQ ID NO: 59327 - protein, 727 aa, Homo sapiens; identical to SEQ ID NO: 59320

SEQ ID NO: 59328 - protein, 151 aa, Homo sapiens
MQQKTKLFLQALKYSIPHLGKCMQKQHLNHYNFADHCYNRIKLKKYHLTKCLQNKPKISELARNIPSRSFSCKDLQPVKQENEKPLPENMDAFEKVRTKLETQPQEEYEIINVEVKHGGFVYYQEGCCLVRSKDEEADNDNYEVLFNLEEL

SEQ ID NO: 59329 - protein, 638 aa, Homo sapiens
MDAFEKVRTKLETQPQEEYEIINVEVKHGGFVYYQEGCCLVRSKDEEADNDNYEVLFNLEELKLDQPFIDCIRVAPDEKYVAAKIRTEDSEASTCVIIKLSDQPVMEASFPNVSSFEWVKDEEDEDVLFYTFQRNLRCHDVYRATFGDNKRNERFYTEKDPSYFVFLYLTKDSRFLTINIMNKTTSEVWLIDGLSPWDPPVLIQKRIHGVLYYVEHRDDELYILTNVGEPTEFKLMRTAADTPAIMNWDLFFTMKRNTKVIDLDMFKDHCVLFLKHSNLLYVNVIGLADDSVRSLKLPPWACGFIMDTNSDPKNCPFQLCSPIRPPKYYTYKFAEGKLFEETGHEDPITKTSRVLRLEAKSKDGKLVPMTVFHKTDSEDLQKKPLLVHVYGAYGMDLKMNFRPERRVLVDDGWILAYCHVRGGGELGLQWHADGRLTKKLNGLADLEACIKTLHGQGFSQPSLTTLTAFSAGGVLAGALCNSNPELVRAVTLEAPFLDVLNTMMDTTLPLTLEELEEWGNPSSDEKHKNYIKRYCPYQNIKPQHYPSIHITAYENDERVPLKGIVSYTEKLKEAIAEHAKDTGEGYQTPNIILDIQPGGNHVIEDSHKKITAQIKFLYEELGLDSTSVFEDLKKYLKF

SEQ ID NO: 59330 - protein, 496 aa, Homo sapiens
MGRRALLLLLLSFLAPWATIALRPALRALGSLHLPTNPTSLPAVAKNYSVLYFQQKVDHFGFNTVKTFNQRYLVADKYWKKNGGSILFYTGNEGDIIWFCNNTGFMWDVAEELKAMLVFAEHRYYGESLPFGDNSFKDSRHLNFLTSEQALADFAELIKHLKRTIPGAENQPVIAIGGSYGGMLAAWFRMKYPHMVVGALAASAPIWQFEDLVPCGVFMKIVTTDFRKSGPHCSESIHRSWDAINRLSNTGSGLQWLTGALHLCSPLTSQDIQHLKDWISETWVNLAMVDYPYASNFLQPLPAWPIKVVCQYLKNPNVSDSLLLQNIFQALNVYYNYSGQVKCLNISETATSSLGTLGWSYQACTEVVMPFCTNGVDDMFEPHSWNLKELSDDCFQQWGVRPRPSWITTMYGGKNISSHTNIVFSNGELDPWSGGGVTKDITDTLVAVTISEGAHHLDLRTKNALDPMSVLLARSLEVRHMKNWIRDFYDSAGKQH

SEQ ID NO: 59331 - protein, 517 aa, Homo sapiens
MGRRALLLLLLSFLAPWATIALRPALRALGSLHLPTNPTSLPAVAKNYSVLYFQQKALAAGQLHICIIQLNHYKTPLVDHFGFNTVKTFNQRYLVADKYWKKNGGSILFYTGNEGDIIWFCNNTGFMWDVAEELKAMLVFAEHRYYGESLPFGDNSFKDSRHLNFLTSEQALADFAELIKHLKRTIPGAENQPVIAIGGSYGGMLAAWFRMKYPHMVVGALAASAPIWQFEDLVPCGVFMKIVTTDFRKSGPHCSESIHRSWDAINRLSNTGSGLQWLTGALHLCSPLTSQDIQHLKDWISETWVNLAMVDYPYASNFLQPLPAWPIKVVCQYLKNPNVSDSLLLQNIFQALNVYYNYSGQVKCLNISETATSSLGTLGWSYQACTEVVMPFCTNGVDDMFEPHSWNLKELSDDCFQQWGVRPRPSWITTMYGGKNISSHTNIVFSNGELDPWSGGGVTKDITDTLVAVTISEGAHHLDLRTKNALDPMSVLLARSLEVRHMKNWIRDFYDSAGKQH

SEQ ID NO: 59332 - protein, 391 aa, Homo sapiens
MWDVAEELKAMLVFAEHRYYGESLPFGDNSFKDSRHLNFLTSEQALADFAELIKHLKRTIPGAENQPVIAIGGSYGGMLAAWFRMKYPHMVVGALAASAPIWQFEDLVPCGVFMKIVTTDFRKSGPHCSESIHRSWDAINRLSNTGSGLQWLTGALHLCSPLTSQDIQHLKDWISETWVNLAMVDYPYASNFLQPLPAWPIKVVCQYLKNPNVSDSLLLQNIFQALNVYYNYSGQVKCLNISETATSSLGTLGWSYQACTEVVMPFCTNGVDDMFEPHSWNLKELSDDCFQQWGVRPRPSWITTMYGGKNISSHTNIVFSNGELDPWSGGGVTKDITDTLVAVTISEGAHHLDLRTKNALDPMSVLLARSLEVRHMKNWIRDFYDSAGKQH

SEQ ID NO: 59333 - protein, 475 aa, Homo sapiens
MEGLLTRCRALPALATCSRQLSGYVPCRFHHCAPRRGRRLLLSRVFQPQNLREDRVLSLQDKSDDLTCKSQRLMLQVGLIYPASPGCYHLLPYTVRAMEKLVRVIDQEMQAIGGQKVNMPSLSPAELWQATNRWDLMGKELLRLRDRHGKEYCLGPTHEEAITALIASQKKLSYKQLPFLLYQVTRKFRDEPRPRFGLLRGREFYMKDMYTFDSSPEAAQQTYSLVCDAYCSLFNKLGLPFVKVQADVGTIGGTVSHEFQLPVDIGEDRLAICPRCSFSANMETLDLSQMNCPACQGPLTKTKGIEVGHTFYLGTKYSSIFNAQFTNVCGKPTLAEMGCYGLGVTRILAAAIEVLSTEDCVRWPSLLAPYQACLIPPKKGSKEQAASELIGQLYDHITEAVPQLHGEVLLDDRTHLTIGNRLKDANKFGYPFVIIAGKRALEDPAHFEVWCQNTGEVAFLTKDGVMDLLTPVQTV

SEQ ID NO: 59334 - protein, 165 aa, Homo sapiens
MAKMNLSSYILILTFSLFSQGILLSASKSIRNLDDDMVFNTFRLGKGFQKEDTAEKSVIAPSLEQYKNDESSFMNEEENKVSKNTGSKHNFLNHGLPLNLAIKPYLALKGSVAFPAENGVQNTESTQEKREIGDEENSAKFPIGRRDFDMLRCMLGRVYRPCWQV

SEQ ID NO: 59335 - protein, 865 aa, Homo sapiens
MALVLGSLLLLGLCGNSFSGGQPSSTDAPKAWNYELPATNYETQDSHKAGPIGILFELVHIFLYVVQPRDFPEDTLRKFLQKAYESKIDYDKPETVILGLKIVYYEAGIILCCVLGLLFIILMPLVGYFFCMCRCCNKCGGEMHQRQKENGPFLRKCFAISLLVICIIISIGIFYGFVANHQVRTRIKRSRKLADSNFKDLRTLLNETPEQIKYILAQYNTTKDKAFTDLNSINSVLGGGILDRLRPNIIPVLDEIKSMATAIKETKEALENMNSTLKSLHQQSTQLSSSLTSVKTSLRSSLNDPLCLVHPSSETCNSIRLSLSQLNSNPELRQLPPVDAELDNVNNVLRTDLDGLVQQGYQSLNDIPDRVQRQTTTVVAGIKRVLNSIGSDIDNVTQRLPIQDILSAFSVYVNNTESYIHRNLPTLEEYDSYWWLGGLVICSLLTLIVIFYYLGLLCGVCGYDRHATPTTRGCVSNTGGVFLMVGVGLSFLFCWILMIIVVLTFVFGANVEKLICEPYTSKELFRVLDTPYLLNEDWEYYLSGKLFNKSKMKLTFEQVYSDCKKNRGTYGTLHLQNSFNISEHLNINEHTGSISSELESLKVNLNIFLLGAAGRKNLQDFAACGIDRMNYDSYLAQTGKSPAGVNLLSFAYDLEAKANSLPPGNLRNSLKRDAQTIKTIHQQRVLPIEQSLSTLYQSVKILQRTGNGLLERVTRILASLDFAQNFITNNTSSVIIEETKKYGRTIIGYFEHYLQWIEFSISEKVASCKPVATALDTAVDVFLCSYIIDPLNLFWFGIGKATVFLLPALIFAVKLAKYYRRMDSEDVYDDVETIPMKNMENGNNGYHKDHVYGIHNPVMTSPSQH

SEQ ID NO: 59336 - protein, 856 aa, Homo sapiens
MALVLGSLLLLGLCGNSFSGGQPSSTDAPKAWNYELPATNYETQDSHKAGPIGILFELVHIFLYVVQPRDFPEDTLRKFLQKAYESKIDYDKIVYYEAGIILCCVLGLLFIILMPLVGYFFCMCRCCNKCGGEMHQRQKENGPFLRKCFAISLLVICIIISIGIFYGFVANHQVRTRIKRSRKLADSNFKDLRTLLNETPEQIKYILAQYNTTKDKAFTDLNSINSVLGGGILDRLRPNIIPVLDEIKSMATAIKETKEALENMNSTLKSLHQQSTQLSSSLTSVKTSLRSSLNDPLCLVHPSSETCNSIRLSLSQLNSNPELRQLPPVDAELDNVNNVLRTDLDGLVQQGYQSLNDIPDRVQRQTTTVVAGIKRVLNSIGSDIDNVTQRLPIQDILSAFSVYVNNTESYIHRNLPTLEEYDSYWWLGGLVICSLLTLIVIFYYLGLLCGVCGYDRHATPTTRGCVSNTGGVFLMVGVGLSFLFCWILMIIVVLTFVFGANVEKLICEPYTSKELFRVLDTPYLLNEDWEYYLSGKLFNKSKMKLTFEQVYSDCKKNRGTYGTLHLQNSFNISEHLNINEHTGSISSELESLKVNLNIFLLGAAGRKNLQDFAACGIDRMNYDSYLAQTGKSPAGVNLLSFAYDLEAKANSLPPGNLRNSLKRDAQTIKTIHQQRVLPIEQSLSTLYQSVKILQRTGNGLLERVTRILASLDFAQNFITNNTSSVIIEETKKYGRTIIGYFEHYLQWIEFSISEKVASCKPVATALDTAVDVFLCSYIIDPLNLFWFGIGKATVFLLPALIFAVKLAKYYRRMDSEDVYDDVETIPMKNMENGNNGYHKDHVYGIHNPVMTSPSQH

SEQ ID NO: 59337 - protein, 856 aa, Homo sapiens; identical to SEQ ID NO: 59336

SEQ ID NO: 59338 - protein, 58 aa, Homo sapiens
MALVLGSLLLLGLCGNSFSGGQPSSTDAPKAWNYELPATNYETQDSHKAGPIGILFEL

SEQ ID NO: 59339 - protein, 40 aa, Homo sapiens
MALVLGSLLLLGLCGNSFSGGQPSSTDAPKAWNYELPATN

SEQ ID NO: 59340 - protein, 865 aa, Homo sapiens; identical to SEQ ID NO: 59335

SEQ ID NO: 59341 - protein, 14 aa, Homo sapiens
MALVLGSLLLLGLC

SEQ ID NO: 59342 - protein, 834 aa, Homo sapiens
MALVLGSLLLLGLCGNSFSGGQPSSTDAPKAWNYELPATNYETQDSHKAGPIGILFELVHIFLYVVQPRDFPEDTLRKFLQKAYESKIDYDKPETVILGLKIVYYEAGIILCCVLGLLFIILMPLVGYFFCMCRCCNKCGGEMHQRQKENGPFLRKCFAISLLVICIIISIGIFYGFVANHQVRTRIKRSRKLADSNFKDLRTLLNETPEQIKYILAQYNTTKDKAFTDLNSINSVLGGGILDRLRPNIIPVLDEIKSMATAIKETKEALENMNSTLKSLHQQSTQLSSSLTSVKTSLRSSLNDPLCLVHPSSETCNSIRLSLSQLNSNPELRQLPPVDAELDNVNNVLRTDLDGLVQQGYQSLNDIPDRVQRQTTTVVAGIKRVLNSIGSDIDNVTQRLPIQDILSAFSVYVNNTESYIHRNLPTLEEYDSYWWLGGLVICSLLTLIVIFYYLGLLCGVCGYDRHATPTTRGCVSNTGGVFLMVGVGLSFLFCWILMIIVVLTFVFGANVEKLICEPYTSKELFRVLDTPYLLNEDWEYYLSGKLFNKSKMKLTFEQVYSDCKKNRGTYGTLHLQNSFNISEHLNINEHTGSISSELESLKVNLNIFLLGAAGRKNLQDFAACGIDRMNYDSYLAQTGKSPAGVNLLSFAYDLEAKANSLPPGNLRNSLKRDAQTIKTIHQQRVLPIEQSLSTLYQSVKILQRTGNGLLERVTRILASLDFAQNFITNNTSSVIIEETKKYGRTIIGYFEHYLQWIEFSISEKVASCKPVATALDTAVDVFLCSYIIDPLNLFWFGIGKATVFLLPALIFAVKLAKYYRRMDSEDVYDDPSQH

SEQ ID NO: 59343 - protein, 842 aa, Homo sapiens
MALVLGSLLLLGLCGNSFSGGQPSSTDAPKAWNYELPATNYETQDSHKAGPIGILFELVHIFLYVVQPRDFPEDTLRKFLQKAYESKIDYDKPETVILGLKIVYYEAGIILCCVLGLLFIILMPLVGYFFCMCRCCNKCGGEMHQRQKENGPFLRKCFAISLLVICIIISIGIFYGFVANHQVRTRIKRSRKLADSNFKDLRTLLNETPEQIKYILAQYNTTKDKAFTDLNSINSVLGGGILDRLRPNIIPVLDEIKSMATAIKETKEALENMNSTLKSLHQQSTQLSSSLTSVKTSLRSSLNDPLCLVHPSSETCNSIRLSLSQLNSNPELRQLPPVDAELDNVNNVLRTDLDGLVQQGYQSLNDIPDRVQRQTTTVVAGIKRVLNSIGSDIDNVTQRLPIQDILSAFSVYVNNTESYIHRNLPTLEEYDSYWWLGGLVICSLLTLIVIFYYLGLLCGVCGYDRHATPTTRGCVSNTGGVFLMVGVGLSFLFCWILMIIVVLTFVFGANVEKLICEPYTSKELFRVLDTPYLLNEDWEYYLSGKLFNKSKMKLTFEQVYSDCKKNRGTYGTLHLQNSFNISEHLNINEHTGSISSELESLKVNLNIFLLGAAGRKNLQDFAACGIDRMNYDSYLAQTGKSPAGVNLLSFAYDLEAKANSLPPGNLRNSLKRDAQTIKTIHQQRVLPIEQSLSTLYQSVKILQRTGNGLLERVTRILASLDFAQNFITNNTSSVIIEETKKYGRTIIGYFEHYLQWIEFSISEKVASCKPVATALDTAVDVFLCSYIIDPLNLFWFGIGKATVFLLPALIFAVKLAKYYRRMDSEDVYDDVETIPMKNPSQH

SEQ ID NO: 59344 - protein, 830 aa, Homo sapiens
MALVLGSLLLLGLCGNSFSGGQPSSTDAPKAWNYELPATNYETQDSHKAGPIGILFELVHIFLYVVQPRDFPEDTLRKFLQKAYESKIDYDKIVYYEAGIILCCVLGLLFIILMPLVGYFFCMCRCCNKCGGEMHQRQKENGPFLRKCFAISLLVICIIISIGIFYGFVANHQVRTRIKRSRKLADSNFKDLRTLLNETPEQIKYILAQYNTTKDKAFTDLNSINSVLGGGILDRLRPNIIPVLDEIKSMATAIKETKEALENMNSTLKSLHQQSTQLSSSLTSVKTSLRSSLNDPLCLVHPSSETCNSIRLSLSQLNSNPELRQLPPVDAELDNVNNVLRTDLDGLVQQGYQSLNDIPDRVQRQTTTVVAGIKRVLNSIGSDIDNVTQRLPIQDILSAFSVYVNNTESYIHRNLPTLEEYDSYWWLGGLVICSLLTLIVIFYYLGLLCGVCGYDRHATPTTRGCVSNTGGVFLMVGVGLSFLFCWILMIIVVLTFVFGANVEKLICEPYTSKELFRVLDTPYLLNEDWEYYLSGKLFNKSKMKLTFEQVYSDCKKNRGTYGTLHLQNSFNISEHLNINEHTGSISSELESLKVNLNIFLLGAAGRKNLQDFAACGIDRMNYDSYLAQTGKSPAGVNLLSFAYDLEAKANSLPPGNLRNSLKRDAQTIKTIHQQRVLPIEQSLSTLYQSVKILQRTGNGLLERVTRILASLDFAQNFITNNTSSVIIEETKKYGRTIIGYFEHYLQWIEFSISEKVASCKPVATALDTAVDVFLCSYIIDPLNLFWFGIGKATVFLLPALIFAVKLAKYYRRMDSEDVYDDSSWVTSVQC

SEQ ID NO: 59345 - protein, 226 aa, Homo sapiens
MEAERRRQAEKPKKGRVGSNLLPERHPATGTPTTTVDSSAPPCRRLPGAGGGRSRFSPQGGQRGRPHSRRRHRTTFSPVQLEQLESAFGRNQYPDIWARESLARDTGLSEARIQVWFQNRRAKQRKQERSLLQPLAHLSPAAFSSFLPESTACPYSYAAPPPPVTCFPHPYSHALPSQPSTGGAFALSHQSEDWYPTLHPAPAGHLPCPPPPPMLPLSLEPSKSWN

SEQ ID NO: 59346 - protein, 138 aa, Homo sapiens
NISLCPEICFQKIESQVYFVRVDSGIQPGSDISIYYDPMISKLITYGSDRTEALKRMADALDNYVIRGVTHNIALLREVIINSRFVKGDISTKFLSDVYPDGFKGHMLTKSEKNQLLAIASSLFVAFQLRAQHFQENS

SEQ ID NO: 59347 - protein, 120 aa, Homo sapiens
MSIQFLGTVYKVNILTRLAAELNKFMLEKVTEDTSSVLRSPMPGVVVAVSVKPGDAATSSLSVEICLFWTFQVAEGQEICVIEAMKMQNSMTAGKTGTVKSVHCQAGDTVGEGDLLVELE

SEQ ID NO: 59348 - protein, 681 aa, Homo sapiens
MAGFWVGTAPLVAAGRRGRWPPQQLMLSAALRTLKHVLYYSRQCLMVSRNLGSVGYDPNEKTFDKILVANRGEIACRVIRTCKKMGIKTVAIHSDVDASSVHVKMADEAVCVGPAPTSKSYLNMDAIMEAIKKTRAQAVHPGYGFLSENKEFARCLAAEDVVFIGPDTHAIQAMGDKIESKLLAKKAEVNTIPGFDGVVKDAEEAVRIAREIGYPVMIKASAGGGGKGMRIAWDDEETRDGFRLSSQEAASSFGDDRLLIEKFIDNPRHIEIQVLGDKHGNALWLNERECSIQRRNQKVVEEAPSIFLDAETRRAMGEQAVALARAVKYSSAGTVEFLVDSKKNFYFLEMNTRLQVEHPVTECITGLDLVQEMIRVAKGYPLRHKQADIRINGWAVECRVYAEDPYKSFGLPSIGRLSQYQEPLHLPGVRVDSGIQPGSDISIYYDPMISKLITYGSDRTEALKRMADALDNYVIRGVTHNIALLREVIINSRFVKGDISTKFLSDVYPDGFKGHMLTKSEKNQLLAIASSLFVAFQLRAQHFQENSRMPVIKPDIANWELSVKLHDKVHTVVASNNGSVFSVEVDGSKLNVTSTWNLASPLLSVSVDGTQRTVQCLSREAGGNMSIQFLGTVVAEGQEICVIEAMKMQNSMTAGKTGTVKSVHCQAGDTVGEGDLLVELE

SEQ ID NO: 59349 - protein, 728 aa, Homo sapiens
MAGFWVGTAPLVAAGRRGRWPPQQLMLSAALRTLKHVLYYSRQCLMVSRNLGSVGYDPNEKTFDKILVANRGEIACRVIRTCKKMGIKTVAIHSDVDASSVHVKMADEAVCVGPAPTSKSYLNMDAIMEAIKKTRAQAVHPGYGFLSENKEFARCLAAEDVVFIGPDTHAIQAMGDKIESKLLAKKAEVNTIPGFDGVVKDAEEAVRIAREIGYPVMIKASAGGGGKGMRIAWDDEETRDGFRLSSQEAASSFGDDRLLIEKFIDNPRHIEIQVLGDKHGNALWLNERECSIQRRNQKVVEEAPSIFLDAETRRAMGEQAVALARAVKYSSAGTVEFLVDSKKNFYFLEMNTRLQVEHPVTECITGLDLVQEMIRVAKGYPLRHKQADIRINGWAVECRVYAEDPYKSFGLPSIGRLSQYQEPLHLPGVRVDSGIQPGSDISIYYDPMISKLITYGSDRTEALKRMADALDNYVIRGVTHNIALLREVIINSRFVKGDISTKFLSDVYPDGFKGHMLTKSEKNQLLAIASSLFVAFQLRAQHFQENSRMPVIKPDIANWELSVKLHDKVHTVVASNNGSVFSVEVDGSKLNVTSTWNLASPLLSVSVDGTQRTVQCLSREAGGNMSIQFLGTVYKVNILTRLAAELNKFMLEKVTEDTSSVLRSPMPGVVVAVSVKPGDAVAEGQEICVIEAMKMQNSMTAGKTGTVKSVHCQAGDTVGEGDLLVELE

SEQ ID NO: 59350 - protein, 702 aa, Homo sapiens
MAGFWVGTAPLVAAGRRGRWPPQQLMLSAALRTLKTFDKILVANRGEIACRVIRTCKKMGIKTVAIHSDVDASSVHVKMADEAVCVGPAPTSKSYLNMDAIMEAIKKTRAQAVHPGYGFLSENKEFARCLAAEDVVFIGPDTHAIQAMGDKIESKLLAKKAEVNTIPGFDGVVKDAEEAVRIAREIGYPVMIKASAGGGGKGMRIAWDDEETRDGFRLSSQEAASSFGDDRLLIEKFIDNPRHIEIQVLGDKHGNALWLNERECSIQRRNQKVVEEAPSIFLDAETRRAMGEQAVALARAVKYSSAGTVEFLVDSKKNFYFLEMNTRLQVEHPVTECITGLDLVQEMIRVAKGYPLRHKQADIRINGWAVECRVYAEDPYKSFGLPSIGRLSQYQEPLHLPGVRVDSGIQPGSDISIYYDPMISKLITYGSDRTEALKRMADALDNYVIRGVTHNIALLREVIINSRFVKGDISTKFLSDVYPDGFKGHMLTKSEKNQLLAIASSLFVAFQLRAQHFQENSRMPVIKPDIANWELSVKLHDKVHTVVASNNGSVFSVEVDGSKLNVTSTWNLASPLLSVSVDGTQRTVQCLSREAGGNMSIQFLGTVYKVNILTRLAAELNKFMLEKVTEDTSSVLRSPMPGVVVAVSVKPGDAVAEGQEICVIEAMKMQNSMTAGKTGTVKSVHCQAGDTVGEGDLLVELE

SEQ ID NO: 59351 - protein, 84 aa, Homo sapiens
  VARIANT 1: note = MOD_RES - Any amino acid
XNWELSVKLHDKVHTVVASNNGSVFSVEVDGSKLNVTSTWNLASPLLSVSVDGTQRTVQCLSREAGGNMSIQFLGTVPWRKLLD

SEQ ID NO: 59352 - protein, 111 aa, Homo sapiens
YKVNILTRLAAELNKFMLEKVTEDTSSVLRSPMPGVVVAVSVKPGDAATSSLSVEICLFWTFQVAEGQEICVIEAMKMQNSMTAGKTGTVKSVHCQAGDTVGEGDLLVELE

SEQ ID NO: 59353 - protein, 134 aa, Homo sapiens
  VARIANT 1: note = MOD_RES - Any amino acid
XMPVIKPDIANWELSVKLHDKVHTVVASNNGSVFSVEVDGSKLNVTSTWNLASPLLSVSVDGTQRTVQCLSREAGGNMSIQFLGTVVAEGQEICVIEAMKMQNSMTAGKTGTVKSVHCQAGDTVGEGDLLVELE

SEQ ID NO: 59354 - protein, 102 aa, Homo sapiens
SDVYPDGFKGHMLTKSEKNQLLAIASSLFVAFQLRAQHFQENSRMPVIKPDIANWELSVKLHDKVHTVVASNNGSVFSVEVDGSKLNVTSTWNLFALIVCQR

SEQ ID NO: 59355 - protein, 539 aa, Homo sapiens
MAAALRVAAVGARLSVLASGLRAAVRSLCSQATSVNERIENKRRTALLGGGQRRIDAQHKRGKLTARERISLLLDPGSFVESDMFVEHRCADFGMAADKNKFPGDSVVTGRGRINGRLVYVFSQDFTVFGGSLSGAHAQKICKIMDQAITVGAPVIGLNDSGGARIQEGVESLAGYADIFLRNVTASGVIPQISLIMGPCAGGAVYSPALTDFTFMVKDTSYLFITGPDVVKSVTNEDVTQEELGGAKTHTTMSGVAHRAFENDVDALCNLRDFFNYLPLSSQDPAPVRECHDPSDRLVPELDTIVPLESTKAYNMVDIIHSVVDEREFFEIMPNYAKNIIVGFARMNGRTVGIVGNQPKVASGCLDINSSVKGARFVRFCDAFNIPLITFVDVPGFLPGTAQEYGGIIRHGAKLLYAFAEATVPKVTVITRKAYGGAYDVMSSKHLCGDTNYAWPTAEIAVMGAKGAVEIIFKGHENVEAAQAEYIEKFANPFPAAVRGFVDDIIQPSSTRARICCDLDVLASKKVQRPWRKHANIPL

SEQ ID NO: 59356 - protein, 559 aa, Homo sapiens
MAAALRVAAVGARLSVLASGLRAAVRSLCSQATSVNERIENKRRTALLGGGQRRIDAQHKRGKLTARERISLLLDPGSFVESDMFVEHRCADFGMAADKNKFPGDSVVTGRGRINGRLVYVFSQQIIGWAQWLPLVISALWEAEDFTVFGGSLSGAHAQKICKIMDQAITVGAPVIGLNDSGGARIQEGVESLAGYADIFLRNVTASGVIPQISLIMGPCAGGAVYSPALTDFTFMVKDTSYLFITGPDVVKSVTNEDVTQEELGGAKTHTTMSGVAHRAFENDVDALCNLRDFFNYLPLSSQDPAPVRECHDPSDRLVPELDTIVPLESTKAYNMVDIIHSVVDEREFFEIMPNYAKNIIVGFARMNGRTVGIVGNQPKVASGCLDINSSVKGARFVRFCDAFNIPLITFVDVPGFLPGTAQEYGGIIRHGAKLLYAFAEATVPKVTVITRKAYGGAYDVMSSKHLCGDTNYAWPTAEIAVMGAKGAVEIIFKGHENVEAAQAEYIEKFANPFPAAVRGFVDDIIQPSSTRARICCDLDVLASKKVQRPWRKHANIPL

SEQ ID NO: 59357 - protein, 550 aa, Homo sapiens
MAAALRVAAVGARLSVLASGLRAAVRSLCSQATSVNERIENKRRTALLGGGQRRIDAQHKRGKLTARERISLLLDPGSFVESDMFVEHRCADFGMAADKNKFPGDSVVTGRGRINGRLVYVFSQDFTVFGGSLSGAHAQKICKIMDQAITVGAPVIGLNDSGGARIQEGVESLAGYADIFLRNVTASGVIPQISLIMGPCAGGAVYSPALTDFTFMVKDTSYLFITGPDVVKSVTNEDVTQEELGGAKTHTTMSGVAHRAFENDVDALCNLRDFFNYLPLSSQDPAPVRECHDPSDRLVPELDTIVPLESTKAYNMVDIIHSVVDEREFFEIMPNYAKNIIVGFARMNGRTVGIVGNQPKVASGCLDINSSVKGARFVRFCDAFNIPLITFVDVPGFLPGTAQEYGGIIRHGAKLLYAFAEATVPKVTVITRKAYGGAYDVMSSKHLCGDTNYAWPTAEIAVMGAKGAVEIIFKGHENVEAAQAEYIEKFANPFPAAVRGFVDDIIQPSSTRARICCDLDVLASKKVRVQEVFHQVVQSGHRDGRGAVRW

SEQ ID NO: 59358 - protein, 128 aa, Homo sapiens
MSLRLDTTPSCNSARPLHALQVLLLLSLLLTALASSTKGQTKRNLAKGKEESLDSDLYAELRCMCIKTTSGIHPKNIQSLEVIGKGTHCNQVEVIATLKDGRKICLDPDAPRIKKIVQKKLAGDESAD

SEQ ID NO: 59359 - protein, 753 aa, Homo sapiens
MERRAWSLQCTAFVLFCAWCALNSAKAKRQFVNEWAAEIPGGPEAASAIAEELGYDLLGQIGSLENHYLFKHKNHPRRSRRSAFHITKRLSDDDRVIWAEQQYEKERSKRSALRDSALNLFNDPMWNQQWYLQDTRMTAALPKLDLHVIPVWQKGITGKGVVITVLDDGLEWNHTDIYANYDPEASYDFNDNDHDPFPRYDPTNENKHGTRCAGEIAMQANNHKCGVGVAYNSKVGGIRMLDGIVTDAIEASSIGFNPGHVDIYSASWGPNDDGKTVEGPGRLAQKAFEYGVKQGRQGKGSIFVWASGNGGRQGDNCDCDGYTDSIYTISISSASQQGLSPWYAEKCSSTLATSYSSGDYTDQRITSADLHNDCTETHTGTSASAPLAAGIFALALEANPNLTWRDMQHLVVWTSEYDPLANNPGWKKNGAGLMVNSRFGFGLLNAKALVDLADPRTWRSVPEKKECVVKDNDFEPRALKANGEVIIEIPTRACEGQENAIKSLEHVQFEATIEYSRRGDLHVTLTSAAGTSTVLLAERERDTSPNGFKNWDFMSVHTWGENPIGTWTLRITDMSGRIQNEGRIVNWKLILHGTSSQPEHMKQPRVYTSYNTVQNDRRGVEKMVDPGEEQPTQENPKENTLVSKSPSSSSVGGRRDELEEGAPSQAMLRLLQSAFSKNSPPKQSPKKSPSAKLNIPYENFYEALEKLNKPSQLKDSEDSLYNDYVDVFYNTKPYKHRDDRLLQALVDILNEEN

SEQ ID NO: 59360 - protein, 158 aa, Homo sapiens
MERRAWSLQCTAFVLFCAWCALNSAKAKRQFVNEWAAEIPGGPEAASAIAEELGYDLLGQIGSLENHYLFKHKNHPRRSRRSAFHITKRLSDDDRVIWAEQQYEKERSKRSALRDSALNLFNDPMWNQQWYLQDTRMTAALPKLDLHVIPVWQKGITG

SEQ ID NO: 59361 - protein, 706 aa, Homo sapiens
MGKGSISFLFFSQIGSLENHYLFKHKNHPRRSRRSAFHITKRLSDDDRVIWAEQQYEKERSKRSALRDSALNLFNDPMWNQQWYLQDTRMTAALPKLDLHVIPVWQKGITGKGVVITVLDDGLEWNHTDIYANYDPEASYDFNDNDHDPFPRYDPTNENKHGTRCAGEIAMQANNHKCGVGVAYNSKVGGIRMLDGIVTDAIEASSIGFNPGHVDIYSASWGPNDDGKTVEGPGRLAQKAFEYGVKQGRQGKGSIFVWASGNGGRQGDNCDCDGYTDSIYTISISSASQQGLSPWYAEKCSSTLATSYSSGDYTDQRITSADLHNDCTETHTGTSASAPLAAGIFALALEANPNLTWRDMQHLVVWTSEYDPLANNPGWKKNGAGLMVNSRFGFGLLNAKALVDLADPRTWRSVPEKKECVVKDNDFEPRALKANGEVIIEIPTRACEGQENAIKSLEHVQFEATIEYSRRGDLHVTLTSAAGTSTVLLAERERDTSPNGFKNWDFMSVHTWGENPIGTWTLRITDMSGRIQNEGRIVNWKLILHGTSSQPEHMKQPRVYTSYNTVQNDRRGVEKMVDPGEEQPTQENPKENTLVSKSPSSSSVGGRRDELEEGAPSQAMLRLLQSAFSKNSPPKQSPKKSPSAKLNIPYENFYEALEKLNKPSQLKDSEDSLYNDYVDVFYNTKPYKHRDDRLLQALVDILNEEN

SEQ ID NO: 59362 - protein, 260 aa, Homo sapiens
MAGSPLLWGPRAGGVGLLVLLLLGLFRPPPALCARPVKEPRGLSAASPPLAETGAPRRFRRSVPRGEAAGAVQELARALAHLLEAERQERARAEAQEAEDQQARVLAQLLRVWGAPRNSDPALGLDDDPDAPAAQLARALLRARLDPAALAAQLVPAPVPAAALRPRPPVYDDGPAGPDAEEAGDETPDVDPELLRYLLGRILAGSADSEGVAAPRRLRRAADHDVGSELPPEGVLGALLRVKRLETPAPQVPARRLLPP

SEQ ID NO: 59363 - protein, 638 aa, Homo sapiens
MKGGCVSQWKAAAGFLFCVMVFASAERPVFTNHFLVELHKGGEDKARQVAAEHGFGVRKLPFAEGLYHFYHNGLAKAKRRRSLHHKQQLERDPRVKMALQQEGFDRKKRGYRDINEIDINMNDPLFTKQWYLINTGQADGTPGLDLNVAEAWELGYTGKGVTIGIMDDGIDYLHPDLASNYNAEASYDFSSNDPYPYPRYTDDWFNSHGTRCAGEVSAAANNNICGVGVAYNSKVAGIRMLDQPFMTDIIEASSISHMPQLIDIYSASWGPTDNGKTVDGPRELTLQAMADGVNKGRGGKGSIYVWASGDGGSYDDCNCDGYASSMWTISINSAINDGRTALYDESCSSTLASTFSNGRKRNPEAGVATTDLYGNCTLRHSGTSAAAPEAAGVFALALEANLGLTWRDMQHLTVLTSKRNQLHDEVHQWRRNGVGLEFNHLFGYGVLDAGAMVKMAKDWKTVPERFHCVGGSVQDPEKIPSTGKLVLTLTTDACEGKENFVRYLEHVQAVITVNATRRGDLNINMTSPMGTKSILLSRRPRDDDSKVGFDKWPFMTTHTWGEDARGTWTLELGFVGSAPQKGVLKEWTLMLHGTQSAPYIDQVVRDYQSKLAMSKKEELEEELDEAVERSLKSILNKN

SEQ ID NO: 59364 - protein, 619 aa, Homo sapiens
MVFASAERPVFTNHFLVELHKGGEDKARQVAAEHGFGVRKLPFAEGLYHFYHNGLAKAKRRRSLHHKQQLERDPRVKMALQQEGFDRKKRGYRDINEIDINMNDPLFTKQWYLINTGQADGTPGLDLNVAEAWELGYTGKGVTIGIMDDGIDYLHPDLASNYNAEASYDFSSNDPYPYPRYTDDWFNSHGTRCAGEVSAAANNNICGVGVAYNSKVAGIRMLDQPFMTDIIEASSISHMPQLIDIYSASWGPTDNGKTVDGPRELTLQAMADGVNKGRGGKGSIYVWASGDGGSYDDCNCDGYASSMWTISINSAINDGRTALYDESCSSTLASTFSNGRKRNPEAGVATTDLYGNCTLRHSGTSAAAPEAAGVFALALEANLGLTWRDMQHLTVLTSKRNQLHDEVHQWRRNGVGLEFNHLFGYGVLDAGAMVKMAKDWKTVPERFHCVGGSVQDPEKIPSTGKLVLTLTTDACEGKENFVRYLEHVQAVITVNATRRGDLNINMTSPMGTKSILLSRRPRDDDSKVGFDKWPFMTTHTWGEDARGTWTLELGFVGSAPQKGVLKEWTLMLHGTQSAPYIDQVVRDYQSKLAMSKKEELEEELDEAVERSLKSILNKN

SEQ ID NO: 59365 - protein, 603 aa, Homo sapiens
MKGGCVSQWKAAAGFLFCVMVFASAERPVFTNHFLVELHKGGEDKARQVAAEHGFGVRKVKMALQQEGFDRKKRGYRDINEIDINMNDPLFTKQWYLINTGQADGTPGLDLNVAEAWELGYTGKGVTIGIMDDGIDYLHPDLASNYNAEASYDFSSNDPYPYPRYTDDWFNSHGTRCAGEVSAAANNNICGVGVAYNSKVAGIRMLDQPFMTDIIEASSISHMPQLIDIYSASWGPTDNGKTVDGPRELTLQAMADGVNKGRGGKGSIYVWASGDGGSYDDCNCDGYASSMWTISINSAINDGRTALYDESCSSTLASTFSNGRKRNPEAGVATTDLYGNCTLRHSGTSAAAPEAAGVFALALEANLGLTWRDMQHLTVLTSKRNQLHDEVHQWRRNGVGLEFNHLFGYGVLDAGAMVKMAKDWKTVPERFHCVGGSVQDPEKIPSTGKLVLTLTTDACEGKENFVRYLEHVQAVITVNATRRGDLNINMTSPMGTKSILLSRRPRDDDSKVGFDKWPFMTTHTWGEDARGTWTLELGFVGSAPQKGVLKEWTLMLHGTQSAPYIDQVVRDYQSKLAMSKKEELEEELDEAVERSLKSILNKN

SEQ ID NO: 59366 - protein, 755 aa, Homo sapiens
MRPAPIALWLRLVLALALVRPRAVGWAPVRAPIYVSSWAVQVSQGNREVERLARKFGFVNLGPIFPDGQYFHLRHRGVVQQSLTPHWGHRLHLKKNPKVQWFQQQTLQRRVKRSVVVPTDPWFSKQWYMNSEAQPDLSILQAWSQGLSGQGIVVSVLDDGIEKDHPDLWANYDPLASYDFNDYDPDPQPRYTPSKENRHGTRCAGEVAAMANNGFCGVGVAFNARIGGVRMLDGTITDVIEAQSLSLQPQHIHIYSASWGPEDDGRTVDGPGILTREAFRRGVTKGRGGLGTLFIWASGNGGLHYDNCNCDGYTNSIHTLSVGSTTQQGRVPWYSEACASTLTTTYSSGVATDPQIVTTDLHHGCTDQHTGTSASAPLAAGMIALALEANPFLTWRDMQHLVVRASKPAHLQAEDWRTNGVGRQVSHHYGYGLLDAGLLVDTARTWLPTQPQRKCAVRVQSRPTPILPLIYIRENVSACAGLHNSIRSLEHVQAQLTLSYSRRGDLEISLTSPMGTRSTLVAIRPLDVSTEGYNNWVFMSTHFWDENPQGVWTLGLENKGYYFNTGTLYRYTLLLYGTAEDMTARPTGPQVTSSACVQRDTEGLCQACDGPAYILGQLCLAYCPPRFFNHTRLVTAGPGHTAAPALRVCSSCHASCYTCRGGSPRDCTSCPPSSTLDQQQGSCMGPTTPDSRPRLRAAACPHHRCPASAMVLSLLAVTLGGPVLCGMSMDLPLYAWLSRARATPTKPQVWLPAGT

SEQ ID NO: 59367 - protein, 378 aa, Homo sapiens [sequence omitted]

SEQ ID NO: 59368 - protein, 913 aa, Homo sapiens
MGWGSRCCCPGRLDLLCVLALLGGCLLPVCRTRVYTNHWAVKIAGGFPEANRIASKYGFINIGQIGALKDYYHFYHSRTIKRSVISSRGTHSFISMEPKVEWIQQQVVKKRTKRDYDFSRAQSTYFNDPKWPSMWYMHCSDNTHPCQSDMNIEGAWKRGYTGKNIVVTILDDGIERTHPDLMQNYDALASCDVNGNDLDPMPRYDASNENKHGTRCAGEVAAAANNSHCTVGIAFNAKIGGVRMLDGDVTDMVEAKSVSFNPQHVHIYSASWGPDDDGKTVDGPAPLTRQAFENGVRMGRRGLGSVFVWASGNGGRSKDHCSCDGYTNSIYTISISSTAESGKKPWYLEECSSTLATTYSSGESYDKKIITTDLRQRCTDNHTGTSASAPMAAGIIALALEANPFLTWRDVQHVIVRTSRAGHLNANDWKTNAAGFKVSHLYGFGLMDAEAMVMEAEKWTTVPRQHVCVESTDRQIKTIRPNSAVRSIYKASGCSDNPNRHVNYLEHVVVRITITHPRRGDLAIYLTSPSGTRSQLLANRLFDHSMEGFKNWEFMTIHCWGERAAGDWVLEVYDTPSQLRNFKTPGKLKEWSLVLYGTSVQPYSPTNEFPKVERFRYSRVEDPTDDYGTEDYAGPCDPECSEVGCDGPGPDHCNDCLHYYYKLKNNTRICVSSCPPGHYHADKKRCRKCAPNCESCFGSHGDQCMSCKYGYFLNEETNSCVTHCPDGSYQDTKKNLCRKCSENCKTCTEFHNCTECRDGLSLQGSRCSVSCEDGRYFNGQDCQPCHRFCATCAGAGADGCINCTEGYFMEDGRCVQSCSISYYFDHSSENGYKSCKKCDISCLTCNGPGFKNCTSCPSGYLLDLGMCQMGAICKDATEESWAEGGFCMLVKKNNLCQRKVLQQLCCKTCTFQG

SEQ ID NO: 59369 - protein, 1590 aa, Homo sapiens
MGRRGLGSVFVWASGNGGRSKDHCSCDGYTNSIYTISISSTAESGKKPWYLEECSSTLATTYSSGESYDKKIITTDLRQRCTDNHTGTSASAPMAAGIIALALEANPFLTWRDVQHVIVRTSRAGHLNANDWKTNAAGFKVSHLYGFGLMDAEAMVMEAEKWTTVPRQHVCVESTDRQIKTIRPNSAVRSIYKASGCSDNPNRHVNYLEHVVVRITITHPRRGDLAIYLTSPSGTRSQLLANRLFDHSMEGFKNWEFMTIHCWGERAAGDWVLEVYDTPSQLRNFKTPGKLKEWSLVLYGTSVQPYSPTNEFPKVERFRYSRVEDPTDDYGTEDYAGPCDPECSEVGCDGPGPDHCNDCLHYYYKLKNNTRICVSSCPPGHYHADKKRCRKCAPNCESCFGSHGDQCMSCKYGYFLNEETNSCVTHCPDGSYQDTKKNLCRKCSENCKTCTEFHNCTECRDGLSLQGSRCSVSCEDGRYFNGQDCQPCHRFCATCAGAGADGCINCTEGYFMEDGRCVQSCSISYYFDHSSENGYKSCKKCDISCLTCNGPGFKNCTSCPSGYLLDLGMCQMGAICKDGEYVDEHGHCQTCEASCAKCQGPTQEDCTTCPMTRIFDDGRCVSNCPSWKFEFENQCHPCHHTCQRCQGSGPTHCTSCGADNYGREHFLYQGECGDSCPEGHYATEGNTCLPCPDNCELCHSVHVCTRCMKGYFIAPTNHTCQKLECGQGEVQDPDYEECVPCEEGCLGCSLDDPGTCTSCAMGYYRFDHHCYKTCPEKTYSEEVECKACDSNCGSCDQNGCYWCEEGFFLLGGSCVRKCGPGFYGDQEMGECESCHRACETCTGPGHDECSSCQEGLQLLRGMCVHATKTQEEGKFWNEAVSTANLSVVKSLLQERRRWKVQIKRDILRKLQPCHSSCKTCNGSATLCTSCPKGAYLLAQACVSSCPQGTWPSVRSGSCENCTEACAICSGADLCKKCQMQPGHPLFLHEGRCYSKCPEGSYAEDGICERCSSPCRTCEGNATNCHSCEGGHVLHHGVCQENCPERHVAVKGVCKHCPEMCQDCIHEKTCKECTPEFFLHDDMCHQSCPRGFYADSRHCVPCHKDCLECSGPKADDCELCLESSWVLYDGLCLEECPAGTYYEKETKECRDCHKSCLTCSSSGTCTTCQKGLIMNPRGSCMANEKCSPSEYWDEDAPGCKPCHVKCFHCMGPAEDQCQTCPMNSLLLNTTCVKDCPEGYYADEDSNRCAHCHSSCRTCEGRHSRQCHSCRPGWFQLGKECLLQCREGYYADNSTGRCERCNRSCKGCQGPRPTDCLSCDRFFFLLRSKGECHRSCPDHYYVEQSTQTCERCHPTCDQCKGKGALNCLSCVWSYHLMGGICTSDCLVGEYRVGEGEKFNCEKCHESCMECKGPGAKNCTLCPANLVLHMDDSHCLHCCNTSDPPSAQECCDCQDTTDECILRTSKVRPATEHFKTALFITSSMMLVLLLGAAVVVWKKSRGRVQPAAKAGYEKLADPNKSYSSYKSSYRESTSFEEDQVIEYRDRDYDEDDDDDIVYMGQDGTVYRKFKYGLLDDDDIDELEYDDESYSYYQ

SEQ ID NO: 59370 - protein, 690 aa, Homo sapiens
MGWGSRCCCPGRLDLLCVLALLGGCLLPVCRTRVYTNHWAVKIAGGFPEANRIASKYGFINIGQIGALKDYYHFYHSRTIKRSVISSRGTHSFISMEPKVEWIQQQVVKKRTKRDYDFSRAQSTYFNDPKWPSMWYMHCSDNTHPCQSDMNIEGAWKRGYTGKNIVVTILDDGIERTHPDLMQNYDALASCDVNGNDLDPMPRYDASNENKHGTRCAGEVAAAANNSHCTVGIAFNAKIGGVRMLDGDVTDMVEAKSVSFNPQHVHIYSASWGPDDDGKTVDGPAPLTRQAFENGVRMGRRGLGSVFVWASGNGGRSKDHCSCDGYTNSIYTISISSTAESGKKPWYLEECSSTLATTYSSGESYDKKIITTDLRQRCTDNHTGTSASAPMAAGIIALALEANPFLTWRDVQHVIVRTSRAGHLNANDWKTNAAGFKVSHLYGFGLMDAEAMVMEAEKWTTVPRQHVCVESTDRQIKTIRPNSAVRSIYKASGCSDNPNRHVNYLEHVVVRITITHPRRGDLAIYLTSPSGTRSQLLANRLFDHSMEGFKNWEFMTIHCWGERAAGDWVLEVYDTPSQLRNFKTPGKLKEWSLVLYGTSVQPYSPTNEFPKVERFRYSRVEDPTDDYGTEDYAGELASSGTQAKKRQLMHHPTTWENRMEWNGMKWNGMKWNGMEWNGMEWNRIESNRIE

SEQ ID NO: 59371 - protein, 690 aa, Homo sapiens
MGWGSRCCCPGRLDLLCVLALLGGCLLPVCRTRVYTNHWAVKIAGGFPEANRIASKYGFINIGQIGALKDYYHFYHSRTIKRSVISSRGTHSFISMEPKVEWIQQQVVKKRTKRDYDFSRAQSTYFNDPKWPSMWYMHCSDNTHPCQSDMNIEGAWKRGYTGKNIVVTILDDGIERTHPDLMQNYDALASCDVNGNDLDPMPRYDASNENKHGTRCAGEVAAAANNSHCTVGIAFNAKIGGVRMLDGDVTDMVEAKSVSFNPQHVHIYSASWGPDDDGKTVDGPAPLTRQAFENGVRMGRRGLGSVFVWASGNGGRSKDHCSCDGYTNSIYTISISSTAESGKKPWYLEECSSTLATTYSSGESYDKKIITTDLRQRCTDNHTGTSASAPMAAGIIALALEANPFLTWRDVQHVIVRTSRAGHLNANDWKTNAAGFKVSHLYGFGLMDAEAMVMEAEKWTTVPRQHVCVESTDRQIKTIRPNSAVRSIYKASGCSDNPNRHVNYLEHVVVRITITHPRRGDLAIYLTSPSGTRSQLLANRLFDHSMEGFKNWEFMTIHCWGERAAGDWVLEVYDTPSQLRNFKTPGKLKEWSLVLYGTSVQPYSPTNEFPKVERFRYSRVEDPTDDYGTEDYAGELASSGTQAKKRQLMHHPTTWENRMEWNGMKWNGMEWNGMEWNGMESNRIESNRIE

SEQ ID NO: 59372 - protein, 1560 aa, Homo sapiens
NSIYTISISSTAESGKKPWYLEECSSTLATTYSSGESYDKKIITTDLRQRCTDNHTGTSASAPMAAGIIALALEANPFLTWRDVQHVIVRTSRAGHLNANDWKTNAAGFKVSHLYGFGLMDAEAMVMEAEKWTTVPRQHVCVESTDRQIKTIRPNSAVRSIYKASGCSDNPNRHVNYLEHVVVRITITHPRRGDLAIYLTSPSGTRSQLLANRLFDHSMEGFKNWEFMTIHCWGERAAGDWVLEVYDTPSQLRNFKTPGKLKEWSLVLYGTSVQPYSPTNEFPKVERFRYSRVEDPTDDYGTEDYAGPCDPECSEVGCDGPGPDHCNDCLHYYYKLKNNTRICVSSCPPGHYHADKKRCRKCAPNCESCFGSHGDQCMSCKYGYFLNEETNSCVTHCPDGSYQDTKKNLCRKCSENCKTCTEFHNCTECRDGLSLQGSRCSVSCEDGRYFNGQDCQPCHRFCATCAGAGADGCINCTEGYFMEDGRCVQSCSISYYFDHSSENGYKSCKKCDISCLTCNGPGFKNCTSCPSGYLLDLGMCQMGAICKDGEYVDEHGHCQTCEASCAKCQGPTQEDCTTCPMTRIFDDGRCVSNCPSWKFEFENQCHPCHHTCQRCQGSGPTHCTSCGADNYGREHFLYQGECGDSCPEGHYATEGNTCLPCPDNCELCHSVHVCTRCMKGYFIAPTNHTCQKLECGQGEVQDPDYEECVPCEEGCLGCSLDDPGTCTSCAMGYYRFDHHCYKTCPEKTYSEEVECKACDSNCGSCDQNGCYWCEEGFFLLGGSCVRKCGPGFYGDQEMGECESCHRACETCTGPGHDECSSCQEGLQLLRGMCVHATKTQEEGKFWNEAVSTANLSVVKSLLQERRRWKVQIKRDILRKLQPCHSSCKTCNGSATLCTSCPKGAYLLAQACVSSCPQGTWPSVRSGSCENCTEACAICSGADLCKKCQMQPGHPLFLHEGRCYSKCPEGSYAEDGICERCSSPCRTCEGNATNCHSCEGGHVLHHGVCQENCPERHVAVKGVCKHCPEMCQDCIHEKTCKECTPEFFLHDDMCHQSCPRGFYADSRHCVPCHKDCLECSGPKADDCELCLESSWVLYDGLCLEECPAGTYYEKETKECRDCHKSCLTCSSSGTCTTCQKGLIMNPRGSCMANEKCSPSEYWDEDAPGCKPCHVKCFHCMGPAEDQCQTCPMNSLLLNTTCVKDCPEGYYADEDSNRCAHCHSSCRTCEGRHSRQCHSCRPGWFQLGKECLLQCREGYYADNSTGRCERCNRSCKGCQGPRPTDCLSCDRFFFLLRSKGECHRSCPDHYYVEQSTQTCERCHPTCDQCKGKGALNCLSCVWSYHLMGGICTSDCLVGEYRVGEGEKFNCEKCHESCMECKGPGAKNCTLCPANLVLHMDDSHCLHCCNTSDPPSAQECCDCQDTTDECILRTSKVRPATEHFKTALFITSSMMLVLLLGAAVVVWKKSRGRVQPAAKAGYEKLADPNKSYSSYKSSYRESTSFEEDQVIEYRDRDYDEDDDDDIVYMGQDGTVYRKFKYGLLDDDDIDELEYDDESYSYYQ

SEQ ID NO: 59373 - protein, 101 aa, Homo sapiens
CQPCHRFCATCAGAGADGCINCTEGYFMEDGRCVQSCSISYYFDHSSENGYKSCKKCDISCLTCNGPGFKNCTSCPSGYLLDLGMCQMGAICKDVSLFRGA

SEQ ID NO: 59374 - protein, 1860 aa, Homo sapiens
MGWGSRCCCPGRLDLLCVLALLGGCLLPVCRTRVYTNHWAVKIAGGFPEANRIASKYGFINIGQIGALKDYYHFYHSRTIKRSVISSRGTHSFISMEPKVEWIQQQVVKKRTKRDYDFSRAQSTYFNDPKWPSMWYMHCSDNTHPCQSDMNIEGAWKRGYTGKNIVVTILDDGIERTHPDLMQNYDALASCDVNGNDLDPMPRYDASNENKHGTRCAGEVAAAANNSHCTVGIAFNAKIGGVRMLDGDVTDMVEAKSVSFNPQHVHIYSASWGPDDDGKTVDGPAPLTRQAFENGVRMGRRGLGSVFVWASGNGGRSKDHCSCDGYTNSIYTISISSTAESGKKPWYLEECSSTLATTYSSGESYDKKIITTDLRQRCTDNHTGTSASAPMAAGIIALALEANPFLTWRDVQHVIVRTSRAGHLNANDWKTNAAGFKVSHLYGFGLMDAEAMVMEAEKWTTVPRQHVCVESTDRQIKTIRPNSAVRSIYKASGCSDNPNRHVNYLEHVVVRITITHPRRGDLAIYLTSPSGTRSQLLANRLFDHSMEGFKNWEFMTIHCWGERAAGDWVLEVYDTPSQLRNFKTPGKLKEWSLVLYGTSVQPYSPTNEFPKVERFRYSRVEDPTDDYGTEDYAGPCDPECSEVGCDGPGPDHCNDCLHYYYKLKNNTRICVSSCPPGHYHADKKRCRKCAPNCESCFGSHGDQCMSCKYGYFLNEETNSCVTHCPDGSYQDTKKNLCRKCSENCKTCTEFHNCTECRDGLSLQGSRCSVSCEDGRYFNGQDCQPCHRFCATCAGAGADGCINCTEGYFMEDGRCVQSCSISYYFDHSSENGYKSCKKCDISCLTCNGPGFKNCTSCPSGYLLDLGMCQMGAICKDGEYVDEHGHCQTCEASCAKCQGPTQEDCTTCPMTRIFDDGRCVSNCPSWKFEFENQCHPCHHTCQRCQGSGPTHCTSCGADNYGREHFLYQGECGDSCPEGHYATEGNTCLPCPDNCELCHSVHVCTRCMKGYFIAPTNHTCQKLECGQGEVQDPDYEECVPCEEGCLGCSLDDPGTCTSCAMGYYRFDHHCYKTCPEKTYSEEVECKACDSNCGSCDQNGCYWCEEGFFLLGGSCVRKCGPGFYGDQEMGECESCHRACETCTGPGHDECSSCQEGLQLLRGMCVHATKTQEEGKFWNDILRKLQPCHSSCKTCNGSATLCTSCPKGAYLLAQACVSSCPQGTWPSVRSGSCENCTEACAICSGADLCKKCQMQPGHPLFLHEGRCYSKCPEGSYAEDGICERCSSPCRTCEGNATNCHSCEGGHVLHHGVCQENCPERHVAVKGVCKHCPEMCQDCIHEKTCKECTPEFFLHDDMCHQSCPRGFYADSRHCVPCHKDCLECSGPKADDCELCLESSWVLYDGLCLEECPAGTYYEKETKECRDCHKSCLTCSSSGTCTTCQKGLIMNPRGSCMANEKCSPSEYWDEDAPGCKPCHVKCFHCMGPAEDQCQTCPMNSLLLNTTCVKDCPEGYYADEDSNRCAHCHSSCRTCEGRHSRQCHSCRPGWFQLGKECLLQCREGYYADNSTGRCERCNRSCKGCQGPRPTDCLSCDRFFFLLRSKGECHRSCPDHYYVEQSTQTCERCHPTCDQCKGKGALNCLSCVWSYHLMGGICTSDCLVGEYRVGEGEKFNCEKCHESCMECKGPGAKNCTLCPANLVLHMDDSHCLHCCNTSDPPSAQECCDCQDTTDECILRTSKVRPATEHFKTALFITSSMMLVLLLGAAVVVWKKSRGRVQPAAKAGYEKLADPNKSYSSYKSSYRESTSFEEDQVIEYRDRDYDEDDDDDIVYMGQDGTVYRKFKYGLLDDDDIDELEYDDESYSYYQ

SEQ ID NO: 59375 - protein, 498 aa, Homo sapiens
IWNVHHCGDKNSRCRSEMNVQAAWKRGYTGKNVVVTILDDGIERNHPDLAPNYDSYASYDVNGNDYDPSPRYDASNENKHGTRCAGEVAASANNSYCIVGIAYNAKIGGIRMLDGDVTDVVEAKSLGIRPNYIDIYSASWGPDDDGKTVDGPGRLAKQAFEYGIKKGRQGLGSIFVWASGNGGREGDYCSCDGYTNSIYTISVSSATENGYKPWYLEECASTLATTYSSGAFYERKIVTTDLRQRCTDGHTGTSVSAPMVAGIIALALEANSQLTWRDVQHLLVKTSRPAHLKASDWKVNGAGHKVSHFYGFGLVDAEALVVEAKKWTAVPSQHMCVAASDKRPRSIPLVQVLRTTALTSACAEHSDQRVVYLEHVVVRTSISHPRRGDLQIYLVSPSGTKSQLLAKRLLDLSNEGFTNWEFMTVHCWGEKAEGQWTLEIQDLPSQVRNPEKQGDLETPVANQLTTEERFVSTLSILFHWSVYLSWSQYHIVLITVAL

SEQ ID NO: 59376 - protein, 651 aa, Homo sapiens
MPPRAPPAPGPRPPPRAAAATDTAAGAGGAGGAGGAGGPGFRPLAPRPWRWLLLLALPAACSPPPRPVYTNHWAVQVLGGPAEADRVAAAHGYLNLGQIGNLEDYYHFYHSKTFKRSTLSSRGPHTFLRMDPQVKWLQQQEVKRRVKRQVRSDPQALYFNDPIWSNMWYLHCGDKNSRCRSEMNVQAAWKRGYTGKNVVVTILDDGIERNHPDLAPNYDSYASYDVNGNDYDPSPRYDASNENKHGTRCAGEVAASANNSYCIVGIAYNAKIGGIRMLDGDVTDVVEAKSLGIRPNYIDIYSASWGPDDDGKTVDGPGRLAKQAFEYGIKKGRQGLGSIFVWASGNGGREGDYCSCDGYTNSIYTISVSSATENGYKPWYLEECASTLATTYSSGAFYERKIVTTDLRQRCTDGHTGTSVSAPMVAGIIALALEANSQLTWRDVQHLLVKTSRPAHLKASDWKVNGAGHKVSHFYGFGLVDAEALVVEAKKWTAVPSQHMCVAASDKRPRSIPLVQVLRTTALTSACAEHSDQRVVYLEHVVVRTSISHPRRGDLQIYLVSPSGTKSQLLAKRLLDLSNEGFTNWEFMTVHCWGEKAEGQWTLEIQDLPSQVRNPEKQGDLETPVANQLTTEEREPGLKHVFRWQIEQELW

SEQ ID NO: 59377 - protein, 968 aa, Homo sapiens
MPPRAPPAPGPRPPPRAAAATDTAAGAGGAGGAGGAGGPGFRPLAPRPWRWLLLLALPAACSPPPRPVYTNHWAVQVLGGPAEADRVAAAHGYLNLGQIGNLEDYYHFYHSKTFKRSTLSSRGPHTFLRMDPQVKWLQQQEVKRRVKRQVRSDPQALYFNDPIWSNMWYLHCGDKNSRCRSEMNVQAAWKRGYTGKNVVVTILDDGIERNHPDLAPNYDSYASYDVNGNDYDPSPRYDASNENKHGTRCAGEVAASANNSYCIVGIAYNAKIGGIRMLDGDVTDVVEAKSLGIRPNYIDIYSASWGPDDDGKTVDGPGRLAKQAFEYGIKKGRQGLGSIFVWASGNGGREGDYCSCDGYTNSIYTISVSSATENGYKPWYLEECASTLATTYSSGAFYERKIVTTDLRQRCTDGHTGTSVSAPMVAGIIALALEANSQLTWRDVQHLLVKTSRPAHLKASDWKVNGAGHKVSHFYGFGLVDAEALVVEAKKWTAVPSQHMCVAASDKRPRSIPLVQVLRTTALTSACAEHSDQRVVYLEHVVVRTSISHPRRGDLQIYLVSPSGTKSQLLAKRLLDLSNEGFTNWEFMTVHCWGEKAEGQWTLEIQDLPSQVRNPEKQGKLKEWSLILYGTAEHPYHTFSAHQSRSRMLELSAPELEPPKAALSPSQVEVPEDEEDYTAQSTPGSANILQTSVCHPECGDKGCDGPNADQCLNCVHFSLGSVKTSRKCVSVCPLGYFGDTAARRCRRCHKGCETCSSRAATQCLSCRRGFYHHQEMNTCVTLCPAGFYADESQKNCLKCHPSCKKCVDEPEKCTVCKEGFSLARGSCIPDCEPGTYFDSELIRCGECHHTCGTCVGPGREECIHCAKNFHFHDWKCVPACGEGFYPEEMPGLPHKVCRRCDENCLSCAGSSRNCSRCKTGFTQLGTSCITNHTCSNADETFCEMVKSNRLCERKLFIQFCCRTCLLAG

SEQ ID NO: 59378 - protein, 955 aa, Homo sapiens
MPPRAPPAPGPRPPPRAAAATDTAAGAGGAGGAGGAGGPGFRPLAPRPWRWLLLLALPAACSPPPRPVYTNHWAVQVLGGPAEADRVAAAHGYLNLGQIGNLEDYYHFYHSKTFKRSTLSSRGPHTFLRMDPQVKWLQQQEVKRRVKRQVRSDPQALYFNDPIWSNMWYLHCGDKNSRCRSEMNVQAAWKRGYTGKNVVVTILDDGIERNHPDLAPNYDSYASYDVNGNDYDPSPRYDASNENKHGTRCAGEVAASANNSYCIVGIAYNAKIGGIRMLDGDVTDVVEAKSLGIRPNYIDIYSASWGPDDDGKTVDGPGRLAKQAFEYGIKKGRQGLGSIFVWASGNGGREGDYCSCDGYTNSIYTISVSSATENGYKPWYLEECASTLATTYSSGAFYERKIVTTDLRQRCTDGHTGTSVSAPMVAGIIALALEANSQLTWRDVQHLLVKTSRPAHLKASDWKVNGAGHKVSHFYGFGLVDAEALVVEAKKWTAVPSQHMCVAASDKRPRSIPLVQVLRTTALTSACAEHSDQRVVYLEHVVVRTSISHPRRGDLQIYLVSPSGTKSQLLAKRLLDLSNEGFTNWEFMTVHCWGEKAEGQWTLEIQDLPSQVRNPEKQGKLKEWSLILYGTAEHPYHTFSAHQSRSRMLELSAPELEPPKAALSPSQVEVPEDEEDYTGVCHPECGDKGCDGPNADQCLNCVHFSLGSVKTSRKCVSVCPLGYFGDTAARRCRRCHKGCETCSSRAATQCLSCRRGFYHHQEMNTCVTLCPAGFYADESQKNCLKCHPSCKKCVDEPEKCTVCKEGFSLARGSCIPDCEPGTYFDSELIRCGECHHTCGTCVGPGREECIHCAKNFHFHDWKCVPACGEGFYPEEMPGLPHKVCRRCDENCLSCAGSSRNCSRCKTGFTQLGTSCITNHTCSNADETFCEMVKSNRLCERKLFIQFCCRTCLLAG

SEQ ID NO: 59379 - protein, 622 aa, Homo sapiens
MPPRAPPAPGPRPPPRAAAATDTAAGAGGAGGAGGAGGPGFRPLAPRPWRWLLLLALPAACSAPPRPVYTNHWAVQVLGGPAEADRVAAAHGYLNLGQIGNLEDYYHFYHSKTFKRSTLSSRGPHTFLRMDPQVKWLQQQEVKRRVKRQVRSDPQALYFNDPIWSNMWYLHCGDKNSRCRSEMNVQAAWKRGYTGKNVVVTILDDGIERNHPDLAPNYDSYASYDVNGNDYDPSPRYDASNENKHGTRCAGEVAASANNSYCIVGIAYNAKIGGIRMLDGDVTDVVEAKSLGIRPNYIDIYSASWGPDDDGKTVDGPGRLAKQAFEYGIKKGRQGLGSIFVWASGNGGREGDYCSCDGYTNSIYTISVSSATENGYKPWYLEECASTLATTYSSGAFYERKIVTTDLRQRCTDGHTGTSVSAPMVAGIIALALEANSQLTWRDVQHLLVKTSRPAHLKASDWKVNGAGHKVSHFYGFGLVDAEALVVEAKKWTAVPSQHMCVAASDKRPRSIPLVQVLRTTALTSACAEHSDQRVVYLEHVVVRTSISHPRRGDLQIYLVSPSGTKSQLLAKRLLDLSNEGFTNWEFMTVHCWGEKAEGQWTLEIQDLPSQVRNPEKQGNLD

SEQ ID NO: 59380 - protein, 527 aa, Homo sapiens
MYALFLLASLLGAALAGPVLGLKECTRGSAVWCQNVKTASDCGAVKHCLQTVWNKPTVKSLPCDICKDVVTAAGDMLKDNATEEEILVYLEKTCDWLPKPNMSASCKEIVDSYLPVILDIIKGEMSRPGEVCSALNLCESLQKHLAELNHQKQLESNKIPELDMTEVVAPFMANIPLLLYPQDGPRSKPQPKDNGDVCQDCIQMVTDIQTAVRTNSTFVQALVEHVKEECDRLGPGMADICKNYISQYSEIAIQMMMHMSAEQPKEICALVGFCDEVKEMPMQTLVPAKVASKNVIPALELVEPIKKHEVPAKSDVYCEVCEFLVKEVTKLIDNNKTEKEILDAFDKMCSKLPKSLSEECQEVVDTYGSSILSILLEEVSPELVCSMLHLCSGTRLPALTVHVTQPKDGGFCEVCKKLVGYLDRNLEKNSTKQEILAALEKGCSFLPDPYQKQCDQFVAEYEPVLIEILVEVMDPSFVCLKIGACPSAHKPLLGTEKCIWGPSYWCQNTETAAQCNAVEHCKRHVWN

SEQ ID NO: 59381 - protein, 559 aa, Homo sapiens
MYALFLLASLLGAALAGPVLGLKECTRGSAVWCQNVKTASDCGAVKHCLQTVWNKPTVKSLPCDICKDVVTAAGDMLKDNATEEEILVYLEKTCDWLPKPNMSASCKEIVDSYLPVILDIIKGEMSRPGEVCSALNLCESLQKHLAELNHQKQLESNKIPELDMTEVVAPFMANIPLLLYPQDGPRSKPQPKDNGDVCQDCIQMVTDIQTAVRTNSTFVQALVEHVKEECDRLGPGMADICKNYISQYSEIAIQMMMHMQPKEICALVGFCDEVKEMPMQTLVPAKVASKNVIPALELVEPIKKHEVPAKSDVYCEVCEFLVKEVTKLIDNNKTEKEILDAFDKMCSKLPKSLSEECQEVVDTYGSSILSILLEEVSPELVCSMLHLCSGTRLPALTVHVTQPKDGGFCEVCKKLVGYLDRNLEKNSTKQEILAALEKGCSFLPDPYQKQCDQFVAEYEPVLIEILVEVMDPSFVCLKIGACPSAHKPLLGTEKCIWGPSYWCQNTETAAQCNAVEHCKRHVWIGCWGVGVGSCLWPTWAPTLLSTSGCQETASKASRT

SEQ ID NO: 59382 - protein, 240 aa, Homo sapiens
MYALFLLASLLGAALAGPVLGLKECTRGSAVWCQNVKTASDCGAVKHCLQTVWNKPTVKSLPCDICKDVVTAAGDMLKDNATEEEILVYLEVSPELVCSMLHLCSGTRLPALTVHVTQPKDGGFCEVCKKLVGYLDRNLEKNSTKQEILAALEKGCSFLPDPYQKQCDQFVAEYEPVLIEILVEVMDPSFVCLKIGACPSAHKPLLGTEKCIWGPSYWCQNTETAAQCNAVEHCKRHVWN

SEQ ID NO: 59383 - protein, 526 aa, Homo sapiens
MYALFLLASLLGAALAGPVLGLKECTRGSAVWCQNVKTASDCGAVKHCLQTVWNKPTVKSLPCDICKDVVTAAGDMLKDNATEEEILVYLEKTCDWLPKPNMSASCKEIVDSYLPVILDIIKGEMSRPGEVCSALNLCESLQKHLAELNHQKQLESNKIPELDMTEVVAPFMANIPLLLYPQDGPRSKPQPKDNGDVCQDCIQMVTDIQTAVRTNSTFVQALVEHVKEECDRLGPGMADICKNYISQYSEIAIQMMMHMLQQPKEICALVGFCDEVKEMPMQTLVPAKVASKNVIPALELVEPIKKHEVPAKSDVYCEVCEFLVKEVTKLIDNNKTEKEILDAFDKMCSKLPKSLSEECQEVVDTYGSSILSILLEEVSPELVCSMLHLCSGTRLPALTVHVTQPKDGGFCEVCKKLVGYLDRNLEKNSTKQEILAALEKGCSFLPDPYQKQCDQFVAEYEPVLIEILVEVMDPSFVCLKIGACPSAHKPLLGTEKCIWGPSYWCQNTETAAQCNAVEHCKRHVWN

SEQ ID NO: 59384 - protein, 524 aa, Homo sapiens
MYALFLLASLLGAALAGPVLGLKECTRGSAVWCQNVKTASDCGAVKHCLQTVWNKPTVKSLPCDICKDVVTAAGDMLKDNATEEEILVYLEKTCDWLPKPNMSASCKEIVDSYLPVILDIIKGEMSRPGEVCSALNLCESLQKHLAELNHQKQLESNKIPELDMTEVVAPFMANIPLLLYPQDGPRSKPQPKDNGDVCQDCIQMVTDIQTAVRTNSTFVQALVEHVKEECDRLGPGMADICKNYISQYSEIAIQMMMHMQPKEICALVGFCDEVKEMPMQTLVPAKVASKNVIPALELVEPIKKHEVPAKSDVYCEVCEFLVKEVTKLIDNNKTEKEILDAFDKMCSKLPKSLSEECQEVVDTYGSSILSILLEEVSPELVCSMLHLCSGTRLPALTVHVTQPKDGGFCEVCKKLVGYLDRNLEKNSTKQEILAALEKGCSFLPDPYQKQCDQFVAEYEPVLIEILVEVMDPSFVCLKIGACPSAHKPLLGTEKCIWGPSYWCQNTETAAQCNAVEHCKRHVWN

SEQ ID NO: 59385 - protein, 450 aa, Homo sapiens
MLKDNATEEEILVYLEKTCDWLPKPNMSASCKEIVDSYLPVILDIIKGEMSRPGEVCSALNLCESLQKHLAELNHQKQLESNKIPELDMTEVVAPFMANIPLLLYPQDGPRSKPQPKDNGDVCQDCIQMVTDIQTAVRTNSTFVQALVEHVKEECDRLGPGMADICKNYISQYSEIAIQMMMHMQQPKEICALVGFCDEVKEMPMQTLVPAKVASKNVIPALELVEPIKKHEVPAKSDVYCEVCEFLVKEVTKLIDNNKTEKEILDAFDKMCSKLPKSLSEECQEVVDTYGSSILSILLEEVSPELVCSMLHLCSGTRLPALTVHVTQPKDGGFCEVCKKLVGYLDRNLEKNSTKQEILAALEKGCSFLPDPYQKQCDQFVAEYEPVLIEILVEVMDPSFVCLKIGACPSAHKPLLGTEKCIWGPSYWCQNTETAAQCNAVEHCKRHVWN

SEQ ID NO: 59386 - protein, 530 aa, Homo sapiens
DGAMYALFLLASLLGAALAGPVLGLKECTRGSAVWCQNVKTASDCGAVKHCLQTVWNKPTVKSLPCDICKDVVTAAGDMLKDNATEEEILVYLEKTCDWLPKPNMSASCKEIVDSYLPVILDIIKGEMSRPGEVCSALNLCESLQKHLAELNHQKQLESNKIPELDMTEVVAPFMANIPLLLYPQDGPRSKPQPKDNGDVCQDCIQMVTDIQTAVRTNSTFVQALVEHVKEECDRLGPGMADICKNYISQYSEIAIQMMMHMSAEQPKEICALVGFCDEVKEMPMQTLVPAKVASKNVIPALELVEPIKKHEVPAKSDVYCEVCEFLVKEVTKLIDNNKTEKEILDAFDKMCSKLPKSLSEECQEVVDTYGSSILSILLEEVSPELVCSMLHLCSGTRLPALTVHVTQPKDGGFCEVCKKLVGYLDRNLEKNSTKQEILAALEKGCSFLPDPYQKQCDQFVAEYEPVLIEILVEVMDPSFVCLKIGACPSAHKPLLGTEKCIWGPSYWCQNTETAAQCNAVEHCKRHVWN

SEQ ID NO: 59387 - protein, 737 aa, Homo sapiens
MPDHDSTALLSRQTKRRRVDIGVKRTVGTASAFFAKARATFFSAMNPQGSEQDVEYSVVQHADGEKSNVLRKLLKRANSYEDAMMPFPGATIISQLLKNNMNKNGGTEPSFQASGLSSTGSEVHQEDICSNSSRDSPPECLSPFGRPTMSQFDMDRLCDEHLRAKRARVENIIRGMSHSPSVALRGNENEREMAPQSVSPRESYRENKRKQKLPQQQQQSFQQLVSARKEQKREERRQLKQQLEDMQKQLRQLQEKFYQIYDSTDSENDEDGNLSEDSMRSEILDARAQDSVGRSDNEMCELDPGQFIDRARALIREQEMAENKPKREGNNKERDHGPNSLQPEGKHLAETLKQELNTAMSQVVDTVVKVFSAKPSRQVPQVFPPLQIPQARFAVNGENHNFHTANQRLQCFGDVIIPNPLDTFGNVQMASSTDQTEALPLVVRKNSSDQSASGPAAGGHHQPLHQSPLSATTGFTTSTFRHPFPLPLMAYPFQSPLGAPSGSFSGKDRASPESLDLTRDTTSLRTKMSSHHLSHHPCSPAHPPSTAEGLSLSLIKSECGDLQDMSEISPYSGSAMQEGLSPNHLKKAKLMFFYTRYPSSNMLKTYFSDVKFNRCITSQLIKWFSNFREFYYIQMEKYARQAINDGVTSTEELSITRDCELYRALNMHYNKANDFEVPERFLEVAQITLREFFNAIIAGKDVDPSWKKAIYKVICKLDSEVPEIFKSPNCLQELLHE

SEQ ID NO: 59388 - protein, 676 aa, Homo sapiens
MPDHDSTALLSRQTKRRRVDIGVKRTVGTASAFFAKARATFFSAMNPQGSEQDVEYSVVQHADGEKSNVLRKLLKRANSYEDAMMPFPGATIISQLLKNNMNKNGGTEPSFQASGLSSTGSEVHQEDICSNSSRDSPPECLSPFGRPTMSQFDMDRLCDEHLRAKRARVENIIRGMSHSPSVALRGNENEREMAPQSVSPRESYRENKRKQKLPQQQQQSFQQLVSARKEQKREERRQLKQQLEDMQKQLRQLQEKFYQIYDSTDSENDEDGNLSEDSMRSEILDARAQDSVGRSDNEMCELDPGQFIDRARALIREQEMAENKPKREGNNKERDHGPNSLQPEGKHLAETLKQELNTAMSQVVDTVVKVFSAKPSRQVPQVFPPLQIPQARFAVNGENHNFHTANQRLQCFGDVIIPNPLDTFGNVQMASSTDQTEALPLVVRKNSSDQSASGPAAGGHHQPLHQSPLSATTGFTTSTFRHPFPLPLMAYPFQSPLGAPSGSFSGKDRASPESLDLTRDTTSLRTKMSSHHLSHHPCSPAHPPSTAEGLSLSLIKSECGDLQDMSEISPYSGSAMQEGLSPNHLKKAKLMFFYTRYPSSNMLKTYFSDVKFNRCITSQLIKWFSNFREFYYIQMEKYARQAINDGVTSTEELSITRDCELYRALNMHYNKANDFE

SEQ ID NO: 59389 - protein, 737 aa, Homo sapiens; identical to SEQ ID NO: 59387

SEQ ID NO: 59390 - protein, 230 aa, Homo sapiens
MPDHDSTALLSRQTKRRRVDIGVKRTVGTASAFFAKARATFFSAMNPQGSEQDVEYSVVQHADGEKSNVLRKLLKRANSYEDAMMPFPGATIISQLLKNNMNKNGGTEPSFQASGLSSTGSEVHQEDICSNSSRDSPPECLSPFGRPTMSQFDMDRLCDEHLRAKRARVENIIRGMSHSPSVALRGNENEREMAPQSVSPRESYRENKRKQKLPQQQQQSFQQLVSARKE

SEQ ID NO: 59391 - protein, 737 aa, Homo sapiens; identical to SEQ ID NO: 59387

SEQ ID NO: 59392 - protein, 309 aa, Homo sapiens
MASSTDQTEALPLVVRKNSSDQSASGPAAGGHHQPLHQSPLSATTGFTTSTFRHPFPLPLMAYPFQSPLGAPSGSFSGKDRASPESLDLTRDTTSLRTKMSSHHLSHHPCSPAHPPSTAEGLSLSLIKSECGDLQDMSEISPYSGSAMQEGLSPNHLKKAKLMFFYTRYPSSNMLKTYFSDVKFNRCITSQLIKWFSNFREFYYIQMEKYARQAINDGVTSTEELSITRDCELYRALNMHYNKANDFEVPERFLEVAQITLREFFNAIIAGKDVDPSWKKAIYKVICKLDSEVPEIFKSPNCLQELLHE

SEQ ID NO: 59393 - protein, 359 aa, Homo sapiens
MKSPFYRCQNTTSVEKGNSAVMGGVLFSTGLLGNLLALGLLARSGLGWCSRRPLRPLPSVFYMLVCGLTVTDLLGKCLLSPVVLAAYAQNRSLRVLAPALDNSLCQAFAFFMSFFGLSSTLQLLAMALECWLSLGHPFFYRRHITLRLGALVAPVVSAFSLAFCALPFMGFGKFVQYCPGTWCFIQMVHEEGSLSVLGYSVLYSSLMALLVLATVLCNLGAMRNLYAMHRRLQRHPRSCTRDCAEPRADGREASPQPLEELDHLLLLALMTVLFTMCSLPVIYRAYYGAFKDVKEKNRTSEEAEDLRALRFLSVISIVDPWIFIIFRSPVFRIFFHKIFIRPLRYRSRCSNSTNMESSL

SEQ ID NO: 59394 - protein, 224 aa, Homo sapiens
MATHHTLWMGLALLGVLGDLQAAPEAQVSVQPNFQQDKFLGRWFSAGLASNSSWLREKKAALSMCKSVVAPATDGGLNLTSTFLRKNQCETRTMLLQPAGSLGSYSYRSPREWGLHRPPGPSLGATLAGTTLGQPPAAEIHGVGDWGSTYSVSVVETDYDQYALLYSQGSKGPGEDFRMATLYSRTQTPRAELKEKFTAFCKAQGFTEDTIVFLPQTDKCMTEQ

SEQ ID NO: 59395 - protein, 160 aa, Homo sapiens
MATHHTLWMGLALLGVLGDLQAAPEAQVSVQPNFQQDKFLGRWFSAGLASNSSWLREKKAALSMCKSVVAPATDGGLNLTSTFLRKNQCETRTMLLQPAGSLGSYSYRSPREWGLHRPPGPSLGATLAGTTLGQPPAAEIHGVGGDGCPTSVRGKGQAWA

SEQ ID NO: 59396 - protein, 190 aa, Homo sapiens
MATHHTLWMGLALLGVLGDLQAAPEAQVSVQPNFQQDKFLGRWFSAGLASNSSWLREKKAALSMCKSVVAPATDGGLNLTSTFLRKNQCETRTMLLQPAGSLGSYSYRSPHWGSTYSVSVVETDYDQYALLYSQGSKGPGEDFRMATLYSRTQTPRAELKEKFTAFCKAQGFTEDTIVFLPQTDKCMTEQ

SEQ ID NO: 59397 - protein, 62 aa, Homo sapiens
  VARIANT 1: note = MOD_RES - Any amino acid
XGYHCLPAPNRAQGEVGGDGGSVQFGGSVKTSSALREEQEAQWENWPKSGVLTTAPGFFLGR

SEQ ID NO: 59398 - protein, 213 aa, Homo sapiens
  VARIANT 1: note = MOD_RES - Any amino acid
XLRGGGQFLGRGVRGVAARGIGRGGGAGLETGGVDGRGAPAGRRRWVRRVLADAGGGRSPQFLGRWFSAGLASNSSWLREKKAALSMCKSVVAPATDGGLNLTSTFLRKNQCETRTMLLQPAGSLGSYSYRSPHWGSTYSVSVVETDYDQYALLYSQGSKGPGEDFRMATLYSRTQTPRAELKEKFTAFCKAQGFTEDTIVFLPQTDKCMTEQ

SEQ ID NO: 59399 - protein, 195 aa, Homo sapiens
MATHHTLWMGLALLGVLGDLQAAPEAQVSVQPNFQQDKFLGRWFSAGLASNSSWLREKKAALSMCKSVVAPATDGGLNLTSTFLRKNQCETRTMLLQPAGSLGSYSYRSPREWGLHRPPGPSLGATLAGTTLGQPPAAEIHGVGDWGSTYSVSVVETDYDQYALLYSQGSKGPGEDFRMATLYSRTQTPRAELKE

SEQ ID NO: 59400 - protein, 190 aa, Homo sapiens; identical to SEQ ID NO: 59396

SEQ ID NO: 59401 - protein, 402 aa, Homo sapiens
MSPCGPLNLSLAGEATTCAAPWVPNTSAVPPSGASPALPIFSMTLGAVSNLLALALLAQAAGRLRRRRSAATFLLFVASLLATDLAGHVIPGALVLRLYTAGRAPAGGACHFLGGCMVFFGLCPLLLGCGMAVERCVGVTRPLLHAARVSVARARLALAAVAAVALAVALLPLARVGRYELQYPGTWCFIGLGPPGGWRQALLAGLFASLGLVALLAALVCNTLSGLALLRARWRRRSRRPPPASGPDSRRRWGAHGPRSASASSASSIASASTFFGGSRSSGSARRARAHDVEMVGQLVGIMVVSCICWSPMLVLVALAVGGWSSTSLQRPLFLAVRLASWNQILDPWVYILLRQAVLRQLLRLLPPRAGAKGGPAGLGLTPSAWEASSLRSSRHSGLSHF

SEQ ID NO: 59402 - protein, 358 aa, Homo sapiens
MGNASNDSQSEDCETRQWLPPGESPAISSVMFSAGVLGNLIALALLARRWRGDVGCSAGRRSSLSLFHVLVTELVFTDLLGTCLISPVVLASYARNQTLVALAPESRACTYFAFAMTFFSLATMLMLFAMALERYLSIGHPYFYQRRVSRSGGLAVLPVIYAVSLLFCSLPLLDYGQYVQYCPGTWCFIRHGRTAYLQLYATLLLLLIVSVLACNFSVILNLIRMHRRSRRSRCGPSLGSGRGGPGARRRGERVSMAEETDHLILLAIMTITFAVCSLPFTIFAYMNETSSRKEKWDLQALRFLSINSIIDPWVFAILRPPVLRLMRSVLCCRISLRTQDATQTSCSTQSDASKQADL

SEQ ID NO: 59403 - protein, 390 aa, Homo sapiens
MKETRGYGGDAPFCTRLNHSYTGMWAPERSAEARGNLTRPPGSGEDCGSVSVAFPITMLLTGFVGNALAMLLVSRSYRRRESKRKKSFLLCIGWLALTDLVGQLLTTPVVIVVYLSKQRWEHIDPSGRLCTFFGLTMTVFGLSSLFIASAMAVERALAIRAPHWYASHMKTRATRAVLLGVWLAVLAFALLPVLGVGQYTVQWPGTWCFISTGRGGNGTSSSHNWGNLFFASAFAFLGLLALTVTFSCNLATIKALVSRCRAKATASQSSAQWGRITTETAIQLMGIMCVLSVCWSPLLIMMLKMIFNQTSVEHCKTHTEKQKECNFFLIAVRLASLNQILDPWVYLLLRKILLRKFCQIRYHTNNYASSSTSLPCQCSSTLMWSDHLER

SEQ ID NO: 59404 - protein, 419 aa, Homo sapiens
MKETRGYGGDAPFCTRLNHSYTGMWAPERSAEARGNLTRPPGSGEDCGSVSVAFPITMLLTGFVGNALAMLLVSRSYRRRESKRKKSFLLCIGWLALTDLVGQLLTTPVVIVVYLSKQRWEHIDPSGRLCTFFGLTMTVFGLSSLFIASAMAVERALAIRAPHWYASHMKTRATRAVLLGVWLAVLAFALLPVLGVGQYTVQWPGTWCFISTGRGGNGTSSSHNWGNLFFASAFAFLGLLALTVTFSCNLATIKALVSRCRAKATASQSSAQWGRITTETAIQLMGIMCVLSVCWSPLLIMMLKMIFNQTSVEHCKTHTEKQKECNFFLIAVRLASLNQILDPWVYLLLRKILLRKFCQVANAVSSCSNDGQKGQPISLSNEIIQTEAIRYHTNNYASSSTSLPCQCSSTLMWSDHLER

SEQ ID NO: 59405 - protein, 429 aa, Homo sapiens
MKETRGYGGDAPFCTRLNHSYTGMWAPERSAEARGNLTRPPGSGEDCGSVSVAFPITMLLTGFVGNALAMLLVSRSYRRRESKRKKSFLLCIGWLALTDLVGQLLTTPVVIVVYLSKQRWEHIDPSGRLCTFFGLTMTVFGLSSLFIASAMAVERALAIRAPHWYASHMKTRATRAVLLGVWLAVLAFALLPVLGVGQYTVQWPGTWCFISTGRGGNGTSSSHNWGNLFFASAFAFLGLLALTVTFSCNLATIKALVSRCRAKATASQSSAQWGRITTETAIQLMGIMCVLSVCWSPLLIMMLKMIFNQTSVEHCKTHTEKQKECNFFLIAVRLASLNQILDPWVYLLLRKILLRKFCQMRKRRLREQFWRPASSGSGCQQIRCLMESCSLTQTGVQWSDFRSLQPSPPPLTAIFASWVQVILLPQPPK

SEQ ID NO: 59406 - protein, 418 aa, Homo sapiens
MKETRGYGGDAPFCTRLNHSYTGMWAPERSAEARGNLTRPPGSGEDCGSVSVAFPITMLLTGFVGNALAMLLVSRSYRRRESKRKKSFLLCIGWLALTDLVGQLLTTPVVIVVYLSKQRWEHIDPSGRLCTFFGLTMTVFGLSSLFIASAMAVERALAIRAPHWYASHMKTRATRAVLLGVWLAVLAFALLPVLGVGQYTVQWPGTWCFISTGRGGNGTSSSHNWGNLFFASAFAFLGLLALTVTFSCNLATIKALVSRCRAKATASQSSAQWGRITTETAIQLMGIMCVLSVCWSPLLIMMLKMIFNQTSVEHCKTHTEKQKECNFFLIAVRLASLNQILDPWVYLLLRKILLRKFCQMRKRRLREQLICSLQNSQIQRATAHCGQVQTYRVLNREEMEVLVSSINVYTRISTVKTE

SEQ ID NO: 59407 - protein, 402 aa, Homo sapiens
MKETRGYGGDAPFCTRLNHSYTGMWAPERSAEARGNLTRPPGSGEDCGSVSVAFPITMLLTGFVGNALAMLLVSRSYRRRESKRKKSFLLCIGWLALTDLVGQLLTTPVVIVVYLSKQRWEHIDPSGRLCTFFGLTMTVFGLSSLFIASAMAVERALAIRAPHWYASHMKTRATRAVLLGVWLAVLAFALLPVLGVGQYTVQWPGTWCFISTGRGGNGTSSSHNWGNLFFASAFAFLGLLALTVTFSCNLATIKALVSRCRAKATASQSSAQWGRITTETAIQLMGIMCVLSVCWSPLLIMMLKMIFNQTSVEHCKTHTEKQKECNFFLIAVRLASLNQILDPWVYLLLRKILLRKFCQMRKRRLREQEMGPDGRCFCHAWRQVPRTWCSSHDREPCSVQLS

SEQ ID NO: 59408 - protein, 388 aa, Homo sapiens
MKETRGYGGDAPFCTRLNHSYTGMWAPERSAEARGNLTRPPGSGEDCGSVSVAFPITMLLTGFVGNALAMLLVSRSYRRRESKRKKSFLLCIGWLALTDLVGQLLTTPVVIVVYLSKQRWEHIDPSGRLCTFFGLTMTVFGLSSLFIASAMAVERALAIRAPHWYASHMKTRATRAVLLGVWLAVLAFALLPVLGVGQYTVQWPGTWCFISTGRGGNGTSSSHNWGNLFFASAFAFLGLLALTVTFSCNLATIKALVSRCRAKATASQSSAQWGRITTETAIQLMGIMCVLSVCWSPLLIMMLKMIFNQTSVEHCKTHTEKQKECNFFLIAVRLASLNQILDPWVYLLLRKILLRKFCQVANAVSSCSNDGQKGQPISLSNEIIQTEA

SEQ ID NO: 59409 - protein, 390 aa, Homo sapiens; identical to SEQ ID NO: 59403

SEQ ID NO: 59410 - protein, 365 aa, Homo sapiens
MKETRGYGGDAPFCTRLNHSYTGMWAPERSAEARGNLTRPPGSGEDCGSVSVAFPITMLLTGFVGNALAMLLVSRSYRRRESKRKKSFLLCIGWLALTDLVGQLLTTPVVIVVYLSKQRWEHIDPSGRLCTFFGLTMTVFGLSSLFIASAMAVERALAIRAPHWYASHMKTRATRAVLLGVWLAVLAFALLPVLGVGQYTVQWPGTWCFISTGRGGNGTSSSHNWGNLFFASAFAFLGLLALTVTFSCNLATIKALVSRCRAKATASQSSAQWGRITTETAIQLMGIMCVLSVCWSPLLIMMLKMIFNQTSVEHCKTHTEKQKECNFFLIAVRLASLNQILDPWVYLLLRKILLRKFCQEEFWGN

SEQ ID NO: 59411 - protein, 454 aa, Homo sapiens
MKETRGYGGDAPFCTRLNHSYTGMWAPERSAEARGNLTRPPGSGEDCGSVSVAFPITMLLTGFVGNALAMLLVSRSYRRRESKRKKSFLLCIGWLALTDLVGQLLTTPVVIVVYLSKQRWEHIDPSGRLCTFFGLTMTVFGLSSLFIASAMAVERALAIRAPHWYASHMKTRATRAVLLGVWLAVLAFALLPVLGVGQYTVQWPGTWCFISTGRGGNGTSSSHNWGNLFFASAFAFLGLLALTVTFSCNLATIKALVSRCRAKATASQSSAQWGRITTETAIQLMGIMCVLSVCWSPLLIMMLKMIFNQTSVEHCKTHTEKQKECNFFLIAVRLASLNQILDPWVYLLLRKILLRKFCQVANAVSSCSNDGQKGQPISLSNEIIQTEAMRKRRLREQAPLLPTSTVIDPSRFCAQPFRWFLDLSFPAMSSSHPQLPLTLASFKLLREPCSVQLS

SEQ ID NO: 59412 - protein, 390 aa, Homo sapiens; identical to SEQ ID NO: 59403

SEQ ID NO: 59413 - protein, 374 aa, Homo sapiens
MKETRGYGGDAPFCTRLNHSYTGMWAPERSAEARGNLTRPPGSGEDCGSVSVAFPITMLLTGFVGNALAMLLVSRSYRRRESKRKKSFLLCIGWLALTDLVGQLLTTPVVIVVYLSKQRWEHIDPSGRLCTFFGLTMTVFGLSSLFIASAMAVERALAIRAPHWYASHMKTRATRAVLLGVWLAVLAFALLPVLGVGQYTVQWPGTWCFISTGRGGNGTSSSHNWGNLFFASAFAFLGLLALTVTFSCNLATIKALVSRCRAKATASQSSAQWGRITTETAIQLMGIMCVLSVCWSPLLIMMLKMIFNQTSVEHCKTHTEKQKECNFFLIAVRLASLNQILDPWVYLLLRKILLRKFCQMRKRRLREQEEFWGN

SEQ ID NO: 59414 - protein, 488 aa, Homo sapiens
MSTPGVNSSASLSPDRLNSPVTIPAVMFIFGVVGNLVAIVVLCKSRKEQKETTFYTLVCGLAVTDLLGTLLVSPVTIATYMKGQWPGGQPLCEYSTFILLFFSLSGLSIICAMSVERYLAINHAYFYSHYVDKRLAGLTLFAVYASNVLFCALPNMGLGSSRLQYPDTWCFIDWTTNVTAHAAYSYMYAGFSSFLILATVLCNVLVCGALLRMHRQFMRRTSLGTEQHHAAAAASVASRGHPAASPALPRLSDFRRRRSFRRIAGAEIQMVILLIATSLVVLICSIPLVVRVFVNQLYQPSLEREVSKNPDLQAIRIASVNPILDPWIYILLRKTVLSKAIEKIKCLFCRIGGSRRERSGQHCSDSQRTSSAMSGHSRSFISRELKEISSTSQTLLPDLSLPDLSENGLGGRNLLPGVPGMGLAQEDTTSLRTLRISETSDSSQGQDSESVLLVDEAGGSGRAGPAPKGSSLQVTFPSETLNLSEKCI

SEQ ID NO: 59415 - protein, 152 aa, Homo sapiens
MPAHSLVMSSPALPAFLLCSTLLVIKMYVVAIITGQVRLRKKAFANPEDALRHGGPQYCRSDPDVERCLRAHRNDMETIYPFLFLGFVYSFLGPNPFVAWMHFLVFLVGRVAHTVAYLGKLRAPIRSVTYTLAQLPCASMALQILWEAARHL

SEQ ID NO: 59416 - protein, 186 aa, Homo sapiens
MKAVNEQGKEVTEFGNKYWLMLNEKEAQQVYGGKEARTEEMKWRQWADDWLVHLISPNVYRTPTEALASFDYIVREGKFGAVEGAVAKYMGAAAMYLISKRLKSRHRLQDNVREDLYEAADKWVAAVGKDRPFMGGQKPNLADLAVYGVLRVMEGLDAFDDLMQHTHIQPWYLRVERAITEASPAH

SEQ ID NO: 59417 - protein, 377 aa, Homo sapiens
MDPAARVVRALWPGGCALAWRLGGRPQPLLPTQSRAGFAGAAGGPSPVAAARKGSPRLLGAAALALGGALGLYHTARWHLRAQDLHAERSAAQLSLSSRLQLTLYQYKTCPFCSKVRAFLDFHALPYQVVEVNPVRRAEIKFSSYRKVPILVAQEGESSQQLNDSSVIISALKTYLVSGQPLEEIITYYPAMKAVNEQGKEVTEFGNKYWLMLNEKEAQQVYGGKEARTEEMKWRQWADDWLVHLISPNVYRTPTEALASFDYIVREGKFGAVEGAVAKYMGAAAMYLISKRLKSRHRLQDNVREDLYEAADKWVAAVGKDRPFMGGQKPNLADLAVYGVLRVMEGLDAFDDLMQHTHIQPWYLRVERAITEASPAH

SEQ ID NO: 59418 - protein, 297 aa, Homo sapiens
MSMNNSKQLVSPAAALLSNTTCQTENRLSVFFSVIFMTVGILSNSLAIAILMKAYQRFRQKSKASFLLLASGLVITDFFGHLINGAIAVFVYASDKEWIRFDQSNVLCSIFGICMVFSGLCPLLLGSVMAIERCIGVTKPIFHSTKITSKHVKMMLSGVCLFAVFIALLPILGHRDYKIQASRTWCFYNTEDIKDWEDRFYLLLFSFLGLLALGVSLLCNAITGITLLRVKFKSQQHRQGRSHHLEMVIQLLAIMCVSCICWSPFLGYRIILNGKEKYKVYEEQSDFLHRLQWPTLE

SEQ ID NO: 59419 - protein, 359 aa, Homo sapiens
MSMNNSKQLVSPAAALLSNTTCQTENRLSVFFSVIFMTVGILSNSLAIAILMKAYQRFRQKSKASFLLLASGLVITDFFGHLINGAIAVFVYASDKEWIRFDQSNVLCSIFGICMVFSGLCPLLLGSVMAIERCIGVTKPIFHSTKITSKHVKMMLSGVCLFAVFIALLPILGHRDYKIQASRTWCFYNTEDIKDWEDRFYLLLFSFLGLLALGVSLLCNAITGITLLRVKFKSQQHRQGRSHHLEMVIQLLAIMCVSCICWSPFLVTMANIGINGNHSLETCETTLFALRMATWNQILDPWVYILLRKAVLKNLYKLASQCCGVHVISLHIWELSSIKNSLKVAAISESPVAEKSAST

SEQ ID NO: 59420 - protein, 359 aa, Homo sapiens; identical to SEQ ID NO: 59419

SEQ ID NO: 59421 - protein, 879 aa, Homo sapiens
MGRLASRPLLLALLSLALCRGRVVRVPTATLVRVVGTELVIPCNVSDYDGPSEQNFDWSFSSLGSSFVELASTWEVGFPAQLYQERLQRGEILLRRTANDAVELHIKNVQPSDQGHYKCSTPSTDATVQGNYEDTVQVKVLADSLHVGPSARPPPSLSLREGEPFELRCTAASASPLHTHLALLWEVHRGPARRSVLALTHEGRFHPGLGYEQRYHSGDVRLDTVGSDAYRLSVSRALSADQGSYRCIVSEWIAEQGNWQEIQEKAVEVATVVIQPSVLRAAVPKNVSVAEGKELDLTCNITTDRADDVRPEVTWSFSRMPDSTLPGSRVLARLDRDSLVHSSPHVALSHVDARSYHLLVRDVSKENSGYYYCHVSLWAPGHNRSWHKVAEAVSSPAGVGVTWLEPDYQVYLNASKVPGFADDPTELACRVVDTKSGEANVRFTVSWYYRMNRRSDNVVTSELLAVMDGDWTLKYGERSKQRAQDGDFIFSKEHTDTFNFRIQRTTEEDRGNYYCVVSAWTKQRNNSWVKSKDVFSKPVNIFWALEDSVLVVKARQPKPFFAAGNTFEMTCKVSSKNIKSPRYSVLIMAEKPVGDLSSPNETKYIISLDQDSVVKLENWTDASRVDGVVLEKVQEDEFRYRMYQTQVSDAGLYRCMVTAWSPVRGSLWREAATSLSNPIEIDFQTSGPIFNASVHSDTPSVIRGDLIKLFCIITVEGAALDPDDMAFDVSWFAVHSFGLDKAPVLLSSLDRKGIVTTSRRDWKSDLSLERVSVLEFLLQVHGSEDQDFGNYYCSVTPWVKSPTGSWQKEAEIHSKPVFITVKMDVLNAFKYPLLIGVGLSTVIGLLSCLIGYCSSHWCCKKEVQETRRERRRLMSMEMD

SEQ ID NO: 59422 - protein, 738 aa, Homo sapiens
SGAAGAGRGGGGEAAGKEEEGEPFELRCTAASASPLHTHLALLWEVHRGPARRSVLALTHEGRFHPGLGYEQRYHSGDVRLDTVGSDAYRLSVSRALSADQGSYRCIVSEWIAEQGNWQEIQEKAVEVATVVIQPSVLRAAVPKNVSVAEGKELDLTCNITTDRADDVRPEVTWSFSRMPDSTLPGSRVLARLDRDSLVHSSPHVALSHVDARSYHLLVRDVSKENSGYYYCHVSLWAPGHNRSWHKVAEAVSSPAGVGVTWLEPDYQVYLNASKVPGFADDPTELACRVVDTKSGEANVRFTVSWYYRMNRRSDNVVTSELLAVMDGDWTLKYGERSKQRAQDGDFIFSKEHTDTFNFRIQRTTEEDRGNYYCVVSAWTKQRNNSWVKSKDVFSKPVNIFWALEDSVLVVKARQPKPFFAAGNTFEMTCKVSSKNIKSPRYSVLIMAEKPVGDLSSPNETKYIISLDQDSVVKLENWTDASRVDGVVLEKVQEDEFRYRMYQTQVSDAGLYRCMVTAWSPVRGSLWREAATSLSNPIEIDFQTSGPIFNASVHSDTPSVIRGDLIKLFCIITVEGAALDPDDMAFDVSWFAVHSFGLDKAPVLLSSLDRKGIVTTSRRDWKSDLSLERVSVLEFLLQVHGSEDQDFGNYYCSVTPWVKSPTGSWQKEAEIHSKPVFITVKMDVLNAFKYPLLIGVGLSTVIGLLSCLIGYCSSHWCCKKEVQETRRERRRLMSMEMD

SEQ ID NO: 59423 - protein, 386 aa, Homo sapiens [sequence omitted]

SEQ ID NO: 59424 - protein, 500 aa, Homo sapiens
MAWAALLGLLAALLLLLLLSRRRTRRPGEPPLDLGSIPWLGYALDFGKDAASFLTRMKEKHGDIFTILVGGRYVTVLLDPHSYDAVVWEPRTRLDFHAYAIFLMERIFDVQLPHYSPSDEKARMKLTLLHRELQALTEAMYTNLHAVLLGDATEAGSGWHEMGLLDFSYSFLLRAGYLTLYGIEALPRTHESQAQDRVHSADVFHTFRQLDRLLPKLARGSLSVGDKDHMCSVKSRLWKLLSPARLARRAHRSKWLESYLLHLEEMGVSEEMQARALVLQLWATQGNMGPAAFWLLLFLLKNPEALAAVRGELESILWQAEQPVSQTTTLPQKVLDSTPVLDSVLSESLRLTAAPFITREVVVDLAMPMADGREFNLRRGDRLLLFPFLSPQRDPEIYTDPEVFKYNRFLNPDGSEKKDFYKDGKRLKNYNMPWGAGHNHCLGRSYAVNSIKQFVFLVLVHLDLELINADVEIPEFDLSRYGFGLMQPEHDVPVRYRIRP

SEQ ID NO: 59425 - protein, 135 aa, Homo sapiens
MRAFLRNQKYEDMHNIIHILQIRKLRHRLSNFPRLPGILAPETVLLPFCYKVFRKKEKVKRSQKATEFIDYSIEQSHHAILTPLQTHLTMKGSSMKCSSLSSEAILFTLTLQLTQTLGLECCLLYLSKTIHPQII

SEQ ID NO: 59426 - protein, 114 aa, Homo sapiens
MAGLALQPGTALLCYSCKAQVSNEDCLQVENCTQLGEQCWTARIRAVGLLTVISKGCSLNCVDDSQDYYVGKKNITCCDTDLCNASGAHALQPAAAILALLPALGLLLWGPGQL

SEQ ID NO: 59427 - protein, 237 aa, Homo sapiens
MMVMVVVITCLLSHYKLSARSFISRHSQGRRREDALSSEGCLWPSESTVSGNGIPEPQVYAPPRPTDRLAVPPFAQRERFHRFQPTYPYLQHEIDLPPTISLSDGEEPPPYQGPCTLQLRDPEQQLELNRESVRAPPNRTIFDSDLMDSARLGGPCPPSSNSGISATCYGSGGRMEGPPPTYSEVIGHYPGSSFQHQQSSGPPSLLEGTRLHHTHIAPLESAAIWSKEKDKQKGHPL

SEQ ID NO: 59428 - protein, 287 aa, Homo sapiens
MHRLMGVNSTAAAAAGQPNVSCTCNCKRSLFQSMEITELEFVQIIIIVVVMMVMVVVITCLLSHYKLSARSFISRHSQGRRREDALSSEGCLWPSESTVSGNGIPEPQVYAPPRPTDRLAVPPFAQRERFHRFQPTYPYLQHEIDLPPTISLSDGEEPPPYQGPCTLQLRDPEQQLELNRESVRAPPNRTIFDSDLMDSARLGGPCPPSSNSGISATCYGSGGRMEGPPPTYSEVIGHYPGSSFQHQQSSGPPSLLEGTRLHHTHIAPLESAAIWSKEKDKQKGHPL

SEQ ID NO: 59429 - protein, 252 aa, Homo sapiens
MAELEFVQIIIIVVVMMVMVVVITCLLSHYKLSARSFISRHSQGRRREDALSSEGCLWPSESTVSGNGIPEPQVYAPPRPTDRLAVPPFAQRERFHRFQPTYPYLQHEIDLPPTISLSDGEEPPPYQGPCTLQLRDPEQQLELNRESVRAPPNRTIFDSDLMDSARLGGPCPPSSNSGISATCYGSGGRMEGPPPTYSEVIGHYPGSSFQHQQSSGPPSLLEGTRLHHTHIAPLESAAIWSKEKDKQKGHPL

SEQ ID NO: 59430 - protein, 237 aa, Homo sapiens; identical to SEQ ID NO: 59427

SEQ ID NO: 59431 - protein, 237 aa, Homo sapiens; identical to SEQ ID NO: 59427

SEQ ID NO: 59432 - protein, 227 aa, Homo sapiens
MHRLMGVNSTAAAAAGQPNVSCTCNCKRSLFQSMEISCHGFPVCKSHQHQEWKSLCWSLRSPGGASSITGFGSMKVTNPAMNLPECQWLRIQKAELEFVQIIIIVVVMMVMVVVITCLLSHYKLSARSFISRHSQGRRREDALSSEGCLWPSESTVSGNGIPEPQVYAPPRPTDRLAVPPFAQRERFHRFQPTYPYLQHEIDLPPTISLSDGEEPPPYQGPCTLQLR

SEQ ID NO: 59433 - protein, 208 aa, Homo sapiens
MPAIPAHGAELEFVQIIIIVVVMMVMVVVITCLLSHYKLSARSFISRHSQGRRREDALSSEGCLWPSESTVSGNGIPEPQVYAPPRPTDRLAVPPFAQRERFHRFQPTYPYLQHEIDLPPTISLSDGEEPPPYQGPCTLQLRDPEQQLELNRESVRAPPNRTIFDSDLMDSARLGGPCPPSSNSGISATCYGSGGRMEGPPPTYSEVI

SEQ ID NO: 59434 - protein, 51 aa, Homo sapiens
MARYRCCRSQSRSRYYRQRQRSRRRRRRSCQTRRRAMRCCRPRYRPRCRRH

SEQ ID NO: 59435 - protein, 102 aa, Homo sapiens
MVRYRVRSLSERSHEVYRQQLHGQEQGHHGQEEQGLSPEHVEVYERTHGQSHYRRRHCSRRRLHRIHRRQHRSCRRRKRRSCRHRRRHRRGCRTRKRTCRRH

SEQ ID NO: 59436 - protein, 140 aa, Homo sapiens
MVRYRVRSLSERSHEVYRQQLHGQEQGHHGQEEQGLSPEHVEVYERTHGQSHYRRRHCSRRRLHRIHRRQHRSCRRRKRRSCRHRRRHRRESLGDPLNQNFLSQKAAEPGREHAEGTKLPGPLTPSWKLRKSRPKHQVRP

SEQ ID NO: 59437 - protein, 218 aa, Homo sapiens
  VARIANT 1: note = MOD_RES - Any amino acid
XLALLLARAGLRKPESQEAAPLSGPCGRRVITSRIVGGEDAELGRWPWQGSLRLWDSHVCGVSLLSHRWALTAAHCFETDLSDPSGWMVQFGQLTSMPSFWSLQAYYTRYFVSNIYLSPRYLGNSPYDIALVKLSAPVTYTKHIQPICLQASTFEFENRTDCWVTGWGYIKEDEGSSGRHHKQLYVQPPLPQVQFPQGHLWRHGLCWQCPRREGCLLR

SEQ ID NO: 59438 - protein, 247 aa, Homo sapiens
MNPLLILTFVAAALAAPFDDDDKIVGGYNCEENSVPYQVSLNSGYHFCGGSLINEQWVVSAGHCYKSRIQVRLGEHNIEVLEGNEQFINAAKIIRHPQYDRKTLNNDIMLIKLSSRAVINARVSTISLPTAPPATGTKCLISGWGNTASSGADYPDELQCLDAPVLSQAKCEASYPGKITSNMFCVGFLEGGKDSCQGDSGGPVVCNGQLQGVVSWGDGCAQKNKPGVYTKVYNYVKWIKNTIAANS

SEQ ID NO: 59439 - protein, 237 aa, Homo sapiens
MNPLLILTFVAAALAAPFDDDDKIVGGYNCEENSVPYQVSLNSGYHFCGGSLINEQWVVSAGHCYKSRIQVRLGEHNINAAKIIRHPQYDRKTLNNDIMLIKLSSRAVINARVSTISLPTAPPATGTKCLISGWGNTASSGADYPDELQCLDAPVLSQAKCEASYPGKITSNMFCVGFLEGGKDSCQGDSGGPVVCNGQLQGVVSWGDGCAQKNKPGVYTKVYNYVKWIKNTIAANS

SEQ ID NO: 59440 - protein, 875 aa, Homo sapiens
MTLARFVLALMLGALPEVVGFDSVLNDSLHHSHRHSPPAGPHYPYYLPTQQRPPRTRPPPPLPRFPRPPRALPAQRPHALQAGHTPRPHPWGCPAGEPWVSVTDFGAPCLRWAEVPPFLERSPPASWAQLRGQRHNFCRSPDGAGRPWCFYGDARGKVDWGYCDCRHGSVRLRGGKNEFEGTVEVYASGVWGTVCSSHWDDSDASVICHQLQLGGKGIAKQTPFSGLGLIPIYWSNVRCRGDEENILLCEKDIWQGGVCPQKMAAAVTCSFSHGPTFPIIRLAGGSSVHEGRVELYHAGQWGTVCDDQWDDADAEVICRQLGLSGIAKAWHQAYFGEGSGPVMLDEVRCTGNELSIEQCPKSSWGEHNCGHKEDAGVSCTPLTDGVIRLAGGKGSHEGRLEVYYRGQWGTVCDDGWTELNTYVVCRQLGFKYGKQASANHFEESTGPIWLDDVSCSGKETRFLQCSRRQWGRHDCSHREDVSIACYPGGEGHRLSLGFPVRLMDGENKKEGRVEVFINGQWGTICDDGWTDKDAAVICRQLGYKGPARARTMAYFGEGKGPIHVDNVKCTGNERSLADCIKQDIGRHNCRHSEDAGVICDYFGKKASGNSNKESLSSVCGLRLLHRRQKRIIGGKNSLRGGWPWQVSLRLKSSHGDGRLLCGATLLSSCWVLTAAHCFKRYGNSTRSYAVRVGDYHTLVPEEFEEEIGVQQIVIHREYRPDRSDYDIALVRLQGPEEQCARFSSHVLPACLPLWRERPQKTASNCYITGWGDTGRAYSRTLQQAAIPLLPKRFCEERYKGRFTGRMLCAGNLHEHKRVDSCQGDSGGPLMCERPGESWVVYGVTSWGYGCGVKDSPGVYTKVSAFVPWIKSVTKL

SEQ ID NO: 59441 - protein, 514 aa, Homo sapiens
MAVWLAQWLGPLLLVSLWGLLAPASLLRRLGEHIQQFQESSAQGLGLSLGPGAAALPKVGWLEQLLDPFNVSDRRSFLQRYWVNDQHWVGQDGPIFLHLGGEGSLGPGSVMRGHPAALAPAWGALVISLEHRFYGLSIPAGGLEMAQLRFLSSRLALADVVSARLALSRLFNISSSSPWICFGGSYAGSLAAWARLKFPHLIFASVASSAPVRAVLDFSEYNDVVSRSLMSTAIGGSLECRAAVSVAFAEVERRLRSGGAAQAALRTELSACGPLGRAENQAELLGALQALVGGVVQYDGQTGAPLSVRQLCGLLLGGGGNRSHSTPYCGLRRAVQIVLHSLGQKCLSFSRAETVAQLRSTEPQLSGVGDRQWLYQTCTEFGFYVTCENPRCPFSQLPALPSQLDLCEQVFGLSALSVAQAVAQTNSYYGGQTPGANKVLFVNGDTDPWHVLSVTQALGSSESTLLIRTGSHCLDMAPERPSDSPSLRLGRQNIFQQLQTWLKLAKESQIKGEV

SEQ ID NO: 59442 - protein, 273 aa, Homo sapiens
MAVWLAQWLGPLLLVSLWGLLAPASLLRRLGEHIQQFQESSAQGLGLSLGPGAAALPKVGWLEQLLDPFNVSDRRSFLQRYWVNDQHWVGQDGPIFLHLGGEGSLGPGSVMRGHPAALAPAWGALVISLEHRFYGLSIPAGGLEMAQLRFLSSRLALADVVSARLALSRLFNISSSSPWICFGGSYAGSLAAWARLKFPHLIFASVASSAPVRAVLDFSEYNDIVLHSLGQKCLSFSRAETVAQLRSTEPQLSGVGDRQWLYQTCTEFGFYIT

SEQ ID NO: 59443 - protein, 166 aa, Homo sapiens
MAVWLAQWLGPLLLVSLWGLLAPASLLRRLGEHIQQFQESSAQGLGLSLGPGAAALPKVGWLEQLLDPFNVSDRRSFLQRYWVNDQHWVGQDGPIFLHLGGEGSLGPGSVMRGHPAALAPAWGALVISLEHRFYGLSIPAGGLEMAQLRFLSSRLALSCTAWARSV

SEQ ID NO: 59444 - protein, 165 aa, Homo sapiens
  VARIANT 1: note = MOD_RES - Any amino acid
XVMRGHPAALAPAWGALVISLEHRFYGLSIPAGGLEMAQLRFLSSRLALADVVSARLALSRLFNISSSSPWICFGGSYAGSLAAWARLKFPHLIFASVASSAPVRAVLDFSEYNDIVLHSLGQKCLSFSRAETVAQLRSTEPQLSGVGDRQWLYQTCTEFGFYVT

SEQ ID NO: 59445 - protein, 314 aa, Homo sapiens
MGARGALLLALLLARAGLRKPESQEAAPLSGPCGRRVITSRIVGGEDAELGRWPWQGSLRLWDSHVCGVSLLSHRWALTAAHCFETYSDLSDPSGWMVQFGQLTSMPSFWSLQAYYTRYFVSNIYLSPRYLGNSPYDIALVKLSAPVTYTKHIQPICLQASTFEFENRTDCWVTGWGYIKEDEALPSPHTLQEVQVAIINNSMCNHLFLKYSFRKDIFGDMVCAGNAQGGKDACFGDSGGPLACNKNGLWYQIGVVSWGVGCGRPNRPGVYTNISHHFEWIQKLMAQSGMSQPDPSWPLLFFPLLWALPLLGPV

SEQ ID NO: 59446 - protein, 300 aa, Homo sapiens
MGARGALLLALLLARAGLRKPESQEAAPLSGPCGRRVITSRIVGGEDAELGRWPWQGSLRLWDSHVCGVSLLSHRWALTAAHCFETYSDLSDPSGWMVQFGQLTSMPSFWSLQAYYTRYFVSNIYLSPRYLGNSPYDIALVKLSAPVTYTKHIQPICLQASTFEFENRTDCWVTGWGYIKEDEALPSPHTLQEVQVAIINNSMCNHLFLKYSFRKDIFGDMGDSGGPLACNKNGLWYQIGVVSWGVGCGRPNRPGVYTNISHHFEWIQKLMAQSGMSQPDPSWPLLFFPLLWALPLLGPV

SEQ ID NO: 59447 - protein, 312 aa, Homo sapiens
MGARGALLLALLLARAGLRKPESQEAAPLSGPCGRRVITSRIVGGEDAELGRWPWQGSLRLWDSHVCGVSLLSHRWALTAAHCFETDLSDPSGWMVQFGQLTSMPSFWSLQAYYTRYFVSNIYLSPRYLGNSPYDIALVKLSAPVTYTKHIQPICLQASTFEFENRTDCWVTGWGYIKEDEALPSPHTLQEVQVAIINNSMCNHLFLKYSFRKDIFGDMVCAGNAQGGKDACFGDSGGPLACNKNGLWYQIGVVSWGVGCGRPNRPGVYTNISHHFEWIQKLMAQSGMSQPDPSWPLLFFPLLWALPLLGPV

SEQ ID NO: 59448 - protein, 317 aa, Homo sapiens
MVVSGAPPALGGGCLGTFTSLLLLASTAILNAARIPVPPACGKPQQLNRVVGGEDSTDSEWPWIVSIQKNGTHHCAGSLLTSRWVITAAHCFKDNLNKPYLFSVLLGAWQLGNPGSRSQKVGVAWVEPHPVYSWKEGACADIALVRLERSIQFSERVLPICLPDASIHLPPNTHCWISGWGSIQDGVPLPHPQTLQKLKVPIIDSEVCSHLYWRGAGQGPITEDMLCAGYLEGERDACLGDSGGPLMCQVDGAWLLAGIISWGEGCAERNRPGVYISLSAHRSWVEKIVQGVQLRGRAQGGGALRAPSQGSGAAARS

SEQ ID NO: 59449 - protein, 261 aa, Homo sapiens
MHMRETSGFTLKKGRSAPLVFHPPDALIAVPFDDDDKIVGGYTCEENSLPYQVSLNSGSHFCGGSLISEQWVVSAAHCYKTRIQVRLGEHNIKVLEGNEQFINAAKIIRHPKYNRDTLDNDIMLIKLSSPAVINARVSTISLPTTPPAAGTECLISGWGNTLSFGADYPDELKCLDAPVLTQAECKASYPGKITNSMFCVGFLEGGKDSCQRDSGGPVVCNGQLQGVVSWGHGCAWKNRPGVYTKVYNYVDWIKDTIAANS

SEQ ID NO: 59450 - protein, 304 aa, Homo sapiens
MCGPDDRCPARWPGPGRAVKCGKGLAAARPGRVERGGAQRGGAGLELHPLLGGRTWRAARDADGCEALGTVAVPFDDDDKIVGGYTCEENSLPYQVSLNSGSHFCGGSLISEQWVVSAAHCYKTRIQVRLGEHNIKVLEGNEQFINAAKIIRHPKYNRDTLDNDIMLIKLSSPAVINARVSTISLPTTPPAAGTECLISGWGNTLSFGADYPDELKCLDAPVLTQAECKASYPGKITNSMFCVGFLEGGKDSCQRDSGGPVVCNGQLQGVVSWGHGCAWKNRPGVYTKVYNYVDWIKDTIAANS

SEQ ID NO: 59451 - protein, 247 aa, Homo sapiens
MNPFLILAFVGAAVAVPFDDDDKIVGGYTCEENSLPYQVSLNSGSHFCGGSLISEQWVVSAAHCYKTRIQVRLGEHNIKVLEGNEQFINAAKIIRHPKYNRDTLDNDIMLIKLSSPAVINARVSTISLPTTPPAAGTECLISGWGNTLSFGADYPDELKCLDAPVLTQAECKASYPGKITNSMFCVGFLEGGKDSCQRDSGGPVVCNGQLQGVVSWGHGCAWKNRPGVYTKVYNYVDWIKDTIAANS

SEQ ID NO: 59452 - protein, 240 aa, Homo sapiens
MGPAGEVAVPFDDDDKIVGGYTCEENSLPYQVSLNSGSHFCGGSLISEQWVVSAAHCYKTRIQVRLGEHNIKVLEGNEQFINAAKIIRHPKYNRDTLDNDIMLIKLSSPAVINARVSTISLPTTPPAAGTECLISGWGNTLSFGADYPDELKCLDAPVLTQAECKASYPGKITNSMFCVGFLEGGKDSCQRDSGGPVVCNGQLQGVVSWGHGCAWKNRPGVYTKVYNYVDWIKDTIAANS

SEQ ID NO: 59453 - protein, 178 aa, Homo sapiens
MRETSGFTLKKGRSAPLVFHPPDALIAVPFDDDDKIVGGYTCEENSLPYQVSLNSGSHFCGGSLISEQWVVSAAHCYKTRIQVRLGEHNIKVLEGNEQFINAAKIIRHPKYNRDTLDNDIMLIKLSSPAVINARVSTISLPTTPPAAGTECLISGWGNTLSFGADYPDELKCLDAPVL

SEQ ID NO: 59454 - protein, 280 aa, Homo sapiens
MRGVSCLQVLLLLVLGAAGTQGRKSAACGQPRMSSRIVGGRDGRDGEWPWQASIQHRGAHVCGGSLIAPQWVLTAAHCFPRRALPAEYRVRLGALRLGSTSPRTLSVPVRRVLLPPDYSEDGARGDLALLQLRRPVPLSARVQPVCLPVPGARPPPGTPCRVTGWGSLRPGVPLPEWRPLQGVRVPLLDSRTCDGLYHVGADVPQAERIVLPGSLCAGYPQGHKDACQGDSGGPLTCLQSGSWVLVGVVSWGKGCALPNRPGVYTSVATYSPWIQARVSF

SEQ ID NO: 59455 - protein, 343 aa, Homo sapiens
MAQKGVLGPGQLGAVAILLYLGLLRSGTGAEGAEAPCGVAPQARITGGSSAVAGQWPWQVSITYEGVHVCGGSLVSEQWVLSAAHCFPSEHHKEAYEVKLGAHQLDSYSEDAKVSTLKDIIPHPSYLQEGSQGDIALLQLSRPITFSRYIRPICLPAANASFPNGLHCTVTGWGHVAPSVSLLTPKPLQQLEVPLISRETCNCLYNIDAKPEEPHFVQEDMVCAGYVEGGKDACQGDSGGPLSCPVEGLWYLTGIVSWGDACGARNRPGVYTLASSYASWIQSKVTELQPRVVPQTQESQPDSNLCGSHLAFSSAPAQGLLRPILFLPLGLALGLLSPWLSEH

SEQ ID NO: 59456 - protein, 167 aa, Homo sapiens
MAQKGVLGPGQLGAVAILLYLGLLRSGTGKEGAAAPCGVAPQARITGGSSAVAGQWPWQVSITFSRYIRPICLPAANASFPNGLHCTVTGWGHVAPSVSLLTPKPLQQLEVPLISRETCNCLYNIDAKPEEPHFVQEDMVCAGYVEGALLRVTLGAHSPALWRVSGT

SEQ ID NO: 59457 - protein, 398 aa, Homo sapiens
MELEEGKAGSGLRQYYLSKIEELQLIVNDKSQNLRRLQAQRNELNAKVRLLREELQLLQEQGSYVGEVVRAMDKKKVLVKVHPEGKFVVDVDKNIDINDVTPNCRVALRNDSYTLHKILPNKVDPLVSLMMVEKVPDSTYEMIGGLDKQIKEIKEVIELPVKHPELFEALGIAQPKGVLLYGPPGTGKTLLARAVAHHTDCTFIRVSGSELVQKFIGEGARMVRELFVMAREHAPSIIFMDEIDSIGSSRLEGGSGGDSEVQRTMLELLNQLDGFEATKNIKVIMATNRIDILDSALLRPGRIDRKIEFPPPNEEARLDILKIHSRKMNLTRGINLRKIAELMPGASGAEVKGVCTEAGMYALRERRVHVTQEDFEMAVAKVMQKDSEKNMSIKKLWK

SEQ ID NO: 59458 - protein, 254 aa, Homo sapiens
MASLLKVDQEVKLKVDSFRERITSEAEDLVANFFPKKLLELDSFLKEPILNIHDLTQIHSDMNLPVPDPILLTNSHDGLDGPTYKKRRLDECEEAFQGTKVFVMPNGMLKSNQQLVDIIEKVKPEIRLLIEKCNTVKMWVQLLIPRIEDGNNFGVSIQEETVAELRTVESEAASYLDQISRYYITRAKLVSKIAKYPHVEDYRRTVTEIDEKEYISLRLIISELRNQYVTLHDMILKNIEKIKRPRSSNAETLY

SEQ ID NO: 59459 - protein, 440 aa, Homo sapiens
MGQSQSGGHGPGGGKKDDKDKKKKYEPPVPTRVGKKKKKTKGPDAASKLPLVTPHTQCRLKLLKLERIKDYLLMEEEFIRNQEQMKPLEEKQEEERSKVDDLRGTPMSVGTLEEIIDDNHAIVSTSVGSEHYVSILSFVDKDLLEPGCSVLLNHKVHAVIGVLMDDTDPLVTVMKVEKAPQETYADIGGLDNQIQEIKESVELPLTHPEYYEEMGIKPPKGVILYGPPGTGKTLLAKAVANQTSATFLRVVGSELIQKYLGDGPKLVRELFRVAEEHAPSIVFIDEIDAIGTKRYDSNSGGEREIQRTMLELLNQLDGFDSRGDVKVIMATNRIETLDPALIRPGRIDRKIEFPLPDEKTKKRIFQIHTSRMTLADDVTLDDLIMAKDDLSGADIKAICTEAGLMALRERRMKVTNEDFKKSKENVLYKKQEGTPEGLYL

SEQ ID NO: 59460 - protein, 367 aa, Homo sapiens
MEEEFIRNQEQMKPLEEKQEEERSKVDDLRGTPMSVGTLEEIIDDNHAIVSTSVGSEHYVSILSFVDKDLLEPGCSVLLNHKVHAVIGVLMDDTDPLVTVMKVEKAPQETYADIGGLDNQIQEIKESVELPLTHPEYYEEMGIKPPKGVILYGPPGTGKTLLAKAVANQTSATFLRVVGSELIQKYLGDGPKLVRELFRVAEEHAPSIVFIDEIDAIGTKRYDSNSGGEREIQRTMLELLNQLDGFDSRGDVKVIMATNRIETLDPALIRPGRIDRKIEFPLPDEKTKKRIFQIHTSRMTLADDVTLDDLIMAKDDLSGADIKAICTEAGLMALRERRMKVTNEDFKKSKENVLYKKQEGTPEGLYL

SEQ ID NO: 59461 - protein, 433 aa, Homo sapiens
MPDYLGADQRKTKEDEKDDKPIRALDEGDIALLKTYGQSTYSRQIKQVEDDIQQLLKKINELTGIKESDTGLAPPALWDLAADKQTLQSEQPLQVARCTKIINADSEDPKYIINVKQFAKFVVDLSDQVAPTDIEEGMRVGVDRNKYQIHIPLPPKIDPTVTMMQVEEKPDVTYSDVGGCKEQIEKLREVVETPLLHPERFVNLGIEPPKGVLLFGPPGTGKTLCARAVANRTDACFIRVIGSELVQKYVGEGARMVRELFEMARTKKACLIFFDEIDAIGGARFDDGAGGDNEVQRTMLELINQLDGFDPRGNIKVLMATNRPDTLDPALMRPGRLDRKIEFSLPDLEGRTHIFKIHARSMSVERDIRFELLARLCPNSTGAEIRSVCTEAGMFAIRARRKIATEKDFLEAVNKVIKSYAKFSATPRYMTYN

SEQ ID NO: 59462 - protein, 130 aa, Homo sapiens
MPDYLGADQRKTKEDEKDDKPIRALDEGDIALLKTYGQSTYSRQIKQVEDDIQQLLKKINELTGIKESDTGLAPPALWDLAADKQTLQSEQPLQVARCTKIINADSEDPKYIINVKQFAKFVVDLSDQVA

SEQ ID NO: 59463 - protein, 433 aa, Homo sapiens; identical to SEQ ID NO: 59461

SEQ ID NO: 59464 - protein, 130 aa, Homo sapiens; identical to SEQ ID NO: 59462

SEQ ID NO: 59465 - protein, 296 aa, Homo sapiens
MRVGVDRNKYQIHIPLPPKIDPTVTMMQVEEKPDVTYSDVGGCKEQIEKLREVVETPLLHPERFVNLGIEPPKGVLLFGPPGTGKTLCARAVANRTDACFIRVIGSELVQKYVGEGARMVRELFEMARTKKACLIFFDEIDAIGGARFDDGAGGDNEVQRTMLELINQLDGFDPRGNIKVLMATNRPDTLDPALMRPGRLDRKIEFSLPDLEGRTHIFKIHARSMSVERDIRFELLARLCPNSTGAEIRSVCTEAGMFAIRARRKIATEKDFLEAVNKVIKSYAKFSATPRYMTYN

SEQ ID NO: 59466 - protein, 439 aa, Homo sapiens
MNLLPNIESPVTRQEKMATVWDEAEQDGIGEEVLKMSTEEIIQRTRLLDSEIKIMKSEVLRVTHELQAMKDKIKENSEKIKVNKTLPYLVSNVIELLDVDPNDQEEDGANIDLDSQRKGKCAVIKTSTRQTYFLPVIGLVDAEKLKPGDLVGVNKDSYLILETLPTEYDSRVKAMEVDERPTEQYSDIGGLDKQIQELVEAIVLPMNHKEKFENLGIQPPKGVLMYGPPGTGKTLLARACAAQTKATFLKLAGPQLVQMFIGDGAKLVRDAFALAKEKAPSIIFIDELDAIGTKRFDSEKAGDREVQRTMLELLNQLDGFQPNTQVKVIAATNRVDILDPALLRSGRLDRKIEFPMPNEEARARIMQIHSRKMNVSPDVNYEELARCTDDFNGAQCKAVCVEAGMIALRRGATELTHEDYMEGILEVQAKKKANLQYYA

SEQ ID NO: 59467 - protein, 418 aa, Homo sapiens
MEEIGILVEKAQDEIPALSVSRPQTGLSFLGPEPEDLEDLYSRYKKLQQELEFLEVQEEYIKDEQKNLKKEFLHAQEEVKRIQSIPLVIGQFLEAVDQNTAIVGSTTGSNYYVRILSTIDRELLKPNASVALHKHSNALVDVLPPEADSSIMMLTSDQKPDVMYADIGGMDIQKQEVREAVELPLTHFELYKQIGIDPPRGVLMYGPPGCGKTMLAKAVAHHTTAAFIRVVGSEFVQKYLGEGPRMVRDVFRLAKENAPAIIFIDEIDAIATKRFDAQTGADREVQRILLELLNQMDGFDQNVNVKVIMATNRADTLDPALLRPGRLDRKIEFPLPDRRQKRLIFSTITSKMNLSEEVDLEDYVARPDKISGADINSICQESGMLAVRENRYIVLAKDFEKAYKTVIKKDEQEHEFYK

SEQ ID NO: 59468 - protein, 387 aa, Homo sapiens
MEEIGILVEKAQDEIPALSVSRPQTGLSFLGPEPEDLEDLYSRYKEEVKRIQSIPLVIGQFLEAVDQNTAIVGSTTGSNYYVRILSTIDRELLKPNASVALHKHSNALVDVLPPEADSSIMMLTSDQKPDVMYADIGGMDIQKQEVREAVELPLTHFELYKQIGIDPPRGVLMYGPPGCGKTMLAKAVAHHTTAAFIRVVGSEFVQKYLGEGPRMVRDVFRLAKENAPAIIFIDEIDAIATKRFDAQTGADREVQRILLELLNQMDGFDQNVNVKVIMATNRADTLDPALLRPGRLDRKIEFPLPDRRQKRLIFSTITSKMNLSEEVDLEDYVARPDKISGADINSICQESGMLAVRENRYIVLAKDFEKAYKTVIKKDEQEHEFYK

SEQ ID NO: 59469 - protein, 406 aa, Homo sapiens
MALDGPEQMELEEGKAGSGLRQYYLSKIEELQLIVNDKSQNLRRLQAQRNELNAKVRLLREELQLLQEQGSYVGEVVRAMDKKKVLVKVHPEGKFVVDVDKNIDINDVTPNCRVALRNDSYTLHKILPNKVDPLVSLMMVEKVPDSTYEMIGGLDKQIKEIKEVIELPVKHPELFEALGIAQPKGVLLYGPPGTGKTLLARAVAHHTDCTFIRVSGSELVQKFIGEGARMVRELFVMAREHAPSIIFMDEIDSIGSSRLEGGSGGDSEVQRTMLELLNQLDGFEATKNIKVIMATNRIDILDSALLRPGRIDRKIEFPPPNEEARLDILKIHSRKMNLTRGINLRKIAELMPGASGAEVKGVCTEAGMYALRERRVHVTQEDFEMAVAKVMQKDSEKNMSIKKLWK

SEQ ID NO: 59470 - protein, 398 aa, Homo sapiens; identical to SEQ ID NO: 59457

SEQ ID NO: 59471 - protein, 403 aa, Homo sapiens
MAIPGIPYERRLLIMADPRDKALQDYRKKLLEHKEIDGRLKELREQLKELTKQYEKSENDLKALQSVGQIVGEVLKQLTEEKFIVKATNGPRYVVGCRRQLDKSKLKPGTRVALDMTTLTIMRYLPREVDPLVYNMSHEDPGNVSYSEIGGLSEQIRELREVIELPLTNPELFQRVGIIPPKGCLLYGPPGTGKTLLARAVASQLDCNFLKVVSSSIVDKYIGESARLIREMFNYARDHQPCIIFMDEIDAIGGRRFSEGTSADREIQRTLMELLNQMDGFDTLHRVKMIMATNRPDTLDPALLRPGRLDRKIHIDLPNEQARLDILKIHAGPITKHGEIDYEAIVKLSDGFNGADLRNVCTEAGMFAIRADHDFVVQEDFMKAVRKVADSKKLESKLDYKPV

SEQ ID NO: 59472 - protein, 310 aa, Homo sapiens
MDRLLRLGGGMPGLGQGPPTDAPAVDTAEQVYISSLALLKMLKHGRAGVPMEVMGLMLGEFVDDYTVRVIDVFAMPQSGTGVSVEAVDPVFQAKMLDMLKQTGRPEMVVGWYHSHPGFGCWLSGVDINTQQSFEALSERAVAVVVDPIQSVKGKVVIDAFRLINANMMVLGHEPRQTTSNLGHLNKPSIQALIHGLNRHYYSITINYRKNELEQKMLLNLHKKSWMEGLTLQDYSEHCKHNESVVKEMLELAKNYNKAVEEEDKMTPEQLAIKNVGKQDPKRHLEEHVDVLMTSNIVQCLAAMLDTVVFK

SEQ ID NO: 59473 - protein, 84 aa, Homo sapiens
MDRLLRLGGGMPGLGQGPPTDAPAVDTAEQVYISSLALLKMLKHGRAGVPMEVMGLMLGEFVDDYTVRVIDVFAMPQSGTGVSV

SEQ ID NO: 59474 - protein, 908 aa, Homo sapiens
MEEGGRDKAPVQPQQSPAAAPGGTDEKPSGKERRDAGDKDKEQELSEEDKQLQDELEMLVERLGEKDTSLYRPALEELRRQIRSSTTSMTSVPKPLKFLRPHYGKLKEIYENMAPGENKRFAADIISVLAMTMSGERECLKYRLVGSQEELASWGHEYVRHLAGEVAKEWQELDDAEKVQREPLLTLVKEIVPYNMAHNAEHEACDLLMEIEQVDMLEKDIDENAYAKVCLYLTSCVNYVPEPENSALLRCALGVFRKFSRFPEALRLALMLNDMELVEDIFTSCKDVVVQKQMAFMLGRHGVFLELSEDVEEYEDLTEIMSNVQLNSNFLALARELDIMEPKVPDDIYKTHLENNRFGGSGSQVDSARMNLASSFVNGFVNAAFGQDKLLTDDGNKWLYKNKDHGMLSAAASLGMILLWDVDGGLTQIDKYLYSSEDYIKSGALLACGIVNSGVRNECDPALALLSDYVLHNSNTMRLGSIFGLGLAYAGSNREDVLTLLLPVMGDSKSSMEVAGVTALACGMIAVGSCNGDVTSTILQTIMEKSETELKDTYARWLPLGLGLNHLGKGEAIEAILAALEVVSEPFRSFANTLVDVCAYAGSGNVLKVQQLLHICSEHFDSKEKEEDKDKKEKKDKDKKEAPADMGAHQGVAVLGIALIAMGEEIGAEMALRTFGHLLRYGEPTLRRAVPLALALISVSNPRLNILDTLSKFSHDADPEVSYNSIFAMGMVGSGTNNARLAAMLRQLAQYHAKDPNNLFMVRLAQGLTHLGKGTLTLCPYHSDRQLMSQVAVAGLLTVLVSFLDVRNIILGKSHYVLYGLVAAMQPRMLVTFDEELRPLPVSVRVGQAVDVVGQAGKPKTITGFQTHTTPVLLAHGERAELATEEFLPVTPILEGFVILRKNPNYDL

SEQ ID NO: 59475 - protein, 580 aa, Homo sapiens
QCTAQQQLLGLSSGAGHHGAQLMLQNPPREQQVWGQWLSGGLCPHEPGLLFCEWLCECSFWDKLLTDDGNKWLYKNKDHGMLSAAASLGMILLWDVDGGLTQIDKYLYSSEDYIKSGALLACGIVNSGVRNECDPALALLSDYVLHNSNTMRLGSIFGLGLAYAGSNREDVLTLLLPVMGDSKSSMEVAGVTALACGMIAVGSCNGDVTSTILQTIMEKSETELKDTYARWLPLGLGLNHLGKGEAIEAILAALEVVSEPFRSFANTLVDVCAYAGSGNVLKVQQLLHICSEHFDSKEKEEDKDKKEKKDKDKKEAPADMGAHQGVAVLGPLLLWGRRLVQRWHYEPYHQLRYGEPTLRRAVPLALALISVSNPRLNILDTLSKFSHDADPEVSYNSIFAMGMVGSGTNNARLAAMLRQLAQYHAKDPNNLFMVRLAQGLTHLGKGTLTLCPYHSDRQLMSQVAVAGLLTVLVSFLDVRNIILGKSHYVLYGLVAAMQPRMLVTFDEELRPLPVSVRVGQAVDVVGQAGKPKTITGFQTHTTPVLLAHGERAELATEEFLPVTPILEGFVFGRTPIMISK

SEQ ID NO: 59476 - protein, 900 aa, Homo sapiens
MEEGGRDKAPVQPQQSPAAAPGGTDEKPSGKDKEQELSEEDKQLQDELEMLVERLGEKDTSLYRPALEELRRQIRSSTTSMTSVPKPLKFLRPHYGKLKEIYENMAPGENKRFAADIISVLAMTMSGERECLKYRLVGSQEELASWGHEYVRHLAGEVAKEWQELDDAEKVQREPLLTLVKEIVPYNMAHNAEHEACDLLMEIEQVDMLEKDIDENAYAKVCLYLTSCVNYVPEPENSALLRCALGVFRKFSRFPEALRLALMLNDMELVEDIFTSCKDVVVQKQMAFMLGRHGVFLELSEDVEEYEDLTEIMSNVQLNSNFLALARELDIMEPKVPDDIYKTHLENNRFGGSGSQVDSARMNLASSFVNGFVNAAFGQDKLLTDDGNKWLYKNKDHGMLSAAASLGMILLWDVDGGLTQIDKYLYSSEDYIKSGALLACGIVNSGVRNECDPALALLSDYVLHNSNTMRLGSIFGLGLAYAGSNREDVLTLLLPVMGDSKSSMEVAGVTALACGMIAVGSCNGDVTSTILQTIMEKSETELKDTYARWLPLGLGLNHLGKGEAIEAILAALEVVSEPFRSFANTLVDVCAYAGSGNVLKVQQLLHICSEHFDSKEKEEDKDKKEKKDKDKKEAPADMGAHQGVAVLGIALIAMGEEIGAEMALRTFGHLLRYGEPTLRRAVPLALALISVSNPRLNILDTLSKFSHDADPEVSYNSIFAMGMVGSGTNNARLAAMLRQLAQYHAKDPNNLFMVRLAQGLTHLGKGTLTLCPYHSDRQLMSQVAVAGLLTVLVSFLDVRNIILGKSHYVLYGLVAAMQPRMLVTFDEELRPLPVSVRVGQAVDVVGQAGKPKTITGFQTHTTPVLLAHGERAELATEEFLPVTPILEGFVILRKNPNYDL

SEQ ID NO: 59477 - protein, 504 aa, Homo sapiens
MAAQALALLREVARLEAPLEELRALHSVLQAVPLNELRQQAAELRLGPLFSLLNENHREKTTLCVSILERLLQAMEPVHVARNLRVDLQRGLIHPDDSVKILTLSQIGRIVENSDAVTEILNNAELLKQIVYCIGGENLSVAKAAIKSLSRISLTQAGLEALFESNLLDDLKSVMKTNDIVRYRVYELIIEISSVSPESLNYCTTSGLVTQLLRELTGEDVLVRATCIEMVTSLAYTHHGRQYLAQEGVIDQISNIIVGADSDPFSSFYLPGFVKFFGNLAVMDSPQQICERYPIFVEKVFEMIESQDPTMIGVAVDTVGILGSNVEGKQVLQKTGTRFERLLMRIGHQSKNAPVELKIRCLDAISSLLYLPPEQQTDDLLRMTESWFSSLSRDPLELFRGISSQPFPELHCAALKVFTAIANQPWAQKLMFNSPGFVEYVVDRSVEHDKASKDAKYELVKALANSKTIAEIFGNPNYLRLRTYLSEGPYYVKPVSTTAVEGAE

SEQ ID NO: 59478 - protein, 157 aa, Homo sapiens
MVTSLAYTHHGRQYLAQEGVIDQISNIIVGADSDPFSSFYLPGFVKFFGNLAVMDSPQQICERYPIFVEKVFEMIESQDPTMIGVAVDTVGILGSNVEGKQVLQKTGWYDLALFRDILIFDRGSICKFICWWVNYIVETILWVAVLLTMTLYSCLKI

SEQ ID NO: 59479 - protein, 461 aa, Homo sapiens
MAAQALALLREVARLEAPLEELRALHSVLQAVPLNELRQQAAELRLGPLFSLLNENHREKTTLCVSILERLLQAMEPVHVARNLRVDLQRGLIHPDDSVKILTLSQIGRIVENSDAVTEILNNAELLKQIVYCIGGENLSVAKALIIEISSVSPESLNYCTTSGLVTQLLRELTGEDVLVRATCIEMVTSLAYTHHGRQYLAQEGVIDQISNIIVGADSDPFSSFYLPGFVKFFGNLAVMDSPQQICERYPIFVEKVFEMIESQDPTMIGVAVDTVGILGSNVEGKQVLQKTGTRFERLLMRIGHQSKNAPVELKIRCLDAISSLLYLPPEQQTDDLLRMTESWFSSLSRDPLELFRGISSQPFPELHCAALKVFTAIANQPWAQKLMFNSPGFVEYVVDRSVEHDKASKDAKYELVKALANSKTIAEIFGNPNYLRLRTYLSEGPYYVKPVSTTAVEGAE

SEQ ID NO: 59480 - protein, 97 aa, Homo sapiens
MRIGHQSKNAPVELKIRCLDAISSLLYLPPEQQTDDLLRMTESWFSSLSRDPLELFRGISSQPFPELHCAALKVFTGRKHLHLEELVGGNQVKNTVE

SEQ ID NO: 59481 - protein, 324 aa, Homo sapiens
MPELAVQKVVVHPLVLLSVVDHFNRIGKVGNQKRVVGVLLGSWQKKVLDVSNSFAVPFDEDDKDDSVWFLDHDYLENMYGMFKKVNARERIVGWYHTGPKLHKNDIAINELMKRYCPNSVLVIIDVKPKDLGLPTEAYISVEEVHDDGTPTSKTFEHVTSEIGAEEAEEVGVEHLLRDIKDTTVGTLSQRITNQVHGLKGLNSKLLDIRSYLEKVATGKLPINHQIIYQLQDVFNLLPDVSLQEFVKAFYLKTNDQMVVVYLASLIRSVVALHNLINNKIANRDAEKKEGQEKEESKKDRKEDKEKDKDKEKSDVKKEEKKEKK

SEQ ID NO: 59482 - protein, 247 aa, Homo sapiens
MYGMFKKVNARERIVGWYHTGPKLHKNDIAINELMKRYCPNSVLVIIDVKPKDLGLPTEAYISVEEVHDDGTPTSKTFEHVTSEIGAEEAEEVGVEHLLRDIKDTTVGTLSQRITNQVHGLKGLNSKLLDIRSYLEKVATGKLPINHQIIYQLQDVFNLLPDVSLQEFVKAFYLKTNDQMVVVYLASLIRSVVALHNLINNKIANRDAEKKEGQEKEESKKDRKEDKEKDKDKEKSDVKKEEKKEKK

SEQ ID NO: 59483 - protein, 207 aa, Homo sapiens
MSDEEARQSGGSSQAGVVTVSDVQELMRRKEEIEAQIKANYDVLESQKGIGMNEPLVDCEGYPRSDVDLYQVRTARHNIICLQNDHKAVMKQVEEALHQLHARDKEKQARDMAEAHKEAMSRKLGQSESQGPPRAFAKVNSISPGSPASIAGLQVDDEIVEFGSVNTQNFQSLHNIGSVVQHSEGALAPTILLSVSMNLTTPGTSSR

SEQ ID NO: 59484 - protein, 223 aa, Homo sapiens
MSDEEARQSGGSSQAGVVTVSDVQELMRRKEEIEAQIKANYDVLESQKGIGMNEPLVDCEGYPRSDVDLYQVRTARHNIICLQNDHKAVMKQVEEALHQLHARDKEKQARDMAEAHKEAMSRKLGQSESQGPPRAFAKVNSISPGSPASIAGLQVDDEIVEFGSVNTQNFQSLHNIGSVVQHSEGKPLNVTVIRRGEKHQLRLVPTRWAGKGLLGCNIIPLQR

SEQ ID NO: 59485 - protein, 249 aa, Homo sapiens
MAMLRVQPEAQAKVDVFREDLCTKTENLLGSYFPKKISELDAFLKEPALNEANLSNLKAPLDIPVPDPVKEKEKEERKKQQEKEDKDEKKKGEDEDKGPPCGPVNCNEKIVVLLQRLKPEIKDVIEQLNLVTTWLQLQIPRIEDGNNFGVAVQEKVFELMTSLHTKLEGFHTQISKYFSERGDAVTKAAKQPHVGDYRQLVHELDEAEYRDIRLMVMEIRNAYAVLYDIILKNFEKLKKPRGETKGMIY

SEQ ID NO: 59486 - protein, 250 aa, Homo sapiens
MAMLRVQPEAQAKVDVFREDLCTKTENLLGSYFPKKISELDAFLKEPALNEANLSNLKAPLDIPVPDPVKEKEKEERKKQQEKEDKDEKKKGEDEDKGPPCGPVNCNEKIVVLLQRLKPEIKDVIEQLNLVTTWLQLQIPRIEDGNNFGVAVQEKVFELMTSLHTKLEGFHTQISKYFSERGDAVTKAAKQPHVGDYRQLVHELDEAEYRDIRLMVMEIRNAYVRRQGQGRGGQRQLSQATHSLTLQARG

SEQ ID NO: 59487 - protein, 239 aa, Homo sapiens
MAKPCGVRLSGEARKQVEVFRQNLFQEAEEFLYRFLPQKIIYLNQLLQEDSLNVADLTSLRAPLDIPIPDPPPKDDEMETDKQEKKEVHKCGFLPGNEKVLSLLALVKPEVWTLKEKCILVITWIQHLIPKIEDGNDFGVAIQEKVLERVNAVKTKVEAFQTTISKYFSERGDAVAKASKETHVMDYRALVHERDEAAYGELRAMVLDLRAFYAELYHIISSNLEKIVNPKGEEKPSMY

SEQ ID NO: 59488 - protein, 267 aa, Homo sapiens
MASLLKVDQEVKLKVDSFRERITSEAEDLVANFFPKKLLELDSFLKEPILNIHDLTQIHSDMNLPVPDPILLTNSHDGLDGPTYKKRRLDECEEAFQGTKVFVMPNGMLKSNQQLVDIIEKVKPEIRLLIEKCNTPSGKGPHICFDLQVKMWVQLLIPRIEDGNNFGVSIQEETVAELRTVESEAASYLDQISRYYITRAKLVSKIAKYPHVEDYRRTVTEIDEKEYISLRLIISELRNQYVTLHDMILKNIEKIKRPRSSNAETLY

SEQ ID NO: 59489 - protein, 254 aa, Homo sapiens; identical to SEQ ID NO: 59458

SEQ ID NO: 59490 - protein, 15 aa, Homo sapiens
MASLLKVDQEVKLKL

SEQ ID NO: 59491 - protein, 130 aa, Homo sapiens
MASLLKVDQEVKLKVDSFRERITSEAEDLVANFFPKKLLELDSFLKEPILNIHDLTQIHSDMNLPVPDPILLTNSHDGLDGPTYKKRRLDECEEAFQGQNVGTAPDSQDRRWKQLWGVHSGGNSCRAKNC

SEQ ID NO: 59492 - protein, 193 aa, Homo sapiens
MNLPVPDPILLTNSHDGLDGPTYKKRRLDECEEAFQGTKVFVMPNGMLKSNQQLVDIIEKVKPEIRLLIEKCNTVKMWVQLLIPRIEDGNNFGVSIQEETVAELRTVESEAASYLDQISRYYITRAKLVSKIAKYPHVEDYRRTVTEIDEKEYISLRLIISELRNQYVTLHDMILKNIEKIKRPRSSNAETLY

SEQ ID NO: 59493 - protein, 1843 aa, Homo sapiens
MEPAERAGVGEPPEPGGRPEPGPRGFVPQKEIVYNKLLPYAERLDAESDLQLAQIKCNLGRAVQLQELWPGGLFWTRKLSTYIRLYGRKFSKEDHVLFIKLLYELVSIPKLEISMMQGFARLLINLLKKKELLSRADLELPWRPLYDMVERILYSKTEHLGLNWFPNSVENILKTLVKSCRPYFPADATAEMLEEWRPLMCPFDVTMQKAITYFEIFLPTSLPPELHHKGFKLWFDELIGLWVSVQNLPQWEGQLVNLFARLATDNIGYIDWDPYVPKIFTRILRSLNLPVGSSQVLVPRFLTNAYDIGHAVIWITAMMGGPSKLVQKHLAGLFNSITSFYHPSNNGRWLNKLMKLLQRLPNSVVRRLHRERYKKPSWLTPVPDSHKLTDQDVTDFVQCIIQPVLLAMFSKTGSLEAAQALQNLALMRPELVIPPVLERTYPALETLTEPHQLTATLSCVIGVARSLVSGGRWFPEGPTHMLPLLMRALPGVDPNDFSKCMITFQFIATFSTLVPLVDCSSVLQERNDLTEVERELCSATAEFEDFVLQFMDRCFGLIESSTLEQTREETETEKMTHLESLVELGLSSTFSTILTQCSKEIFMVALQKVFNFSTSHIFETRVAGRMVADMCRAAVKCCPEESLKLFVPHCCSVITQLTMNDDVLNDEELDKELLWNLQLLSEITRVDGRKLLLYREQLVKILQRTLHLTCKQGYTLSCNLLHHLLRSTTLIYPTEYCSVPGGFDKPPSEYFPIKDWGKPGDLWNLGIQWHVPSSEEVSFAFYLLDSFLQPELVKLQHCGDGKLEMSRDDILQSLTIVHNCLIGSGNLLPPLKGEPVTNLVPSMVSLEETKLYTGLEYDLSRENHREVIATVIRKLLNHILDNSEDDTKSLFLIIKIIGDLLQFQGSHKHEFDSRWKSFNLVKKSMENRLHGKKQHIRALLIDRVMLQHELRTLTVEGCEYKKIHQDMIRDLLRLSTSSYSQVRNKAQQTFFAALGAYNFCCRDIIPLVLEFLRPDRQGVTQQQFKGALYCLLGNHSGVCLANLHDWDCIVQTWPAIVSSGLSQAMSLEKPSIVRLFDDLAEKIHRQYETIGLDFTIPKSCVEIAELLQQSKNPSINQILLSPEKIKEGIKRQQEKNADALRNYENLVDTLLDGVEQRNLPWKFEHIGIGLLSLLLRDDRVLPLRAIRFFVENLNHDAIVVRKMAISAVAGILKQLKRTHKKLTINPCEISGCPKPTQIIAGDRPDNHWLHYDSKTIPRTKKEWESSCFVEKTHWGYYTWPKNMVVYAGVEEQPKLGRSREDMTEAEQIIFDHFSDPKFVEQLITFLSLEDRKGKDKFNPRRFCLFKGIFRNFDDAFLPVLKPHLEHLVADSHESTQRCVAEIIAGLIRGSKHWTFEKVEKLWELLCPLLRTALSNITVETYNDWGACIATSCESRDPRKLHWLFELLLESPLSGEGGSFVDACRLYVLQGGLAQQEWRVPELLHRLLKYLEPKLTQVYKNVRERIGSVLTYIFMIDVSLPNTTPTISPHVPEFTARILEKLKPLMDVDEEIQNHVMEENGIGEEDERTQGIKLLKTILKWLMASAGRSFSTAVTEQLQLLPLFFKIAPVENDNSYDELKRDAKLCLSLMSQGLLYPHQVPLVLQVLKQTARSSSWHARYTVLTYLQTMVFYNLFIFLNNEDAVKDIRWLVISLLEDEQLEVREMAATTLSGLLQCNFLTMDSPMQIHFEQLCKTKLPKKRKRDPGSVGDTIPSAELVKRHAGVLGLGACVLSSPYDVPTWMPQLLMNLSAHLNDPQPIEMTVKKTLSNFRRTHHDNWQEHKQQFTDDQLLVLTDLLVSPCYYA

SEQ ID NO: 59494 - protein, 987 aa, Homo sapiens
MGENLAKKIMFFLLTIKLILNHILDNSEDDTKSLFLIIKIIGDLLQFQGSHKHEFDSRWKSFNLVKKSMENRLHGKKQHIRALLIDRVMLQHELRTLTVEGCEYKKIHQDMIRDLLRLSTSSYSQVRNKAQQTFFAALGAYNFCCRDIIPLVLEFLRPDRQGVTQQQFKGALYCLLGNHSGVCLANLHDWDCIVQTWPAIVSSGLSQAMSLEKPSIVRLFDDLAEKIHRQYETIGLDFTIPKSCVEIAELLQQSKNPSINQILLSPEKIKEGIKRQQEKNADALRNYENLVDTLLDGVEQRNLPWKFEHIGIGLLSLLLRDDRVLPLRAIRFFVENLNHDAIVVRKMAISAVAGILKQLKRTHKKLTINPCEISGCPKPTQIIAGDRPDNHWLHYDSKTIPRTKKEWESSCFVEKTHWGYYTWPKNMVVYAGVEEQPKLGRSREDMTEAEQIIFDHFSDPKFVEQLITFLSLEDRKGKDKFNPRRFCLFKGIFRNFDDAFLPVLKPHLEHLVADSHESTQRCVAEIIAGLIRGSKHWTFEKVEKLWELLCPLLRTALSNITVETYNDWGACIATSCESRDPRKLHWLFELLLESPLSGEGGSFVDACRLYVLQGGLAQQEWRVPELLHRLLKYLEPKLTQVYKNVRERIGSVLTYIFMIDVSLPNTTPTISPHVPEFTARILEKLKPLMDVDEEIQNHVMEENGIGEEDERTQGIKLLKTILKWLMASAGRSFSTAVTEQLQLLPLFFKIAPVENDNSYDELKRDAKLCLSLMSQGLLYPHQVPLVLQVLKQTARSSSWHARYTVLTYLQTMVFYNLFIFLNNEDAVKDIRWLVISLLEDEQLEVREMAATTLSGLLQCNFLTMDSPMQIHFEQLCKTKLPKKRKRDPGSVGDTIPSAELVKRHAGVLGLGACVLSSPYDVPTWMPQLLMNLSAHLNDPQPIEMTVKKTLSNFRRTHHDNWQEHKQQFTDDQLLVLTDLLVSPCYYA

SEQ ID NO: 59495 - protein, 288 aa, Homo sapiens
MAATFFGEVVKAPCRAGTEDEEEEEEGRRETPEDREVRLQLARKREVRLLRRQTKTSLEVSLLEKYPCSKFIIAIGNNAVAFLSSFVMNSGVWEEVGCAKLWNEWCRTTDTTHLSSTEAFCVFYHLKSNPSVFLCQCSCYVAEDQQYQWLEKVFGSCPRKNMQITILTCRHVTDYKTSESTGSLPSPFLRALKTQNFKDSACCPLLEQPNIVHDLPAAVLSYCQVWKIPAILYLCYTDVMKLDLITVEAFKPILSTRSLKGLVKNIPQSTEILKKLMTTNEIQSNIYT

SEQ ID NO: 59496 - protein, 267 aa, Homo sapiens
MAATFFGEVVKAPCRAGTEDEEEEEEGRRETPEDREVRLQLARKREVRLLRRQTKTSLEVSLLEKYPCSKFIIAIGNNAVAFLSSFVMNSGVWEEVGCAKLWNEWCRTTDTTHLSSTEAFCVFYHLKSNPSVFGSCPRKNMQITILTCRHVTDYKTSESTGSLPSPFLRALKTQNFKDSACCPLLEQPNIVHDLPAAVLSYCQVWKIPAILYLCYTDVMKLDLITVEAFKPILSTRSLKGLVKNIPQSTEILKKLMTTNEIQSNIYT

SEQ ID NO: 59497 - protein, 264 aa, Homo sapiens
MFVPCGESAPDLAGFTLLMPAVSVGNVGQLAMDLIISTLNMSKIGYFYTDCLVPMVGNNPYATTEGNSTELSINAEVYSLPSRKLVALQLRSIFIKYKSKPFCEKLLSWVKSSGCARVIVLSSSHSYQRNDLQLRSTPFRYLLTPSMQKSVQNKIKSLNWEEMEKSRCIPEIDDSEFCIRIPGGGITKTLYDESCSKEIQMAVLLKFVSEGDNIPDALGLVEYLNEWLQILKPLSDDPTVSASRWKIPSSWRLLFGSGLPPALF

SEQ ID NO: 59498 - protein, 152 aa, Homo sapiens
MPAVSVGNVGQLAMDLIISTLNMSKIGYFYTDCLVPMVGNNPYATTEGNSTELSINAEVYSLPSRKLVALQLRSIFIKYKSKPFCEKLLSWVKSSGCARVIVLSSSHSYQRNDLQLRSTPFRYLLTPSMQKSVQNKIKSLNWEEMEKGAFLK

SEQ ID NO: 59499 - protein, 263 aa, Homo sapiens
MFRNQYDNDVTVWSPQGRIHQIEYAMEAVKQGSATVGLKSKTHAVLVALKRAQSELAAHQKKILHVDNHIGISIAGLTADARLLCNFMRQECLDSRFVFDRPLPVSRLVSLIGSKTQIPTQRYGRRPYGVGLLIAGYDDMGPHIFQTCPSANYFDCRAMSIGARSQSARTYLERHMSEFMECNLNELVKHGLRALRETLPAEQDLTTKNVSIGIVGKDLEFTIYDDDDVSPFLEGLEERPQRKAQPAQPADEPAEKADEPMEH

SEQ ID NO: 59500 - protein, 263 aa, Homo sapiens; identical to SEQ ID NO: 59499

SEQ ID NO: 59501 - protein, 269 aa, Homo sapiens
MQLSKVKFRNQYDNDVTVWSPQGRIHQIEYAMEAVKQGSATVGLKSKTHAVLVALKRAQSELAAHQKKILHVDNHIGISIAGLTADARLLCNFMRQECLDSRFVFDRPLPVSRLVSLIGSKTQIPTQRYGRRPYGVGLLIAGYDDMGPHIFQTCPSANYFDCRAMSIGARSQSARTYLERHMSEFMECNLNELVKHGLRALRETLPAEQDLTTKNVSIGIVGKDLEFTIYDDDDVSPFLEGLEERPQRKAQPAQPADEPAEKADEPMEH

SEQ ID NO: 59502 - protein, 164 aa, Homo sapiens
MFRNQYDNDVTVWSPQGRIHQIEYAMEAVKQGSATVGLKSKTHAVLVALKRAQSELAAHQKKILHVDNHIGISIAGLTADARLLCNFMRQECLDSRFVFDRPLPVSRLVSLIGSSILFMIWALTFSKPVHLLTILTAEPCPLEPVPNQLVLTWRDICLNLWSVI

SEQ ID NO: 59503 - protein, 234 aa, Homo sapiens
MAERGYSFSLTTFSPSGKLVQIEYALAAVAGGAPSVGIKAANGVVLATEKKQKSILYDERSVHKVEPITKHIGLVYSGMGPDYRVLVHRARKLAQQYYLVYQEPIPTAQLVQRVASVMQEYTQSGGVRPFGVSLLICGWNEGRPYLFQSDPSGAYFAWKATAMGKNYVNGKTFLEKRYNEDLELEDAIHTAILTLKESFEGQMTEDNIEVGICNEAGFRRLTPTEVKDYLAAIA

SEQ ID NO: 59504 - protein, 99 aa, Homo sapiens
MGPDYRVLVHRARKLAQQYYLVYQEPIPTAQLVQRVASVMQEYTQSGGVRPFGVSLLICGWNEGRPYLFQSDPSGAYFAWKATAMGKNYVNGKTFLEKR

SEQ ID NO: 59505 - protein, 255 aa, Homo sapiens
MSSIGTGYDLSASTFSPDGRVFQVEYAMKAVENSSTAIGIRCKDGVVFGVEKLVLSKLYEEGSNKRLFNVDRHVGMAVAGLLADARSLADIAREEASNFRSNFGYNIPLKHLADRVAMYVHAYTLYSAVRPFGCSFMLGSYSVNDGAQLYMIDPSGVSYGYWGCAIGKARQAAKTEIEKLQMKEMTCRDIVKEVAKIIYIVHDEVKDKAFELELSWVGELTNGRHEIVPKDIREEAEKYAKESLKEEDESDDDNM

SEQ ID NO: 59506 - protein, 248 aa, Homo sapiens
MSSIGTGYDLSASTFSPDGRVFQVEYAMKAVENSSTAIGIRCKDGVVFGVEKLVLSKLYEEGSNKRLFNVDRHVGMAVAGLLADARSLADIAREEASNFRSNFGYNIPLKHLADRVAMYVHAYTLYSAVRPFGCSVNDGAQLYMIDPSGVSYGYWGCAIGKARQAAKTEIEKLQMKEMTCRDIVKEVAKIIYIVHDEVKDKAFELELSWVGELTNGRHEIVPKDIREEAEKYAKESLKEEDESDDDNM

SEQ ID NO: 59507 - protein, 261 aa, Homo sapiens
MSRRYDSRTTIFSPEGRLYQVEYAMEAIGHAGTCLGILANDGVLLAAERRNIHKLLDEVFFSEKIYKLNEDMACSVAGITSDANVLTNELRLIAQRYLLQYQEPIPCEQLVTALCDIKQAYTQFGGKRPFGVSLLYIGWDKHYGFQLYQSDPSGNYGGWKATCIGNNSAAAVSMLKQDYKEGEMTLKSALALAIKVLNKTMDVSKLSAEKVEIATLTRENGKTVIRVLKQKEVEQLIKKHEEEEAKAEREKKEKEQKEKDK

SEQ ID NO: 59508 - protein, 190 aa, Homo sapiens
MACSVAGITSDANVLTNELRLIAQRYLLQYQEPIPCEQLVTALCDIKQAYTQFGGKRPFGVSLLYIGWDKHYGFQLYQSDPSGNYGGWKATCIGNNSAAAVSMLKQDYKEGEMTLKSALALAIKVLNKTMDVSKLSAEKVEIATLTRENGKTVIRVLKQKEVEQLIKKHEEEEAKAEREKKEKEQKEKDK

SEQ ID NO: 59509 - protein, 261 aa, Homo sapiens; identical to SEQ ID NO: 59507

SEQ ID NO: 59510 - protein, 221 aa, Homo sapiens
MSRRYDSRTTIFSPEGRLYQVEYAMEAIGHAGTCLGILANDGVLLAAERRNIHKLLDEVFFSEKIYKLNEDMACSVAGITSDANVLTNELRLIAQRYLLQYQEPIPCEQLVTALCDIKQAYTQFGGKRPFGVSLLYIGWDKHYGFQLYQSDPSGNYGGWKATCIGNNSAAAVSMLKQDYKEGEMTLKSALALAIKVLNKTMDVSKLSAEKVEIATLTRENG

SEQ ID NO: 59511 - protein, 209 aa, Homo sapiens
MSRRYDSRTTIFSPEGRLYQVEYAMEAIGHAGTCLGILANDGVLLAAERRNIHKLLDEVFFSEKIYKLNEDMACSVAGITSDANVLTNELRLIAQRYLLQYQEPIPCEQLVTALCDIKQAYTQFGGKRPFGVSLLYIGWDKHYGFQLYQSDPSGNYGGWKATCIGNNSAAAVSMLKQDYKEGEMTLKSALALAIKVLNKTMDVSKLSAE

SEQ ID NO: 59512 - protein, 230 aa, Homo sapiens
MSRRYDSRTTIFSPEAERRNIHKLLDEVFFSEKIYKLNEDMACSVAGITSDANVLTNELRLIAQRYLLQYQEPIPCEQLVTALCDIKQAYTQFGGKRPFGVSLLYIGWDKHYGFQLYQSDPSGNYGGWKATCIGNNSAAAVSMLKQDYKEGEMTLKSALALAIKVLNKTMDVSKLSAEKVEIATLTRENGKTVIRVLKQKEVEQLIKKHEEEEAKAEREKKEKEQKEKDK

SEQ ID NO: 59513 - protein, 236 aa, Homo sapiens
MSRRYDSRTTIFSPEGRLYQVEYAMEAIGHAGTCLGILANDGVLLAAERRNIHKLLDEVFFSEKIYKLNEDMACSVAGITSDANVLTNELRLIAQRYLLQYQEPIPCEQLVTALCDIKQAYTQFGGKRPFGVSLLYIGWDKHYGFQLYQSDPSGNYGGWKATCIGNNSAAAVSMLKQDYKEGEMTLKSALALAIKVLNKTMDVSKLSAEKVEIATLTRENGKTVIRVLKQKEVEQL

SEQ ID NO: 59514 - protein, 241 aa, Homo sapiens
MFLTRSEYDRGVNTFSPEGRLFQVEYAIEAIKLGSTAIGIQTSEGVCLAVEKRITSPLMEPSSIEKIVEIDAHIGCAMSGLIADAKTLIDKARVETQNHWFTYNETMTVESVTQAVSNLALQFGEEDADPGAMSRPFGVALLFGGVDEKGPQLFHMDPSGTFVQCDARAIGSASEGAQSSLQEVYHKSMTLKEAIKSSLIILKQVMEEKLNATNIELATVQPGQNFHMFTKEELEEVIKDI

SEQ ID NO: 59515 - protein, 183 aa, Homo sapiens
MEPSSIEKIVEIDAHIGCAMSGLIADAKTLIDKARVETQNHWFTYNETMTVESVTQAVSNLALQFGEEDADPGAMSRPFGVALLFGGVDEKGPQLFHMDPSGTFVQCDARAIGSASEGAQSSLQEVYHKSMTLKEAIKSSLIILKQVMEEKLNATNIELATVQPGQNFHMFTKEELEEVIKDI

SEQ ID NO: 59516 - protein, 246 aa, Homo sapiens
MSRGSSAGFDRHITIFSPEGRLYQVEYAFKAINQGGLTSVAVRGKDCAVIVTQKKVPDKLLDSSTVTHLFKITENIGCVMTGMTADSRSQVQRARYEAANWKYKYGYEIPVDMLCKRIADISQVYTQNAEMRPLGCCMILIGIDEEQGPQVYKCDPAGYYCGFKATAAGVKQTESTSFLEKKVKKKFDWTFEQTVETAITCLSTVLSIDFKPSEIEVGVVTVENPKFRILTEAEIDAHLVALAERD

SEQ ID NO: 59517 - protein, 227 aa, Homo sapiens
MAGLRREYAFKAINQGGLTSVAVRGKDCAVIVTQKKVPDKLLDSSTVTHLFKITENIGCVMTGMTADSRSQVQRARYEAANWKYKYGYEIPVDMLCKRIADISQVYTQNAEMRPLGCCMILIGIDEEQGPQVYKCDPAGYYCGFKATAAGVKQTESTSFLEKKVKKKFDWTFEQTVETAITCLSTVLSIDFKPSEIEVGVVTVENPKFRILTEAEIDAHLVALAERD

SEQ ID NO: 59518 - protein, 252 aa, Homo sapiens
MSRGSSAGFDRHITIFSPEGRLYQVEYAFKAINQGGLTSVAVRGKDCAVIVTQKKVPDKLLDSSTVTHLFKITENIGCVMTGMTADSRSQVQRARYEAANWKYKYGYEIPVDMLCKRIADISQVYTQNAEMRPLGCWSFLFLGMILIGIDEEQGPQVYKCDPAGYYCGFKATAAGVKQTESTSFLEKKVKKKFDWTFEQTVETAITCLSTVLSIDFKPSEIEVGVVTVENPKFRILTEAEIDAHLVALAERD

SEQ ID NO: 59519 - protein, 107 aa, Homo sapiens
MSRGSSAGFDRHITIFSPEGRLYQVEYAFKAINQGGLTSVAVRGKDCAVIVTQKKVPDKLLDSSTVTHLFKITENIGCVMTGMTVSLCRPGCSASWVQAILVPQPPR

SEQ ID NO: 59520 - protein, 148 aa, Homo sapiens
MSRGSSAGFDRHITIFSPEGRLYQVEYAFKAINQGGLTSVAVRGKDCAVIVTQKKVPDKLLDSSTVTHLFKITENIGCVMTGMTADSRSQVQRARYEAANWKYKYGYEIPVDMLCKRIADISQVYTQNAEMRPLGCYCNYMPVYCSIN

SEQ ID NO: 59521 - protein, 167 aa, Homo sapiens
MTGMTADSRSQVQRARYEAANWKYKYGYEIPVDMLCKRIADISQVYTQNAEMRPLGCCMILIGIDEEQGPQVYKCDPAGYYCGFKATAAGVKQTESTSFLEKKVKKKFDWTFEQTVETAITCLSTVLSIDFKPSEIEVGVVTVENPKFRILTEAEIDAHLVALAERD

SEQ ID NO: 59522 - protein, 203 aa, Homo sapiens
MSRGSSAGFDRHITIFSPEGRLYQVEYAFKAINQGGLTSVAVRGKDCAVIVTQKKVPDKLLDSSTVTHLFKITENIGCVMTGMTADSRSQVQRARYEAANWKYKYGYEIPVDMLCKRIADISQVYTQNAEMRPLGCCMILIGIDEEQGPQVYKCDPAGYYCGFKATAAGVKQTESTSFLEKKVKKKFDWTFEQTVEDSYRSRD

SEQ ID NO: 59523 - protein, 149 aa, Homo sapiens
MSYDRAITVFSPDGHLFQVEYAQEAVKKGSTAVGVRGRDIVVLGVEKKSVAKLQDERTVRKICALDDNVCMAFAGLTADARIVINRARVECQSHRLTVEDPVTVEYITRYIASLKQVGACPLACSPLAAGQSRLRHGGSCHVTSGESEN

SEQ ID NO: 59524 - protein, 178 aa, Homo sapiens
MAFAGLTADARIVINRARVECQSHRLTVEDPVTVEYITRYIASLKQRYTQSNGRRPFGISALIVGFDFDGTPRLYQTDPSGTYHAWKANAIGRGAKSVREFLEKNYTDEAIETDDLTIKLVIKALLEVVQSGGKNIELAVMRRDQSLKILNPEEIEKYVAEIEKEKEENEKKKQKKAS

SEQ ID NO: 59525 - protein, 248 aa, Homo sapiens
MSYDRAITVFSPDGHLFQVEYAQEAVKKGSTAVGVRGRDIVVLGVEKKSVAKLQDERTVRKICALDDNVCMAFAGLTADARIVINRARVECQSHRLTVEDPVTVEYITRYIASLKQRYTQSNGRRPFGISALIVGFDFDGTPRLYQTDPSGTYHAWKANAIGRGAKSVREFLEKNYTDEAIETDDLTIKLVIKALLEVVQSGGKNIELAVMRRDQSLKILNPEEIEKYVAEIEKEKEENEKKKQKKAS

SEQ ID NO: 59526 - protein, 187 aa, Homo sapiens
  VARIANT 1: note = MOD_RES - Any amino acid
XLTADARIVINRARVECQSHRLTVEDPVTVEYITRYIASLKQRYTQSNGRRPFGISALIVGFDFDGTPRLYQTDPSGTYHAWKANAIGRGAKSVREFLEKNYTDEAIETDDLTIKLVIKALLEGKVVNAPVFCPFKVVQSGGKNIELAVMRRDQSLKILNPEEIEKYVAEIEKEKEENEKKKQKKAS

SEQ ID NO: 59527 - protein, 241 aa, Homo sapiens
MLSSTAMYSAPGRDLGMEPHRAAGPLQLRFSPYVFNGGTILAIAGEDFAIVASDTRLSEGFSIHTRDSPKCYKLTDKTVIGCSGFHGDCLTLTKIIEARLKMYKHSNNKAMTTGAIAAMLSTILYSRRFFPYYVYNIIGGLDEEGKGAVYSFDPVGSYQRDSFKAGGSASAMLQPLLDNQVGFKNMQNVEHVPLSLDRAMRLVKDVFISAAERDVYTGDALRICIVTKEGIREETVSLRKD

SEQ ID NO: 59528 - protein, 196 aa, Homo sapiens
RRSRAMLSSTAMYSAPGRDLGMEPHRAAGPLQLRFSPYVFNGGTILAIAGEDFAIVASDTRLSEGFSIHTRDSPKCYKLTDKTVIGCSGFHGDCLTLTKIIEARLKMYKHSNNKAMTTGAIAAMLSTILYSRRFFPYYVYNIIGGLDEEGKGAVYSFDPVGSYQRDSFKAGGSASAMLQPLLDNQYISSNSVSLCV

SEQ ID NO: 59529 - protein, 273 aa, Homo sapiens
MLKPALEPRGGFSFENCQRNASLERVLPGLKVPHARKTGTTIAGLVFQDGVILGADTRATNDSVVADKSCEKIHFIAPKIYCCGAGVAADAEMTTRMVASKMELHALSTGREPRVATVTRILRQTLFRYQGHVGASLIVGGVDLTGPQLYGVHPHGSYSRLPFTALGSGQDAALAVLEDRFQPNMTLEAAQGLLVEAVTAGILGDLGSGGNVDACVITKTGAKLLRTLSSPTEPVKRSGRYHFVPGTTAVLTQTVKPLTLELVEETVQAMEVE

SEQ ID NO: 59530 - protein, 300 aa, Homo sapiens
MALQDVCKWQSPDTQGPSPHLPRAGGWAVPRGCDPQTFLQIHGPRLAHGTTTLAFRFRHGVIAAADTRSSCGSYVACPASCKVIPVHQHLLGTTSGTSADCATWYRVLQRELRLRELREGQLPSVASAAKLLSAMMSQYRGLDLCVATALCGWDRSGPELFYVYSDGTRLQGDIFSVGSGSPYAYGVLDRGYRYDMSTQEAYALARCAVAHATHRDAYSGGSVDLFHVRESGWEHVSRSDACVLYVELQKLLEPEPEEDASHAHPEPATAHRAAEDRELSVGPGEVTPGDSRMPAGTETV

SEQ ID NO: 59531 - protein, 201 aa, Homo sapiens
MEYLIGIQGPDYVLVASDRVAASNIVQMKDDHDKMFKMSEKILLLCVGEAGDTVQFAEYIQKNVQLYKMRNGYELSPTAAANFTRRNLADCLRSRTPYHVNLLLAGYDEHEGPALYYMDYLAALAKAPFAAHGYGAFLTLSILDRYYTPTISRERAVELLRKCLEELQKRFILNLPTFSVRIIDKNGIHDLDNISFPKQGS

SEQ ID NO: 59532 - protein, 205 aa, Homo sapiens
MSIMSYNGGAVMAMKGKNCVAIAADRRFGIQAQMVTTDFQKIFPMGDRLYIGLAGLATDVQTVAQRLKFRLNLYELKEGRQIKPYTLMSMVANLLYEKRFGPYYTEPVIAGLDPKTFKPFICSLDLIGCPMVTDDFVVSGTCAEQMYGMCESLWEPNMDPDHLFETISQAMLNAVDRDAVSGMGVIVHIIEKDKITTRTLKARMD

SEQ ID NO: 59533 - protein, 264 aa, Homo sapiens
MEAFLGSRSGLWAGGPAPGQFYRIPSTPDSFMDPASALYRGPITRTQNPMVTGTSVLGVKFEGGVVIAADMLGSYGSLARFRNISRIMRVNNSTMLGASGDYADFQYLKQVLGQMVIDEELLGDGHSYSPRAIHSWLTRAMYSRRSKMNPLWNTMVIGGYADGESFLGYVDMLGVAYEAPSLATGYGAYLAQPLLREVLEKQPVLSQTEARDLVERCMRVLYYRDARSYNRFQIATVTEKGVEIEGPLSTETNWDIAHMISGFE

SEQ ID NO: 59534 - protein, 263 aa, Homo sapiens
MALASVLERPLPVNQRGFFGLGGRADLLDLGPGSLSDGLSLAAPGWGVPEEPGIEMLHGTTTLAFKFRHGVIVAADSRATAGAYIASQTVKKVIEINPYLLGTMAGGAADCSFWERLLARQCRIYELRNKERISVAAASKLLANMVYQYKGMGLSMGTMICGWDKRGPGLYYVDSEGNRISGATFSVGSGSVYAYGVMDRGYSYDLEVEQAYDLARRAIYQATYRDAYSGGAVNLYHVREDGWIRVSSDNVADLHEKYSGSTP

SEQ ID NO: 59535 - protein, 160 aa, Homo sapiens
MAGGAADCSFWERLLARQCRIYELRNKERISVAAASKLLANMVYQYKGMGLSMGTMICGWDKRGPGLYYVDSEGNRISGATFSVGSGSVYAYGVMDRGYSYDLEVEQAYDLARRAIYQATYRDAYSGGAVNLYHVREDGWIRVSSDNVADLHEKYSGSTP

SEQ ID NO: 59536 - protein, 203 aa, Homo sapiens
MALASVLERPLPVNQRGFFGLGGRADLLDLGPGSLSDGLSLAAPGWGVPEEPGIEMLHGTTTLAFKFRHGVIVAADSRATAGAYIASQTVKKVIEINPYLLGTMAGGAADCSFWERLLARQCRIYELRNKERISVAAASKLLANMVYQYKGMGLSMGTMICGWDKRGPVSEVLCLKPKSFGMYLFCGCAERIGNMARPLLRGQ

SEQ ID NO: 59537 - protein, 277 aa, Homo sapiens
MAAVSVYAPPVGGFSFDNCRRNAVLEADFAKRGYKLPKVRKTGTTIAGVVYKDGIVLGADTRATEGMVVADKNCSKIHFISPNIYCCGAGTAADTDMTTQLISSNLELHSLSTGRLPRVVTANRMLKQMLFRYQGYIGAALVLGGVDVTGPHLYSIYPHGSTDKLPYVTMGSGSLAAMAVFEDKFRPDMEEEEAKNLVSEAIAAGIFNDLGSGSNIDLCVISKNKLDFLRPYTVPNKKGTRLGRYRCEKGTTAVLTEKITPLEIEVLEETVQTMDTS

SEQ ID NO: 59538 - protein, 210 aa, Homo sapiens
MAAVSVYAPPVGGFSFDNCRRNAVLEADFAKRGYKLPKVRKTGTTIAGVVYKDGIVLGADTRATEGMVVADKNCSKIHFISPNIYCCGAGTAADTDMTTQLISSNLELHSLSTGRLPRVVTANRMLKQMLFRYQGYIGAALVLGGVDVTGPHLYSIYPHGSTDKLPYVTMVHCEEELFTENLFFIRQAEVVSEEAWGPSFAISLAVFLVA

SEQ ID NO: 59539 - protein, 142 aa, Homo sapiens
MAAVSVYAPPVGGFSFDNCRRNAVLEADFAKRGYKLPKVRKTGTTIAGVVYKDGIVLGADTRATEGMVVADKNCSKIHFISPNIYCCGAGTAADTDMTTQLISSNLELHSLSTGRLPRVVTANRMLKQMLFRFWLLGSNGCI

SEQ ID NO: 59540 - protein, 272 aa, Homo sapiens
MLIGTPTPRDTTPSSWLTSSLLVEAAPLDDTTLPTPVSSGCPGLEPTEFFQSLGGDGERNVQIEMAHGTTTLAFKFQHGVIAAVDSRASAGSYISALRVNKVIEINPYLLGTMSGCAADCQYWERLLAKECRLYYLRNGERISVSAASKLLSNMMCQYRGMGLSMGSMICGWDKKGPGLYYVDEHGTRLSGNMFSTGSGNTYAYGVMDSGYRPNLSPEEAYDLGRRAIAYATHRDSYSGGVVNMYHMKEDGWVKVESTDVSDLLHQYREANQ

SEQ ID NO: 59541 - protein, 276 aa, Homo sapiens
MALLDVCGAPRGQRPESALPVAGSGRRSDPGHYSFSMRSPELALPRGMQPTEFFQSLGGDGERNVQIEMAHGTTTLAFKFQHGVIAAVDSRASAGSYISALRVNKVIEINPYLLGTMSGCAADCQYWERLLAKECRLYYLRNGERISVSAASKLLSNMMCQYRGMGLSMGSMICGWDKKGPGLYYVDEHGTRLSGNMFSTGSGNTYAYGVMDSGYRPNLSPEEAYDLGRRAIAYATHRDSYSGGVVNMYHMKEDGWVKVESTDVSDLLHQYREANQ

SEQ ID NO: 59542 - protein, 276 aa, Homo sapiens; identical to SEQ ID NO: 59541

SEQ ID NO: 59543 - protein, 272 aa, Homo sapiens; identical to SEQ ID NO: 59540

SEQ ID NO: 59544 - protein, 252 aa, Homo sapiens
MALLDVCGAPRGQRPESALPVAGSGRRSDPGHYSFSMRSPELALPRGMQPTEFFQSLGGDGERNVQIEMAHGTTTLAFKFQHGVIAAVDSRASAGSYINCQYWERLLAKECRLYYLRNGERISVSAASKLLSNMMCQYRGMGLSMGSMICGWDKKGPGLYYVDEHGTRLSGNMFSTGSGNTYAYGVMDSGYRPNLSPEEAYDLGRRAIAYATHRDSYSGGVVNMYHMKEDGWVKVESTDVSDLLHQYREANQ

SEQ ID NO: 59545 - protein, 252 aa, Homo sapiens; identical to SEQ ID NO: 59544

SEQ ID NO: 59546 - protein, 272 aa, Homo sapiens; identical to SEQ ID NO: 59540

SEQ ID NO: 59547 - protein, 272 aa, Homo sapiens; identical to SEQ ID NO: 59540

SEQ ID NO: 59548 - protein, 276 aa, Homo sapiens; identical to SEQ ID NO: 59541

SEQ ID NO: 59549 - protein, 252 aa, Homo sapiens; identical to SEQ ID NO: 59544

SEQ ID NO: 59550 - protein, 252 aa, Homo sapiens; identical to SEQ ID NO: 59544

SEQ ID NO: 59551 - protein, 276 aa, Homo sapiens; identical to SEQ ID NO: 59541

SEQ ID NO: 59552 - protein, 272 aa, Homo sapiens; identical to SEQ ID NO: 59540

SEQ ID NO: 59553 - protein, 272 aa, Homo sapiens; identical to SEQ ID NO: 59540

SEQ ID NO: 59554 - protein, 276 aa, Homo sapiens; identical to SEQ ID NO: 59541

SEQ ID NO: 59555 - protein, 272 aa, Homo sapiens; identical to SEQ ID NO: 59540

SEQ ID NO: 59556 - protein, 276 aa, Homo sapiens
MALLDVCGAPRGQRPESALPVAGSGRRSDPGHYSFSMRSPELALPRGMKPTEFFQSLGGDGERNVQIEMAHGTTTLAFKFQHGVIAAVDSRASAGSYISALRVNKVIEINPYLLGTMSGCAADCQYWERLLAKECRLYYLRNGERISVSAASKLLSNMMCQYRGMGLSMGSMICGWDKKGPGLYYVDEHGTRLSGNMFSTGSGNTYAYGVMDSGYRPNLSPEEAYDLGRRAIAYATHRDSYSGGVVNMYHMKEDGWVKVESTDVSDLLHQYREANQ

SEQ ID NO: 59557 - protein, 252 aa, Homo sapiens; identical to SEQ ID NO: 59544

SEQ ID NO: 59558 - protein, 252 aa, Homo sapiens; identical to SEQ ID NO: 59544

SEQ ID NO: 59559 - protein, 252 aa, Homo sapiens
MALLDVCGAPRGQRPESALPVAGSGRRSDPGHYSFSMRSPELALPRGMKPTEFFQSLGGDGERNVQIEMAHGTTTLAFKFQHGVIAAVDSRASAGSYINCQYWERLLAKECRLYYLRNGERISVSAASKLLSNMMCQYRGMGLSMGSMICGWDKKGPGLYYVDEHGTRLSGNMFSTGSGNTYAYGVMDSGYRPNLSPEEAYDLGRRAIAYATHRDSYSGGVVNMYHMKEDGWVKVESTDVSDLLHQYREANQ

SEQ ID NO: 59560 - protein, 272 aa, Homo sapiens; identical to SEQ ID NO: 59540

SEQ ID NO: 59561 - protein, 276 aa, Homo sapiens; identical to SEQ ID NO: 59541

SEQ ID NO: 59562 - protein, 276 aa, Homo sapiens; identical to SEQ ID NO: 59541

SEQ ID NO: 59563 - protein, 252 aa, Homo sapiens; identical to SEQ ID NO: 59544

SEQ ID NO: 59564 - protein, 276 aa, Homo sapiens; identical to SEQ ID NO: 59541

SEQ ID NO: 59565 - protein, 219 aa, Homo sapiens
MLRAGAPTGDLPRAGEVHTGTTIMAVEFDGGVVMGSDSRVSAGEAVVNRVFDKLSPLHERIYCALSGSAADAQAVADMAAYQLELHGIELEEPPLVLAAANVVRNISYKYREDLSAHLMVAGWDQREGGQVYGTLGGMLTRQPFAIGGSGSTFIYGYVDAAYKPGMSPEECRRFTTDAIALAMSRDGSSGGVIYLVTITAAGVDHRVILGNELPKFYDE

SEQ ID NO: 59566 - protein, 219 aa, Homo sapiens; identical to SEQ ID NO: 59565

SEQ ID NO: 59567 - protein, 219 aa, Homo sapiens; identical to SEQ ID NO: 59565

SEQ ID NO: 59568 - protein, 196 aa, Homo sapiens
MAVEFDGGVVMGSDSRVSAGEAVVNRVFDKLSPLHERIYCALSGSAADAQAVADMAAYQLELHGIELEEPPLVLAAANVVRNISYKYREDLSAHLMVAGWDQREGGQVYGTLGGMLTRQPFAIGGSGSTFIYGYVDAAYKPGMSPEECRRFTTDAIALAMSRDGSSGGVIYLVTITAAGVDHRVILGNELPKFYDE

SEQ ID NO: 59569 - protein, 178 aa, Homo sapiens
MLRAGAPTGDLPRAGEVHTGTTIMAVEFDGGVVMGSDSRVSAGIELEEPPLVLAAANVVRNISYKYREDLSAHLMVAGWDQREGGQVYGTLGGMLTRQPFAIGGSGSTFIYGYVDAAYKPGMSPEECRRFTTDATSTKRRVCGYFLRTQKRENQNQRVHEYMCTGERSLSSSPLLSCS

SEQ ID NO: 59570 - protein, 196 aa, Homo sapiens; identical to SEQ ID NO: 59568

SEQ ID NO: 59571 - protein, 178 aa, Homo sapiens; identical to SEQ ID NO: 59569

SEQ ID NO: 59572 - protein, 196 aa, Homo sapiens; identical to SEQ ID NO: 59568

SEQ ID NO: 59573 - protein, 178 aa, Homo sapiens; identical to SEQ ID NO: 59569

SEQ ID NO: 59574 - protein, 131 aa, Homo sapiens
MAVEFDGGVVMGSDSRVSAGEAVVNRVFDKLSPLHERIYCALSGSAADAQAVADMAAYQLELHGIELEEPPLVLAAANVVRNISYKYREDLSAHLMVAGWDQREGGQVYGTLGGMLTRQPFAIGGSGSTFI

SEQ ID NO: 59575 - protein, 131 aa, Homo sapiens; identical to SEQ ID NO: 59574

SEQ ID NO: 59576 - protein, 131 aa, Homo sapiens; identical to SEQ ID NO: 59574

SEQ ID NO: 59577 - protein, 131 aa, Homo sapiens; identical to SEQ ID NO: 59574

SEQ ID NO: 59578 - protein, 178 aa, Homo sapiens
MLRAGAPTGDLPRAGEVHTGTTIMAVEFDGGVVMGSDSRVSAGIELEEPPLVLAAANVVRNISYKYREDLSAHLMVAGWDQREGGQVYGTLGGMLTRQPFAIGGSGSTFIYGYVDAAYKPGMSPEECRRFTTDATSTKRRVCGYFLRTQKRENQNQRVHEYMCTSERSLSSSPLLSCS

SEQ ID NO: 59579 - protein, 131 aa, Homo sapiens
MAVEFDGGVVMGSDSRVSAGEAVVNRVFDKLSPLHEHIYCALSGSAADAQAVADMAAYQLELHGIELEEPPLVLAAANVVRNISYKYREDLSAHLMVAGWDQREGGQVYGTLGGMLTRQPFAIGGSGSTFI

SEQ ID NO: 59580 - protein, 196 aa, Homo sapiens; identical to SEQ ID NO: 59568

SEQ ID NO: 59581 - protein, 219 aa, Homo sapiens; identical to SEQ ID NO: 59565

SEQ ID NO: 59582 - protein, 196 aa, Homo sapiens
MAVEFDGGVVMGSDSRVSAGEAVVNRVFDKLSPLHEHIYCALSGSAADAQAVADMAAYQLELHGIELEEPPLVLAAANVVRNISYKYREDLSAHLMVAGWDQREGGQVYGTLGGMLTRQPFAIGGSGSTFIYGYVDAAYKPGMSPEECRRFTTDAIALAMSRDGSSGGVIYLVTITAAGVDHRVILGNELPKFYDE

SEQ ID NO: 59583 - protein, 178 aa, Homo sapiens; identical to SEQ ID NO: 59578

SEQ ID NO: 59584 - protein, 178 aa, Homo sapiens; identical to SEQ ID NO: 59578

SEQ ID NO: 59585 - protein, 219 aa, Homo sapiens [sequence omitted]

SEQ ID NO: 59586 - protein, 196 aa, Homo sapiens; identical to SEQ ID NO: 59582

SEQ ID NO: 59587 - protein, 219 aa, Homo sapiens [sequence omitted]

SEQ ID NO: 59588 - protein, 131 aa, Homo sapiens; identical to SEQ ID NO: 59574

SEQ ID NO: 59589 - protein, 131 aa, Homo sapiens; identical to SEQ ID NO: 59579

SEQ ID NO: 59590 - protein, 196 aa, Homo sapiens; identical to SEQ ID NO: 59582

SEQ ID NO: 59591 - protein, 219 aa, Homo sapiens; identical to SEQ ID NO: 59565

SEQ ID NO: 59592 - protein, 178 aa, Homo sapiens; identical to SEQ ID NO: 59569

SEQ ID NO: 59593 - protein, 178 aa, Homo sapiens; identical to SEQ ID NO: 59569

SEQ ID NO: 59594 - protein, 196 aa, Homo sapiens; identical to SEQ ID NO: 59568

SEQ ID NO: 59595 - protein, 219 aa, Homo sapiens [sequence omitted]

SEQ ID NO: 59596 - protein, 154 aa, Homo sapiens
MLRAGAPTGDLPRAGEVHTGTTIMAVEFDGGVVMGSDSRVSAGIELEEPPLVLAAANVVRNISYKYREDLSAHLMVAGWDQREGGQVYGTLGGMLTRQPFAIGGSGSTFIYGYVDAAYKPGMSPEECRRFTTDGNQPSGRVPGEGFETWEGSRL

SEQ ID NO: 59597 - protein, 131 aa, Homo sapiens; identical to SEQ ID NO: 59579

SEQ ID NO: 59598 - protein, 154 aa, Homo sapiens; identical to SEQ ID NO: 59596

SEQ ID NO: 59599 - protein, 154 aa, Homo sapiens; identical to SEQ ID NO: 59596

SEQ ID NO: 59600 - protein, 154 aa, Homo sapiens; identical to SEQ ID NO: 59596

SEQ ID NO: 59601 - protein, 154 aa, Homo sapiens; identical to SEQ ID NO: 59596

SEQ ID NO: 59602 - protein, 154 aa, Homo sapiens; identical to SEQ ID NO: 59596

SEQ ID NO: 59603 - protein, 154 aa, Homo sapiens; identical to SEQ ID NO: 59596

SEQ ID NO: 59604 - protein, 154 aa, Homo sapiens; identical to SEQ ID NO: 59596

SEQ ID NO: 59605 - protein, 141 aa, Homo sapiens
MNARGLGSELKDSIPVTELSASGPFESHDLLRKGFSCVKNELLPSHPLELSEKNFQLNQDKMNFSTLRNIQGLFAPLKLQMEFKAVQQVQRLPFLSSSNLSLDVLRGNDETIGFEDILNDPSQSEVMGEPHLMVEYKLGLL

SEQ ID NO: 59606 - protein, 156 aa, Homo sapiens
MPMAGLLKGLVRQLERFSVQQQASKMPPKGKSGSGKAGKGGAASGSDSADKKAQGPKGGGNAVKVRHILCEKHGKIMEAMEKLKSGMRFNEVAAQYSEDKARQGGDLGWMTRGSMVGPFQEAAFALPVSGMDKPVFTDPPVKTKFGYHIIMVEGRK

SEQ ID NO: 59607 - protein, 133 aa, Homo sapiens
MPMAGLLKGLVRQLERFSVQQQASKMPPKGKSGSGKAGKGGAASGSDSADKKAQGPKGGGNAVKVRHILCEKHGKIMEAMEKLKSGMRFNEVAAQYSEDKARQGIPSLQQHAGHHRDLRSTLISLVSYLQTTP

SEQ ID NO: 59608 - protein, 353 aa, Homo sapiens
MAAAEAANCIMEVSCGQAESSEKPNAEDMTSKDYYFDSYAHFGIHEEMLKDEVRTLTYRNSMFHNRHLFKDKVVLDVGSGTGILCMFAAKAGARKVIGIECSSISDYAVKIVKANKLDHVVTIIKGKVEEVELPVEKVDIIISEWMGYCLFYESMLNTVLYARDKWLAPDGLIFPDRATLYVTAIEDRQYKDYKIHWWENVYGFDMSCIKDVAIKEPLVDVVDPKQLVTNACLIKEVDIYTVKVEDLTFTSPFCLQVKRNDYVHALVAYFNIEFTRCHKRTGFSTSPESPYTHWKQTVFYMEDYLTVKTGEEIFGTIGMRPNAKNNRDLDFTIDLDFKGQLCELSCSTDYRMR

SEQ ID NO: 59609 - protein, 293 aa, Homo sapiens
MVGVAEVSCGQAESSEKPNAEDMTSKDYYFDSYAHFGIHEEMLKDEVRTLTYRNSMFHNRHLFKDKVVLDVGSGTGILCMFAAKAGARKVIGIECSSISDYAVKIVKANKLDHVVTIIKGKVEEVELPVEKVDIIISEWMGYCLFYESMLNTVLYARDKWLAPDGLIFPDRATLYVTAIEDRQYKDYKIHWWENVYGFDMSCIKDVAIKEPLVDVVDPKQLVTNACLIKVRGWAWPGAPWVETKERPSPGPGMGLWGPECWPEVSEPDLPARGGARGPGKTLRPLNIFVSAAV

SEQ ID NO: 59610 - protein, 371 aa, Homo sapiens
MAAAEAANCIMENFVATLANGMSLQPPLEEVSCGQAESSEKPNAEDMTSKDYYFDSYAHFGIHEEMLKDEVRTLTYRNSMFHNRHLFKDKVVLDVGSGTGILCMFAAKAGARKVIGIECSSISDYAVKIVKANKLDHVVTIIKGKVEEVELPVEKVDIIISEWMGYCLFYESMLNTVLYARDKWLAPDGLIFPDRATLYVTAIEDRQYKDYKIHWWENVYGFDMSCIKDVAIKEPLVDVVDPKQLVTNACLIKEVDIYTVKVEDLTFTSPFCLQVKRNDYVHALVAYFNIEFTRCHKRTGFSTSPESPYTHWKQTVFYMEDYLTVKTGEEIFGTIGMRPNAKNNRDLDFTIDLDFKGQLCELSCSTDYRMR

SEQ ID NO: 59611 - protein, 160 aa, Homo sapiens
MTSKDYYFDSYAHFGIHEEMLKDEVRTLTYRNSMFHNRHLFKDKVVLDVGSGTGILCMFAAKAGARKVIGIECSSISDYAVKIVKANKLDHVVTIIKGKVEEVELPVEKVDIIISEWMGYCLFYESMLNTVLYARDKWLAPDGLIFPDRATLYVTAIEDR

SEQ ID NO: 59612 - protein, 205 aa, Homo sapiens
MTSKDYYFDSYAHFGIHEEMLKDEVRTLTYRNSMFHNRHLFKDKVVLDVGSGTGILCMFAAKAGARKVIGIECSSISDYAVKIVKANKLDHVVTIIKGKVEEVELPVEKVDIIISEWMGYCLFYESMLNTVLYARDKWLAPDGLIFPDRATLYVTAIEDRQYKDYKIHWWENVYGFDMSCIKDVAIKEPLVDVVDPKQLVTNACL

SEQ ID NO: 59613 - protein, 160 aa, Homo sapiens; identical to SEQ ID NO: 59611

SEQ ID NO: 59614 - protein, 209 aa, Homo sapiens
MTSKDYYFDSYAHFGIHEEMLKDEVRTLTYRNSMFHNRHLFKDKVVLDVGSGTGILCMFAAKAGARKVIGIECSSISDYAVKIVKANKLDHVVTIIKGKVEEVELPVEKVDIIISEWMGYCLFYESMLNTVLYARDKWLAPDGLIFPDRATLYVTAIEDRQYKDYKIHWWENVYGFDMSCIKDVAIKEPLVDVVDPKQLVTNACLIKVR

SEQ ID NO: 59615 - protein, 228 aa, Homo sapiens
MATSGDCPRSESQGEEPAECSEAGLLQEGVQPEEFVAIADYAATDETQLSFLRGEKILILRQTTADWWWGERAGCCGYIPANHVGKHVDEYDPEDTWQDEEYFGSYGTLKLHLEMLADQPRTTKYHSVILQNKESLTDKVILDVGCGTGIISLFCAHYARPRAVYAVEASEMAQHTGQLVLQNGFADIITVYQQKVEDVVLPEKVDVLVSEWMGTCLLVGEKVFPIWR

SEQ ID NO: 59616 - protein, 284 aa, Homo sapiens
MATSGDCPRSESQGEEPAECSEAGLLQEGVQPEEFVAIADYAATDETQLSFLRGEKILILRQTTADWWWGERAGCCGYIPANHVGKHVDEYDPEDTWQDEEYFGSYGTLKLHLEMLADQPRTTKYHSVILQNKESLTDKVILDVGCGTGIISLFCAHYARPRAVYAVEASEMAQHTGQLVLQNGFADIITVYQQKVEDVVLPEKVDVLVSEWMGTCLLAAPLLSCRILPCTCASGPLHVLLACCLPLPCTCASVPLHVLLACCLPVLRAPQPSGLHLSWPIFLL

SEQ ID NO: 59617 - protein, 433 aa, Homo sapiens
MATSGDCPRSESQGEEPAECSEAGLLQEGVQPEEFVAIADYAATDETQLSFLRGEKILILRQTTADWWWGERAGCCGYIPANHVGKHVDEYDPEDTWQDEEYFGSYGTLKLHLEMLADQPRTTKYHSVILQNKESLTDKVILDVGCGTGIISLFCAHYARPRAVYAVEASEMAQHTGQLVLQNGFADIITVYQQKVEDVVLPEKVDVLVSEWMGTCLLFEFMIESILYARDAWLKEDGVIWPTMAALHLVPCSADKDYRSKVLFWDNAYEFNLSALKSLAVKEFFSKPKYNHILKPEDCLSEPCTILQLDMRTVQISDLETLRGELRFDIRKAGTLHGFTAWFSVHFQSLQEGQPPQVLSTGPFHPTTHWKQTLFMMDDPVPVHTGDVVTGSVVLQRNPVWRRHMSVALSWAVTSRQDPTSQKVGEKVFPIWR

SEQ ID NO: 59618 - protein, 161 aa, Homo sapiens
MLADQPRTTKYHSVILQNKESLRIKSSWTWAVGLGSSVSSVHTMRGLERVYAVEASEMAQHTGQLVLQNGFADIITVYQQKVEDVVLPEKVDVLVSEWMGTCLLFEFMIESILYARDAWLKETGSFGPPWLRCTLCPAVLIRIIVARCSSGTTRTSSTSAL

SEQ ID NO: 59619 - protein, 433 aa, Homo sapiens; identical to SEQ ID NO: 59617

SEQ ID NO: 59620 - protein, 433 aa, Homo sapiens; identical to SEQ ID NO: 59617

SEQ ID NO: 59621 - protein, 331 aa, Homo sapiens
MATSGDCPRSESQGEEPAECSEAGLLQEGVQPEEFVAIADYAATDETQLSFLRGEKILILRQTTADWWWGERAGCCGYIPANHVGKHVDEYDPEDTWQDEEYFGSYGTLKLHLEMLADQPRTTKYHSVILQNKESLTDKVILDVGCGTGIISLFCAHYARPRAVYAVEASEMAQHTGQLVLQNGFADIITVYQQKVEDVVLPEKVDVLVSEWMGTCLLTLRGELRFDIRKAGTLHGFTAWFSVHFQSLQEGQPPQVLSTGPFHPTTHWKQTLFMMDDPVPVHTGDVVTGSVVLQRNPVWRRHMSVALSWAVTSRQDPTSQKVGEKVFPIWR

SEQ ID NO: 59622 - protein, 289 aa, Homo sapiens
MATSGDCPRSESQGEEPAECSEAGLLQEGVQPEEFVAIADYAATDETQLSFLRGEKILILRQTTADWWWGERAGCCGYIPANHVGKHVDEYDPEDTWQDEEYFGSYGTLKLHLEMLADQPRTTKYHSVILQNKESLTDKVILDVGCGTGIISLFCAHYARPRAVYAVEASEMAQHTGQLVLQNGFADIITVYQQKVEDVVLPEKVDVLVSEWMGTCLLFEFMIESILYARDAWLKEDGVIWPTMAALHLVPCSADKDYRSKVLFWDNAYEFNLSALKLEKKSSPSGDDS

SEQ ID NO: 59623 - protein, 301 aa, Homo sapiens
MATSGDCPRSESQGEEPAECSEAGLLQEGVQPEEFVAIADYAATDETQLSFLRGEKILILRQTTADWWWGERAGCCGYIPANHVGKHVDEYDPEDTWQDEEYFGSYGTLKLHLEMLADQPRTTKYHSVILQNKESLTDKVILDVGCGTGIISLFCAHYARPRAVYAVEASEMAQHTGQLVLQNGFADIITVYQQKVEDVVLPEKVDVLVSEWMGTCLLHHTLEADAVHDGRPSPCPYRRRGHGFSCVAEKPSVEKAHVCGSELGCHFQTRPHISKSWRKSLPHLEMTVDALFGKQCAYLEG

SEQ ID NO: 59624 - protein, 316 aa, Homo sapiens
MIADRVRTDAYRLGILRNWAALRGKTVLDVGAGTGILSIFCAQAGARRVYAVEASAIWQQAREVVRFNGLEDRVHVLPGPVETVELPEQVDAIVSEWMGYGLLHESMLSSVLHARTKWLKEGGLLLPASAELFIAPISDQMLEWRLGFWSQVKQHYGVDMSCLEGFATRCLMGHSEIVVQGLSGEDVLARPQRFAQLELSRAGLEQELEAGVGGRFRCSCYGSAPMHGFAIWFQVTFPGGESEKPLVLSTSPFHPATHWKQALLYLNEPVQVEQDTDVSGEITLLPSRDNPRRLRVLLRYKVGDQEEKTKDFAMED

SEQ ID NO: 59625 - protein, 375 aa, Homo sapiens
MSQPKKRKLESGGGGEGGEGTEEEDGAEREAALERPRRTKRERDQLYYECYSDVSVHEEMIADRVRTDAYRLGILRNWAALRGKTVLDVGAGTGILSIFCAQAGARRVYAVEASAIWQQAREVVRFNGLEDRVHVLPGPVETVELPEQVDAIVSEWMGYGLLHESMLSSVLHARTKWLKEGGLLLPASAELFIAPISDQMLEWRLGFWSQVKQHYGVDMSCLEGFATRCLMGHSEIVVQGLSGEDVLARPQRFAQLELSRAGLEQELEAGVGGRFRCSCYGSAPMHGFAIWFQVTFPGGESEKPLVLSTSPFHPATHWKQALLYLNEPVQVEQDTDVSGEITLLPSRDNPRRLRVLLRYKVGDQEEKTKDFAMED

SEQ ID NO: 59626 - protein, 311 aa, Homo sapiens
MARSGRRPWSDPGGLSGAVQRAGGPGARPAGTSGDCRVAGTGGCHRERVDGLRTPARVHAELRPPRANQVAEGGRSSPAGLRRALHSPHQRPDAGMAPGLLEPGEAALWCGHELPGGLRHALSHGPLGDRCAGIVRRGRAGPAAALCSARALPRRLGAGAGGRSGRALPLQLLWLGAHAWLCHLVPGDLPWRGVGETPGAVHLAFSPGHSLETGAPLPERAGASGARHGRFRRDHAAALPGQPPSPARAAALQSGRPGGEDQRLCHGGLSVAFSPSYLPKQPDLRGRGVARSEGKGRSHVQVGGISPPFPS

SEQ ID NO: 59627 - protein, 238 aa, Homo sapiens
MLTTLLPILLLSGWAFCSQDASDGLQRLHMLQISYFRDPYHVWYQGNASLGGHLTHVLEGPDTNTTIIQLQPLQEPESWARTQSGLQSYLLQFHGLVRLVHQERTLAFPLTIRCFLGCELPPEGSRAHVFFEVAVNGSSFVSFRPERALWQADTQVTSGVVTFTLQQLNAYNRTRYELREFLEDTCVQYVQKHISAENTKGSQTSRSYTSLVLGVLVGSFIIAGVAVGIFLCTGGRRC

SEQ ID NO: 59628 - protein, 238 aa, Homo sapiens; identical to SEQ ID NO: 59627

SEQ ID NO: 59629 - protein, 1516 aa, Homo sapiens
MDNQQDKAIVASANGENTLINGVKENDSEDQDVAMKSFAALEAAAPIQPTPVAQKETLMYPRGLLPLPSKKPCMQSPPSPLGLIEAPEHAANSASVNAISLTSGIAKGLNTWSLPNECEKAPFAIMEPAGMSALNGDCLMQPSRTCLGCFMESKDAVDPEPGISLKVGDLNRDYETCAVSDIGIQCINAGENMKYGEQLLSDQLLGFPLHKSRAGDRRETEKPDIDLEDPAQKSYYEALLLDKCNTEEALLANSNQDWGYFETFISESKIELLDLCSKNELSVNLFSEEDVDNYMFDDDESTLGSDVCSLKIRYESFQDNVRDKTTLLMQEDAQFNFFPSVFTTCPKRESKSGALKQSSDFSQFKVPDVSIIWGEEDKNLDKKKGKEEGQEDKGVEKKDGKDNGEKPALNKPCSGTEVEQLKNPKQGHLANSLETSGSFSDDSSFIEISYDAMGEIKDCSRYMARDTNSGSSSSQQNYGLRAKRKVRYSEDYLYDVDSLEGEKVNERKEWLPVGSKEEDDDEWCPKKRRKVTRKEPPVIIKYIIINRFKGEKNMLVKLGKVDASETTVNLSENQLNKYAKLAPLKGFWQKKKKQRNTNTDSIKTPFSQKQSFEPGSFEVSFLPPARKRKSKLGNRHRIQRIPSIEISASSKQISLCNDQRHASNHKEDGGLKGTLKSAPLGAPSCANGSHLNDITGPDSVKVKAQDTEFKGPERKVLNKIKFKSEARLKSKKVKAAGQESKPIVQMSPLLENQSSKANLKNEVIPGTSNSSRLSEFHEAKAAKSSTFLPTTCSSEMPLSSANVTTNIPVIPGGYLQTLLDASDLSNNTSISYFSHHSPEQNEGSLTQTEKSFVPLQPTQDCVLTSSSDSELQQSSHNFKMESSNYRNVWPNKATSGTQEFMAEVSREIAPTQSSEFGASQVVSMENNLTPTTYNPICLNSGGSNCNKVLYDSMQDTQLPSDDSYQLCHFNNGEICFPFQQGPVNMDDGRLFSFDSMAPLSVSSSNYCSLSLKSCEKDGDDDITDDFLAHCSPKLVIQQSIDEIAPLKESTDLLDISNFTPDKFRHSSLSEMSPPDTPSLSPQITRCESMKTLGTLKGFQEGVPGPLDSVEKIKWDCSTLSRQVQMEDGFTLNNHQFQFHMFNDEDSVSLLQKNPCLSTFNDPSGQISTNNKVSKSRKKSSPSKSGAMNQSSSQKNTRKKSLKGNNKGIEKPPGKNSRQVPKSTKKGKYMAAINGEKMQIGIGRGGSQTNTISSTGKTLAECIQHGGPMASMKMPSQKGLSGDWALGKESSPGWSDMSMGTNTNSLLDDDQREFQEPSYILSNIASGMADVQRFMMASIEPLWEPMEHHGDPNIFYSPESNSLKLKTLKILAGTPQESKKKINSGSQGATKNHRSIKGVSKSNGKTAIGDPGRANMPGYNEDSRSTFFDKKYSNMSTLGNNGPTHKKLYRHKSSSKALRDEKCKGKHMEREQVHKDESGTASFEKLRDSDYNLLKAETTFWVLPVFEEETRIFQKDI

SEQ ID NO: 59630 - protein, 1361 aa, Homo sapiens
MGAAGRQDFLFKAMLTISWLTLTCFPGATSTVAAGCPDQSPELQPWNPGHDQDHHVHIGQGKTLLLTSSATVYSIHISEGGKLVIKDHDEPIVLRTRHILIDNGGELHAGSALCPFQGNFTIILYGRADEGIQPDPYYGLKYIGVGKGGALELHGQKKLSWTFLNKTLHPGGMAEGGYFFERSWGHRGVIVHVIDPKSGTVIHSDRFDTYRSKKESERLVQYLNAVPDGRILSVAVNDEGSRNLDDMARKAMTKLGSKHFLHLGFRHPWSFLTVKGNPSSSVEDHIEYHGHRGSAAARVFKLFQTEHGEYFNVSLSSEWVQDVEWTEWFDHDKVSQTKGGEKISDLWKAHPGKICNRPIDIQATTMDGVNLSTEVVYKKGQDYRFACYDRGRACRSYRVRFLCGKPVRPKLTVTIDTNVNSTILNLEDNVQSWKPGDTLVIASTDYSMYQAEEFQVLPCRSCAPNQVKVAGKPMYLHIGEEIDGVDMRAEVGLLSRNIIVMGEMEDKCYPYRNHICNFFDFDTFGGHIKFALGFKAAHLEGTELKHMGQQLVGQYPIHFHLAGDVDERGGYDPPTYIRDLSIHHTFSRCVTVHGSNGLLIKDVVGYNSLGHCFFTEDGPEERNTFDHCLGLLVKSGTLLPSDRDSKMCKMITEDSYPGYIPKPRQDCNAVSTFWMANPNNNLINCAAAGSEETGFWFIFHHVPTGPSVGMYSPGYSEHIPLGKFYNNRAHSNYRAGMIIDNGVKTTEASAKDKRPFLSIISARYSPHQDADPLKPREPAIIRHFIAYKNQDHGAWLRGGDVWLDSCRFADNGIGLTLASGGTFPYDDGSKQEIKNSLFVGESGNVGTEMMDNRIWGPGGLDHSGRTLPIGQNFPIRGIQLYDGPINIQNCTFRKFVALEGRHTSALAFRLNNAWQSCPHNNVTGIAFEDVPITSRVFFGEPGPWFNQLDMDGDKTSVFHDVDGSVSEYPGSYLTKNDNWLVRHPDCINVPDWRGAICSGCYAQMYIQAYKTSNLRMKIIKNDFPSHPLYLEGALTRSTHYQQYQPVVTLQKGYTIHWDQTAPAELAIWLINFNKGDWIRVGLCYPRGTTFSILSDVHNRLLKQTSKTGVFVRTLQMDKVEQSYPGRSHYYWDEDSGLLFLKLKAQNEREKFAFCSMKGCERIKIKALIPKNAGVSDCTATAYPKFTERAVVDVPMPKKLFGSQLKTKDHFLEVKMESSKQHFFHLWNDFAYIEVDGKKYPSSEDGIQVVVIDGNQGRVVSHTSFRNSILQGIPWQLFNYVATIPDNSIVLMASKGRYVSRGPWTRVLEKLGADRGLKLKEQMAFVGFKGSFRPIWVTLDTEDHKAKIFQVVPIPVVKKKKL

SEQ ID NO: 59631 - protein, 1884 aa, Homo sapiens
MHCTNPALIFLIDELSPEQHNLSLYSMELVLKKSTGHSAAQVALTETAPGSQHSSPLHVTAPPSATTFDTAFFNQGKQTKSTADPSIFVATYVSVTSKEVAVNDDEMDNFLPDTHWTTPRMVSPIQYITVSPPGLPREALEPMLTPSLPMVSLQDEEVTSGWQNTTRQPAAYAESASHFHTFRSAFRTSEGIVPTPGRNLVLYPTDAYSHLSSRTLPEIVASLTEGVETTLFLSSRSLMPQPLGDGITIPLPSLGEVSQPPEEVWATSADRYTDVTTVLSQSLEETISPRTYPTVTASHAALAFSRTHSPLLSTPLAFASSASPTDVSSNPFLPSDSSKTSELHSNSALPGPVDNTHILSPVSSFRPYTWCAACTVPSPQQVLATSLMEKDVGSGDGAETLCMTVLEESSISLMSSVVADFSEFEEDPQVFNTLFPSRPIVPLSSRSMEISETSVGISAEVDMSSVTTTQVPPAHGRLSVPASLDPTAGSLSVAETQVTPSSVTTAFFSVITSILLDSSFSVIANKNTPSLAVRDPSVFTPYSLVPSVESSLFSDQERSSFSEHKPRGALDFASSFFSTPPLELSGSISSPSEAPASLSLMPSDLSPFTSQSFSPLVETFTLFDSSDLQSSQLSLPSSTNLEFSQLQPSSELPLNTIMLLPSRSEVSPWSSFPSDSLEFVEASTVSLTDSEAHFTSAFIETTSYLESSLISHESAVTALVPPGSESFDILTAGIQATSPLTTVHTTPILTESSLFSTLTPPDDQISALDGHVSVLASFSKAIPTGTVLITDAYLPSGSSFVSEATPFPLPTELTVVGPSLTPTEVPLNTSTEVSTTSTGAATGGPLDSTLMGDAASQSPPESSAAPPLPSLRPVTAFTLEATVDTPTLATAKPPYVCDITVPDAYLITTVLARRAVQEYIITAIKEVLRIHFNRAVELKVYELFTDFTFLVTSGPFVYTAISVINVLINSKLVRDQTPLILSVKPSFLVPESRFQVQTVLQFVPPSVDTGFCNFTQRIEKGLMTALFEVRKHHQGTYNLTVQILNITISSSRVTPRRGPVNIIFAVKSTQGFLNGSEVSELLRNLSVVEFSFYLGYPVLQIAEPFQYPQLNLSQLLKSSWVRTVLLGVMEKQLQNEVFQAEMERKLAQLLSEVSTRRRMWRRATVAAGNSVVQVVNVSRLEGDDNPVQLIYFVEDQDGERLSAVKSSDLINKMDLQRAAIILGYRIQGVIAQPVDRVKRPSPESQSNNLWVIVGVVIPVLVVMVIVVILYWKLCRTDKLDFQPDTVANIQQRQKLQIPSVKGFDFAKQHLGQHNKDDILIIHEPAPLPGPLKDHTTPSENGDVPSPKSKIPSKNVRHRGRVSPSDADSTVSEESSERDAGDKTPGAVNDGRSHRAPQSGPPLPSSGNEQHSSASIFEHVDRISRPPEASRRVPSKIQLIAMQPIPAPPVQRPSPADRVAESNKINKEIQTALRHKSEIEHHRNKIRLRAKRRGHYEFPVVDDLSSGDTKERHRVYRRAQMQIDKILDPTASVPSVFIEPRKSSRIKRSPKPRRKHQVNGCPADAEKDRLITTDSDGTYRRPPGVHNSAYIGCPSDPDLPADVQTPSSVELGRYPALPFPASQYIPPQPSIEEARQTMHSLLDDAFALVAPSSQPASTAGVGPGVPPGLPANSTPSQEERRATQWGSFYSPAQTANNPCSRYEDYGMTPPTGPLPRPGFGPGLLQSTELVPPDPQQPQASAEAPFAARGIYSEEMPSVARPRPVGGTTGSQIQHLTQVGIASRIGAQPVEIPPSRGSQYGGPGWPSYGEDEAGRREAVPRTSGREPSAPSGNLPHRGLQGPGLGYPTSSTEDLQPGHSSASLIKAIREELLRLSQKQSTVQNFHS

SEQ ID NO: 59632 - protein, 411 aa, Homo sapiens
METPEVPVGSLIDFGPEAPTSSPLEAPPPVLQDGDGSLGDGASESETTESADSENDMGESPSHPSWDQDRRSSSNESFSSNQSTESTQDEETLALRDFMRGYVEKIFSGGEDLDQEEKAKFGEYCSSENGKGREWFARYVSAQRCNSKCVSEATFYRLVQSFAVVLFECHQMDDFGPAKNLMTMCFTYYHIGKPQLLPPESREKPAGSIDSYLKSANSWLAEKKDIAERLLKNTSARTENVKGFFGGLETKLKGPLARRNEEDENKPQEKRPRAVTAYSPEDEKKGEKIYLYTHLKQQPIWHTLRFWNAAFFDAVHCERTKRSPTTRGDAGEEEEKREKWCHMTQEERDDSLRFNENITFGQLGTFTHNMLAFGLNKKLCNDFLKKQAVIGNLDEEQYKLLSDHIEQMATE

SEQ ID NO: 59633 - protein, 5005 aa, Homo sapiens
MDQRKNESIVPSITQLEDFLTEHNSNVVWLLVATILSCGWIIYLTYYNSRNVGLILTLVLNRLYKHGYIHIGSFSFSVLSGKVMVREIYYITEDMSIRIQDGFIIFRWWKMYNPKQKQHDPKAETRLYITVNDFEFHVYNRSDLYGRLQELFGLEPTIIPPKKDDDKTREIGRTRTQSKIERVKVKTESQDPTSSWRSLIPVIKVNVSTGRLAFGNHYQPQTLCINFDDAFLTYTTKPPSSHLDQFMHIVKGKLENVRVMLVPSPRYVGLQNDEPPRLMGEGFVVMQSNDVDIYYYMDEPGLVPEETEENIEGEMSSEDCKLQDLPPCWGLDIVCGKGTDFNYGPWADRQRDCLWKFFFPPDYQVLKVSEIAQPGRPRQILAFELRMNIIADATIDLLFTKNRETNAVHVNVGAGSYLEINIPMTVEENGYTPAIKGQLLHVDATTSMQYRTLLEAEMLAFHINASYPRIWNMPQTWQCELEVYKATYHFIFAQKNFFTDLIQDWSSDSPPDIFSFVPYTWNFKIMFHQFEMIWAANQHNWIDCSTKQQENVYLAACGETLNIDFSLPFTDFVPATCNTKFSLRGEDVDLHLFLPDCHPSKYSLFMLVKNCHPNKMIHDTGIPAECQSGQKTVKPKWRNVTQEKSGWVECWTVPSVMLTIDYTWHPIYPQKADEQLKQSLSEMEETMLSVLRPSQKTSDRVVSSPSTSSRPPIDPSELPPDKLHVEMELSPDSQITLYGPLLNAFLCIKENYFGEDDMYMDFEEVISSPVLSLSTSSSSGWTAVGMENDKKENEGSAKSIHPLALRPWDITVLVNLYKVHGRLPVHGTTDGPECPTAFLERLCFEMKKGFRETMLQLILSPLNVFVSDNYQQRPPVDEVLREGHINLSGLQLRAHAMFSAEGLPLGSDSLEYAWLIDVQAGSLTAKVTAPQLACLLEWGQTFVFHVVCREYELERPKSVIICQHGIDRRFCESKLSCIPGPCPTSDDLKYTMIRLAVDGADIYIVEHGCATNIKMGAIRVANCNLHNQSVGEGISAAIQDFQVRQYIEQLNNCRIGLQPAVLRRAYWLEAGSANLGLITVDIALAADHHSKHEAQRHFLETHDARTKRLWFLWPDDILKNKRCRNKCGCLGGCRFFGGTVTGLDFFKLEELTPSSSSAFSSTSAESDMYYGQSLLQPGEWIITKEIPKIIDGNVNGMKRKEWENKSVGIEVERKTQHLSLQVPLRSHSSSSSSEENSSSSAAQPLLAGEKESPSSVADDHLVQKEFLHGTKRDDGQASIPTEISGNSPVSPNTQDKSVGQSPLRSPLKRQASVCSTRLGSTKSLTAAFYGDKQPVTVGVQFSSDVSRSDENVLDSPKQRRSFGSFPYTPSADSNSFHQYRSMDSSMSMADSEAYFSAAEEFEPISSDEGPGTYPGRKKKKKQTQQIDYSRGSIYHSVEGPLTGHGESIQDSRTLPFKTHPSQASFVSALGGEDDVIEHLYIVEGEKTVESEQITPQQPVMNCYQTYLTQFQVINWSVKHPTNKRTSKSSLHRPLDLDTPTSEESSSSFEQLSVPTFKVIKQGLTANSLLDRGMQLSGSTSNTPYTPLEKKLADNTDDETLTEEWTLDQPVSQTRTTAIVEVKGTVDIVLTPLVAEALDRYIEAMVHCASTRHPAAIVDDLHAKVLREAVQNSKTTFSENLSSKQDIRGTKTEQSTIGTTNQGQAQTNLTMKQDNVTIKGLQTNVSIPKVNLCLLQASVEESPTTAPSRSVTHVSLVALCFDRIATQVRMNRGVVEETSNNAEPGRTSNFDRYVHATKMQPQSSGSLRSNAGAEKGKEIAAKLNIHRVHGQLRGLDTTDIGTCAITAIPFEKSKVLFTLEELDEFTFVDETDQQAVPDVTRIGPSQEKWGWIMFECGLENLTIKGGRQSGAVLYNSFGIMGKASDTERGGVLTSNNSSDSPTGSGYNTDVSDDNLPCDRTSPSSDLNGNSVSDEQDEGVESDDLKKDLPLMPPPPDSCSMKLTIKEIWFSFAAPTNVRSHTHAFSRQLNLLSTATPAVGAWLVPIDQLKSSLNKLETEGTLRICAVMGCIMTEALENKSVHFPLRSKYNRLTKVARFLQENPSCLLCNILHHYLHQANYSIIDDATMSDGLPALVTLKKGLVALARQWMKFIVVTPAFKGVSLHRPAQPLKPQIAMDHEHEDGLGLDNGGGLQSDTSADGAEFEFDAATVSEHTMLLEGTANRPPPGSSGPVTGAEIMRKLSKTHTHSDSALKIKGIHPYHSLSYTSGDTATDSPVHVGRAGMPVKDSPRKESLLSYLTGSFPSLHNLLEGTPQRSSAAVKSSSLTRTGNTVATDMLSEHPLLSEPSSVSFYNWMSNAVGNRGSVLQESPVTKSGHNSLPTGVAPNLPTIPSASDFNTVLSSDQNTLDGTHSQHSTSQDDVAGVEEANQGFPAVQLADAQVVFKPLLSHTGIQSQDTMPFCYRMYFGEHLSFSGTLDCLRADIVDSDTAKERKGKRARRQGHVNLPPLEFKPALMLGTFSISAVVMEKSVCTPQNSTSALSFHDLSKRYYNTFHCNFTISCQSISQHVDMALVRLIHQFSTMIDDIKATQTDIKLSRYTAGSASPTPTFKTRKHRDFRSSDFSRSSRGSLNGGNRVNNAKNKRTNNENNKKESRNKNSLGRSERRTSKVSRKGSKDVVDHMTIHMDDSDSITVSEQSEPSAECWQNMYKLLNFYSLISDPTGILEKSSETFGPAGVRSPTEPTCKVVFENEQDNSSLTKTQRKRSLVTSEPQHVTLIVFGIGMVNRTHLEADIGGLTMESELKRIHGSFTLKEKMKDVLHQKMTETCATAHIGGVNIVLLEGITPNIQLEDFPTSPTSTAKQEFLTVVKCSIAKSQALYSAQRGLKTNNAAVFKVGAISINIPQHPATLHSMMVRSSHQLSKQISDLIRQPSTAPQPVKEDIATPLPSEKTPTSVNQTPVETNEFPQLPEGLEKKPIVLKFSAMLDGIAIGAALLPSLKAEYKMGRMRSHGMTGAQTRFTFELPNHRLRFTSKVSATDMSTIPPSASLNLPPVTMSGKYIMEEHDSYSDQVWSIDELPSKQGYYLQGNYLRCVAEVGSFEHNLTTDLLNHLVFVQKVFMKEVNEVIQKVSGGEQPIPLWNEHDGTADGDKPKILLYSLNLQFKGIQVTATTPSMRAVRFETGLIELELSNRLQTKASPGSSSYLKLFGKCQVDLNLALGQIVKHQVYEEAGSDFHQVAYFKTRIGLRNALREEISGSSDREAVLITLNRPIVYAQPVAFDRAVLFWLNYKAAYDNWNEQRMALHKDIHMATKEVVDMLPGIQQTSAQAFGTLFLQLTVNDLGICLPITNTAQSNHTGDLDTGSALVLTIESTLITACSSESLVSKGHFKNFCIRFADGFETSWDDWKPEIHGDLVMNACVVPDGTYEVCSRTTGQAAAESSSAGTWTLNVLWKMCGIDVHMDPNIGKRLNALGNTLTTLTGEEDIDDIADLNSVNIADLSDEDEVDTMSPTIHTEATDYRRQAASASQPGELRGRKIMKRIVDIRELNEQAKVIDDLKKLGASEGTINQEIQRYQQLESVAVNDIRRDVRKKLRRSSMRAASLKDKWGLSYKPSYSRSKSISASGRPPLKRMERASSRVGETEELPEIRVDAASPGPRVTFNIQDTFPEETELDLLSVTIEGPSHYSSNSEGSCSVFSSPKTPGGFSPGIPFQTEEGRRDDSLSSTSEDSEKDEKDEDHERERFYIYRKPSHTSRKKATGFAAVHQLFTERWPTTPVNRSLSGTATERNIDFELDIRVEIDSGKCVLHPTTLLQEHDDISLRRSYDRSSRSLDQDSPSKKKKFQTNYASTTHLMTGKKVPSSLQTKPSDLETTVFYIPGVDVKLHYNSKTLKTESPNASRGSSLPRTLSKESKLYGMKDSATSPPSPPLPSTVQSKTNTLLPPQPPPIPAAKGKGSGGVKTAKLYAWVALQSLPEEMVISPCLLDFLEKALETIPITPVERNYTAVSSQDEDMGHFEIPDPMEESTTSLVSSSTSAYSSFPVDVVVYVRVQPSQIKFSCLPVSRVECMLKLPSLDLVFSSNRGELETLGTTYPAETLSPGGNATQSGTKTSASKTGIPGSSGLGSPLGRSRHSSSQSDLTSSSSSSSGLSFTACMSDFSLYVFHPYGAGKQKTAVSGLTPGSGGLGNVDEEPTSVTGRKDSLSINLEFVKVSLSRIRRSGGASFFESQSVSKSASKMDTTLINISAVCDIGSASFKYDMRRLSEILAFPRAWYRRSIARRLFLGDQTINLPTSGPGTPDSIEGVSQHLSPESSRKAYCKTWEQPSQSASFTHMPQSPNVFNEHMTNSTMSPGTVGQSLKSPASIRSRSVSDSSVPRRDSLSKTSTPFNKSNKAASQQGTPWETLVVFAINLKQLNVQMNMSNVMGNTTWTTSGLKSQGRLSVGSNRDREISMSVGLGRSQLDSKGGVVGGTIDVNALEMVAHISEHPNQQPSHKIQITMGSTEARVDYMGSSILMGIFSNADLKLQDEWKVNLYNTLDSSITDKSEIFVHGDLKWDIFQVMISRSTTPDLIKIGMKLQEFFTQQFDTSKRALSTWGPVPYLPPKTMTSNLEKSSQEQLLDAAHHRHWPGVLKVVSGCHISLFQIPLPEDGMQFGGSMSLHGNHMTLACFHGPNFRSKSWALFHLEEPNIAFWTEAQKIWEDGSSDHSTYIVQTLDFHLGHNTMVTKPCGALESPMATITKITRRRHENPPHGVASVKEWFNYVTATRNEELNLLRNVDANNTENSTTVKNSSLLSGFRGGSSYNHETETIFALPRMQLDFKSIHVQEPQEPSLQDASLKPKVECSVVTEFTDHICVTMDAELIMFLHDLVSAYLKEKEKAIFPPRILSTRPGQKSPIIIHDDNSSDKDREDSITYTTVDWRDFMCNTWHLEPTLRLISWTGRKIDPVGVDYILQKLGFHHARTTIPKWLQRGVMDPLDKVLSVLIKKLGTALQDEKEKKGKDKEEH

SEQ ID NO: 59634 - protein, 428 aa, Homo sapiens
MGGLFSRWRTKPSTVEVLESIDKEIQALEEFREKNQRLQKLWVGRLILYSSVLYLFTCLIVYLWYLPDEFTARLAMTLPFFAFPLIIWSIRTVIIFFFSKRTERNNEALDDLKSQRKKILEEVMEKETYKTAKLILERFDPDSKKAKECEPPSAGAAVTARPGQEIRQRTAAQRNLSPTPASPNQGPPPQVPVSPGPPKDSSAPGGPPERTVTPALSSNVLPRHLGSPATSVPGMGLHPPGPPLARPILPRERGALDRIVEYLVGDGPQNRYALICQQCFSHNGMALKEEFEYIAFRCAYCFFLNPARKTRPQAPRLPEFSFEKRQVVEGSSSVGPLPSGSVLSSDNQFNEESLEHDVLDDNTEQTDDKIPATEQTNQVIEKASDSEEPEEKQETENEEASVIETNSTVPGADSIPDPELSGESLTAE

SEQ ID NO: 59635 - protein, 905 aa, Homo sapiens [sequence omitted]

SEQ ID NO: 59636 - protein, 789 aa, Homo sapiens
MLEGNYQVMLKSGTNILYWRTTGILMGSKAVKPVLVKNITIEGVAYTSECFPCKPGTFSNKPGSFNCQVCPRNTYSEKGAKECIRCKDDSQFSEEGSSECTERPPCTTKDYFQIHTPCDEEGKTQIMYKWIEPKICREDLTDAIRLPPSGEKKDCPPCNPGFYNNGSSSCHPCPPGTFSDGTKECRPCPAGTEPALGFEYKWWNVLPGNMKTSCFNVGNSKCDGMNGWEVAGDHIQSGAGGSDNDYLILNLHIPGFKPPTSMTGATGSELGRITFVFETLCSADCVLYFMVDINRKSTNVVESWGGTKEKQAYTHIIFKNATFTFTWAFQRTNQGQDNRRFINDMVKIYSITATNAVDGVASSCRACALGSEQSGSSCVPCPPGHYIEKETNQCKECPPDTYLSIHQVYGKEACIPCGPGSKNNQDHSVCYSDCFFYHEKENQSLHYDFSNLSSVGSLMNGPSFTSKGTKYFHFFNISLCGHEGKKMALCTNNITDFTVKEIVAGSDDYTNLVGAFVCQSTIIPSESKGFRAALSSQSIILADTFIGVTVETTLKNINIKEDMFPVPTSQIPDVHFFYKSSTATTSCINGRSTAVKMRCNPTKSGAGVISVPSKCPAGTCDGCTFYFLWESAEACPLCTEHDFHEIEGACKRGFQETLYVWNEPKWCIKGISLPEKKLATCETVDFWLKVGAGVGAFTAVLLVALTCYFWKKNQKLEYKYSKLVMTTNSKECELPAADSCAIMEGEDNEEEVVYSNKQSLLGKLKSLATKEKEDHFESVQLKTSRSPNI

SEQ ID NO: 59637 - protein, 111 aa, Homo sapiens
MVRTKADSVPGTYRKVVAARAPRKVLGSSTSATNSTSVSSRKAENKYAGGNPVCVRPTPKWQKGIGEFFRLSPKDSEKENQIPEEAGSSGLGKAKRKACPLQPDHTNDEKE

SEQ ID NO: 59638 - protein, 923 aa, Homo sapiens
MSQFKRQRINPLPGGRNFSGTASTSLLGPPPGLLTPPVATELSQNARHLQGGEKQRVFTGIVTSLHDYFGVVDEEVFFQLSVVKGRLPQLGEKVLVKAAYNPGQAVPWNAVKVQTLSNQPLLKSPAPPLLHVAALGQKQGILGAQPQLIFQPHRIPPLFPQKPLSLFQTSHTLHLSHLNRFPARGPHGRLDQGRSDDYDSKKRKQRAGGEPWGAKKPRHDLPPYRVHLTPYTVDSPICDFLELQRRYRSLLVPSDFLSVHLSWLSAFPLSQPFSLHHPSRIQVSSEKEAAPDAGAEPITADSDPAYSSKVLLLSSPGLEELYRCCMLFVDDMAEPRETPEHPLKQIKFLLGRKEEEAVLVGGEWSPSLDGLDPQADPQVLVRTAIRCAQAQTGIDLSGCTKWWRFAEFQYLQPGPPRRLQTVVVYLPDVWTIMPTLEEWEALCQQKAAEAAPPTQEAQGETEPTEQAPDALEQAADTSRRNAETPEATTQQETDTDLPEAPPPPLEPAVIARPGCVNLSLHGIVEDRRPKERISFEVMVLAELFLEMLQRDFGYRVYKMLLSLPEKVVSPPEPEKEEAAKEEATKEEEAIKEEVVKEPKDEAQNEGPATESEAPLKEDGLLPKPLSSGGEEEEKPRGEASEDLCEMALDPELLLLRDDGEEEFAGAKLEDSEVRSVASNQSEMEFSSLQDMPKELDPSAVLPLDCLLAFVFFDANWCGYLHRRDLERILLTLGIRLSAEQAKQLVSRVVTQNICQYRSLQYSRQEGLDGGLPEEVLFGNLDLLPPPGKSTKPGAAPTEHKALVSHNGSLINVGSLLQRAEQQDSGRLYLENKIHTLELKLEESHNRFSATEVTNKTLAAEMQELRVRLAEAEETARTAERQKSQLQRLLQELRRRLTPLQLEIQRVVEKADSWVEKEEPAPSN

SEQ ID NO: 59639 - protein, 1159 aa, Homo sapiens
MLDFLAENNLCGQAILRIVSCGNAIIAELLRLSEFIPAVFRLKDRADQQKYGDIIFDFSYFKGPELWESKLDAKPELQDLDEEFRENNIEIVTRFYLAFQSVHKYIVDLNRYLDDLNEGVYIQQTLETVLLNEDGKQLLCEALYLYGVMLLVIDQKIEGEVRERMLVSYYRYSAARSSADSNMDDICKLLRSTGYSSQPGAKRPSNYPESYFQRVPINESFISMVIGRLRSDDIYNQVSAYPLPEHRSTALANQAAMLYVILYFEPSILHTHQAKMREIVDKYFPDNWVISIYMGITVNLVDAWEPYKAAKTALNNTLDLSNVREQASRYATVSERVHAQVQQFLKEGYLREEMVLDNIPKLLNCLRDCNVAIRWLMLHTADSACDPNNKRLRQIKDQILTDSRYNPRILFQLLLDTAQFEFILKEMFKQMLSEKQTKWEHYKKEGSERMTELADVFSGVKPLTRVEKNENLQAWFREISKQILSLNYDDSTAAGRKTVQLIQALEEVQEFHQLESNLQVCQFLADTRKFLHQMIRTINIKEEVLITMQIVGDLSFAWQLIDSFTSIMQESIRVNPSMVTKLRATFLKLASALDLPLLRINQANSPDLLSVSQYYSGELVSYVRKVLQIIPESMFTSLLKIIKLQTHDIIEVPTRLDKDKLRDYAQLGPRYEVAKLTHAISIFTEGILMMKTTLVGIIKVDPKQLLEDGIRKELVKRVAFALHRGLIFNPRAKPSELMPKLKELGATMDGFHRSFEYIQDYVNIYGLKIWQEEVSRIINYNVEQECNNFLRTKIQDWQSMYQSTHIPIPKFTPVDESVTFIGRLCREILRITDPKMTCHIDQLNTWYDMKTHQEVTSSRLFSEIQTTLGTFGLNGLDRLLCFMIVKELQNFLSMFQKIILRDRTVQDTLKTLMNAVSPLKSIVANSNKIYFSAIAKTQKIWTAYLEAIMKVGQMQILRQQIANELNYSCRFDSKHLAAALENLNKALLADIEAHYQDPSLPYPKEDNTLLYEITAYLEAAGIHNPLNKIYITTKRLPYFPIVNFLFLIAQLPKLQYNKNLGMVCRKPTDPVDWPPLVLGLLTLLKQFHSRYTEQFLALIGQFICSTVEQCTSQKIPEIPADVVGALLFLEDYVRYTKLPRRVAEAHVPNFIFDEFRTVL

SEQ ID NO: 59640 - protein, 807 aa, Homo sapiens
MFSAGAESLLHQAREIQDEELKKFCSRICKLLQAEDLGPDTLDSLQRLFLIISATKYSRRLEKTCVDLLQATLGLPACPEQLQVLCAAILREMSPSDSLSLAWDHTQNSRQLSLVASVLLAQGDRNEEVRAVGQGVLRALESRQPEGPSLRHLLPVMAKVVVLSPGTLQEDQATLLSKRLVDWLRYASLQQGLPHSGGFFSTPRARQPGPVTEVDGAVATDFFTVLSSGHRFTDDQWLNVQAFSMLRAWLLHSGPEGPGTLDTDDRSEQEGSTLSVISATSSAGRLLPPRERLREVAFEYCQRLIEQSNRRALRKGDSDLQKACLVEAVLVLDVLCRQDPSFLYRSLSCLKALHGRVRGDPASVRVLLPLAHFFLSHGEAAAVDSEAVYQHLFTRIPVEQFHSPMLAFEFIQFCRDNLHLFSGHLSTLRLSFPNLFKFLAWNSPPLTSEFVALLPALVDAGTALEMLHALLDLPCLTAVLDLQLRSAPAASERPLWDTSLRAPSCLEAFRDPQFQGLFQYLLRPKASGATERLAPLHQLLQPMAGCARVAQCAQAVPTLLQAFFSAVTQVADGSLINQLALLLLGRSDSLYPAPGYAAGVHSVLSSQFLALCTLKPSLVVELARDLLEFLGSVNGLCSRASLVTSVVWAIGEYLSVTYDRRCTVEQINKFFEALEALLFEVTQCRPSAALPRCPPQVVTVLMTTLTKLASRSQDLIPRASLLLSKMRTLAHSPATSSTHSEEGAEAIRTRATELLTLLKMPSVAQFVLTPSTEVCSPRYHRDANTALPLALRTVSRLVEREAGLMPG

SEQ ID NO: 59641 - protein, 1361 aa, Homo sapiens; identical to SEQ ID NO: 59630

SEQ ID NO: 59642 - protein, 621 aa, Homo sapiens
MANVPWAEVCEKFQAALALSRVELHKNPEKEPYKSKYSARALLEEVKALLGPAPEDEDERPEAEDGPGAGDHALGLPAEVVEPEGPVAQRAVRLAVIEFHLGVNHIDTEELSAGEEHLVKCLRLLRRYRLSHDCISLCIQAQNNLGILWSEREEIETAQAYLESSEALYNQYMKEVGSPPLDPTERFLPEEEKLTEQERSKRFEKVYTHNLYYLAQVYQHLEMFEKAAHYCHSTLKRQLEHNAYHPIEWAINAATLSQFYINKLCFMEARHCLSAANVIFGQTGKISATEDTPEAEGEVPELYHQRKGEIARCWIKYCLTLMQNAQLSMQDNIGELDLDKQSELRALRKKELDEEESIRKKAVQFGTGELCDAISAVEEKVSYLRPLDFEEARELFLLGQHYVFEAKEFFQIDGYVTDHIEVVQDHSALFKVLAFFETDMERRCKMHKRRIAMLEPLTVDLNPQYYLLVNRQIQFEIAHAYYDMMDLKVAIADRLRDPDSHIVKKINNLNKSALKYYQLFLDSLRDPNKVFPEHIGEDVLRPAMLAKFRVARLYGKIITADPKKELENLATSLEHYKFIVDYCEKHPEAAQEIEVELELSKEMVSLLPTKMERFRTKMALT

SEQ ID NO: 59643 - protein, 1516 aa, Homo sapiens; identical to SEQ ID NO: 59629

SEQ ID NO: 59644 - protein, 1359 aa, Homo sapiens
MYSVEDLLISHGYKLSRDPPASREDNPKGRQAARTGTRAGQGLQNGHEDGPAALAHRKTSAGKGHVSDSESRRSTPRGHGEPQSTSASRTSEAGFCNQPPSAWSSHPPTGNDQAYRRRGRQEARSQKPREHENLEARGMAQAHSLPVHVREGPWEVGGRSEHVMKKPVWEEELRMSGPAKWQNVSLESWNQPRKLGRQMSDGDGERLFQDLYPFIQGEHVLNSQNKGKSRSLPRVLSPESLSCTEIPIPLNERHSPKMPPYPPTCAPNLDSTRNSEKSGCSAPFPRPKFGRPLKPPSYSSHQQSRGGADSSDSQDSQQMDAYVPRHELCLSDPGLEPPVYVPPPSYRSPPQNIPNPYLEDTVPINVCGGHSQQQSPTEKAGASGQPPSGPPGTGNEYGVSPRLPQGLPAHPRPVTAYDGFVQYIPFDDPRLRHFKLAQPQGFCEDIKLDDKSYNSSPVTAQEPAHGGMQPDGAIWNPQSLIPPSGDERGLVLADSSPRWLWGQPPGDGENSGLPNQRDRCVARGQWPDVRGSQHGHTGRQVSSPYSQGESTCETQTKLKKFQTGTRTKKSSKKKMNETIFCLVSIPVKSESHLPDRDMDNNDLKPSADQKNGSDKSPALQEQSLLSMSSTDLELQALTGSMGGRTEFQKQDLGEPEEDRQTNDLSFIHLTKHRELKHSGSWPGHRYRDQQTQTSFSEEPQSSQLLPGAKLGGPSRAALSPKCSDPAASEAQTHTAFPTGDHKQRPSARNLKGHRSLSPSSNSAFSRTSLSVDQAPTPKAGRSQPCVDVHGLGAHPGPKREVVKGEPTGPCNSKQLFGQFLLKPVSRRPWDLISQLESFNKELQEEEESSSSSSSSSSSSEESEAEPQQENRAHCRQEDVGFRGNSPEMRVEPQPRMWVPESPVCRSGRGESKSESWSEELQPGHPRAWPPSPGRFRVEEGGGAPFCSADGSTSAEKRHLEVSNGMDELAGSPFPVTRMSSRSSDAKPLPASYPAEPREPQESPKITSAFSSVKPSEAVPRKFDSGGERGAGLPLSLSNKNRGLSAPDLRSVGLTPGQEQGASELEGSLGEASTIEIPPGESLQARAARILGIEVAVESLLPGIRRAGQNQPAEPDASACTPESPQEELLSRPAPADVPRVSTDAFYGRRKCGWTKSPLFVGDRDSARRAPQAFEHSDVDGVVTSTDPVPEPEPSPLESKFFEQKDVETKPPFRSTLFHFVERTPSVAGSEKRLRSPSKVIESLQEKLASPPRRADPDRLMRMKEVSSVSRMRVLSFRNADSQEDAEELKATTRGQAGLPGGLVSPGSGDRAQRLGHSLSVSKDSISREEKEHPAAQKEKSMDQDFWCPDSYDPSRVERV

SEQ ID NO: 59645 - protein, 1072 aa, Homo sapiens
MAPPTGVLSSLLLLVTIAGCARKQCSEGRTYSNAVISPNLETTRIMRVSHTFPVVDCTAACCDLSSCDLAWWFEGRCYLVSCPHKENCEPKKMGPIRSYLTFVLRPVQRPAQLLDYGDMMLNRGSPSGIWGDSPEDIRKDLTFLGKDWGLEEMSEYSDDYRELEKDLLQPSGKQEPRGSAEYTDWGLLPGSEGAFNSSVGDSPAVPAETQQDPELHYLNESASTPAPKLPERSVLLPLPTTPSSGEVLEKEKASQLQEQSSNSSGKEVLMPSHSLPPASLELSSVTVEKSPVLTVTPGSTEHSIPTPPTSAAPSESTPSELPISPTTAPRTVKELTVSAGDNLIITLPDNEVELKAFVAPAPPVETTYNYEWNLISHPTDYQGEIKQGHKQTLNLSQLSVGLYVFKVTVSSENAFGEGFVNVTVKPARRVNLPPVAVVSPQLQELTLPLTSALIDGSQSTDDTEIVSYHWEEINGPFIEEKTSVDSPVLRLSNLDPGNYSFRLTVTDSDGATNSTTAALIVNNAVDYPPVANAGPNHTITLPQNSITLNGNQSSDDHQIVLYEWSLGPGSEGKHVVMQGVQTPYLHLSAMQEGDYTFQLKVTDSSRQQSTAVVTVIVQPENNRPPVAVAGPDKELIFPVESATLDGSSSSDDHGIVFYHWEHVRGPSAVEMENIDKAIATVTGLQVGTYHFRLTVKDQQGLSSTSTLTVAVKKENNSPPRARAGGRHVLVLPNNSITLDGSRSTDDQRIVSYLWIRDGQSPAAGDVIDGSDHSVALQLTNLVEGVYTFHLRVTDSQGASDTDTATVEVQPDPRKSGLVELTLQVGVGQLTEQRKDTLVRQLAVLLNVLDSDIKVQKIRAHSDLSTVIVFYVQSRPPFKVLKAAEVARNLHMRLSKEKADFLLFKVLRVDTAGCLLKCSGHGHCDPLTKRCICSHLWMENLIQRYIWDGESNCEWSIFYVTVLAFTLIVLTGGFTWLCICCCKRQKRTKIRKKTKYTILDNMDEQERMELRPKYGIKHRSTEHNSSLMVSESEFDSDQDTIFSREKMERGNPKVSMNGSIRNGASFSYCSKDR

SEQ ID NO: 59646 - protein, 305 aa, Homo sapiens
SQLPVRAEERTESCLWGCWASSRVRRTSDACSSPLATSRSARSCGVLTAPVKGASSSLVVKLADTDRERALRRMQQMAGHLGAFHPAPLPLGACGAYTTAILQHQAALLAAAQGPGLGPVAAVAAQMQHVAAFSLVAAPLLPAAAANSPPGSGPGTLPGLPAPIGVNGFGPLTPQTNGQPGSDTLYNNGLSPYPAQSPGVADPLQQAYAGMHHYAGPEGCNLFIYHLPQEFGDAELIQTFLPFGAVVSAKVFVDRATNQSKCFGFVSFDNPTSAQTAIQAMNGFQIGMKRLKVQLKRPKDANRPY

SEQ ID NO: 59647 - protein, 65 aa, Homo sapiens
MVRTKADSVPGTYRKVVAARAPRKVLGSSTSATNSTSVSSRKEHVLCNLITQMMKKNRTFSFIFE

SEQ ID NO: 59648 - protein, 5005 aa, Homo sapiens; identical to SEQ ID NO: 59633

SEQ ID NO: 59649 - protein, 923 aa, Homo sapiens; identical to SEQ ID NO: 59638

SEQ ID NO: 59650 - protein, 993 aa, Homo sapiens
MGAAGRQDFLFKAMLTISWLTLTCFPGATSTVAAGCPDQSPELQPWNPGHDQDHHVHIGQGKTLLLTSSATVYSIHISEGGKLVIKDHDEPIVLRTRHILIDNGGELHAGSALCPFQGNFTIILYGRADEGIQPDPYYGLKYIGVGKGGALELHGQKKLSWTFLNKTLHPGGMAEGGYFFERSWGHRGVIVHVIDPKSGTVIHSDRFDTYRSKKESERLVQYLNAVPDGRILSVAVNDEGSRNLDDMARKAMTKLGSKHFLHLGFRHPWSFLTVKGNPSSSVEDHIEYHGHRGSAAARVFKLFQTEHGEYFNVSLSSEWVQDVEWTEWFDHDKVSQTKGGEKISDLWKAHPGKICNRPIDIQATTMDGVNLSTEVVYKKGQDYRFACYDRGRACRSYRVRFLCGKPVRPKLTVTIDTNVNSTILNLEDNVQSWKPGDTLVIASTDYSMYQAEEFQVLPCRSCAPNQVKVAGKPMYLHIGEEIDGVDMRAEVGLLSRNIIVMGEMEDKCYPYRNHICNFFDFDTFGGHIKFALGFKAAHLEGTELKHMGQQLVGQYPIHFHLAGDVDERGGYDPPTYIRDLSIHHTFSRCVTVHGSNGLLIKDVVGYNSLGHCFFTEDGPEERNTFDHCLGLLVKSGTLLPSDRDSKMCKMITEDSYPGYIPKPRQDCNAVSTFWMANPNNNLINCAAAGSEETGFWFIFHHVPTGPSVGMYSPGYSEHIPLGKFYNNRAHSNYRAGMIIDNGVKTTEASAKDKRPFLSIISARYSPHQDADPLKPREPAIIRHFIAYKNQDHGAWLRGGDVWLDSCRFADNGIGLTLASGGTFPYDDGSKQEIKNSLFVGESGNVGTEMMDNRIWGPGGLDHSGRTLPIGQNFPIRGIQLYDGPINIQNCTFRKFVALEGRHTSALAFRLNNAWQSCPHNNVTGIAFEDVPITSRVFFGEPGPWFNQLDMDGDKTSVFHDVDGSVSEYPGSYLTKNDNKWHSLASKAASGPSG

SEQ ID NO: 59651 - protein, 1361 aa, Homo sapiens; identical to SEQ ID NO: 59630

SEQ ID NO: 59652 - protein, 648 aa, Homo sapiens
MEVKGKKQFTGKSTKTAQEKNRFHKNSDSGSSKTFPTRKVAKEGGPKVTSRNFEKSITKLGKKGVKQFKNKQQGDKSPKNKFQPANKFNKKRKFQPDGRSDESAAKKPKWDDFKKKKKELKQSRQLSDKTNYDIVVRAKQMWEILRRKDCDKEKRVKLMSDLQKLIQGKIKTIAFAHDSTRVIQCYIQYGNEEQRKQAFEELRDDLVELSKAKYSRNIVKKFLMYGSKPQIAEIIRSFKGHVRKMLRHAEASAIVEYAYNDKAILEQRNMLTEELYGNTFQLYKSADHRTLDKVLEVQPEKLELIMDEMKQILTPMAQKEAVIKHSLVHKVFLDFFTYAPPKLRSEMIEAIREAVVYLAHTHDGARVAMHCLWHGTPKDRKVIVKTMKTYVEKVANGQYSHLVLLAAFDCIDDTKLVKQIIISEIISSLPSIVNDKYGRKVLLYLLSPRDPAHTVREIIEVLQKGDGNAHSKKDTEVRRRELLESISPALLSYLQEHAQEVVLDKSACVLVSDILGSATGDVQPTMNAIASLAATGLHPGGKDGELHIAEHPAGHLVLKWLIEQDKKMKENGREGCFAKTLVEHVGMKNLKSWASVNRGAIILSSLLQSCDLEVANKVKAALKSLIPTLEKTKSTSKGIEILLEKLST

SEQ ID NO: 59653 - protein, 112 aa, Homo sapiens
MKNQVCSKCGEGTYSLGSGIKFDEWDELPAGFSNIATFMDTVVGPSDSRPDGCNNSSWIPRGNYIESNRDDCTVSLIYAVHLKKSGYVFFEYQYVDNNIFFEFFIQNDQCQE

SEQ ID NO: 59654 - protein, 613 aa, Homo sapiens
MFSAGAESLLHQAREIQDEELKKFCSRICKLLQAEDLGPDTLDSLQRLFLIISATKYSRRLEKTCVDLLQATLGLPACPEQLQVLCAAILREMSPSDSLSLAWDHTQNSRQLSLVASVLLAQGDRNEEVRAVGQGVLRALESRQPEGPSLRHLLPVMAKVVVLSPGTLQEDQATLLSKRLVDWLRYASLQQGLPHSGGFFSTPRARQPGPVTEVDGAVATDFFTVLSSGHRFTDDQWLNVQAFSMLRAWLLHSGPEGPGTLDTDDRSEQEGSTLSVISATSSAGRLLPPRERLREVAFEYCQRLIEQSNRRALRKGDSDLQKACLVEAVLVLDVLCRQDPSFLYRSLSCLKALHGRVRGDPASVRVLLPLAHFFLSHGEAAAVDSEAVYQHLFTRIPVEQFHSPMLAFEFIQFCRDNLHLFSGHLSTLRLSFPNLFKFLAWNSPPLTSEFVALLPALVDAGTALEMLHALLDLPCLTAVLDLQLRSAPAASERPLWDTSLRAPSCLEAFRDPQFQGLFQYLLRPKASGATERLAPLHQLLQPMAGCARVAQCAQAVPTLLQAFFSAVTQVADGSLINQLALLLLGRSDSLYPAPGYAAGVHRPDACRPILVPL

SEQ ID NO: 59655 - protein, 305 aa, Homo sapiens
MEKETYKTAKLILERFDPDSKKAKECEPPSAGAAVTARPGQEIRQRTAAQRNLSPTPASPNQGPPPQVPVSPGPPKDSSAPGGPPERTVTPALSSNVLPRHLGSPATSVPGMGLHPPGPPLARPILPRERGALDRIVEYLVGDGPQNRYALICQQCFSHNGMALKEEFEYIAFRCAYCFFLNPARKTRPQAPRLPEFSFEKRQVVEGSSSVGPLPSGSVLSSDNQFNEESLEHDVLDDNTEQTDDKIPATEQTNQVIEKASDSEEPEEKQETENEEASVIETNSTVPGADSIPDPELSGESLTAE

SEQ ID NO: 59656 - protein, 862 aa, Homo sapiens
MHSSWIPRGNYIESNRDDCTVSLIYAVHLKKSGYVFFEYQYVDNNIFFEFFIQNDQCQEMDTTTDKWVKLTDNGEWGSHSVMLKSGTNILYWRTTGILMGSKAVKPVLVKNITIEGVAYTSECFPCKPGTFSNKPGSFNCQVCPRNTYSEKGAKECIRCKDDSQFSEEGSSECTERPPCTTKDYFQIHTPCDEEGKTQIMYKWIEPKICREDLTDAIRLPPSGEKKDCPPCNPGFYNNGSSSCHPCPPGTFSDGTKECRPCPAGTEPALGFEYKWWNVLPGNMKTSCFNVGNSKCDGMNGWEVAGDHIQSGAGGSDNDYLILNLHIPGFKPPTSMTGATGSELGRITFVFETLCSADCVLYFMVDINRKSTNVVESWGGTKEKQAYTHIIFKNATFTFTWAFQRTNQGQDNRRFINDMVKIYSITATNAVDGVASSCRACALGSEQSGSSCVPCPPGHYIEKETNQCKECPPDTYLSIHQVYGKEACIPCGPGSKNNQDHSVCYSDCFFYHEKENQSLHYDFSNLSSVGSLMNGPSFTSKGTKYFHFFNISLCGHEGKKMALCTNNITDFTVKEIVAGSDDYTNLVGAFVCQSTIIPSESKGFRAALSSQSIILADTFIGVTVETTLKNINIKEDMFPVPTSQIPDVHFFYKSSTATTSCINGRSTAVKMRCNPTKSGAGVISVPSKCPAGTCDGCTFYFLWESAEACPLCTEHDFHEIEGACKRGFQETLYVWNEPKWCIKGISLPEKKLATCETVDFWLKVGAGVGAFTAVLLVALTCYFWKKNQKLEYKYSKLVMTTNSKECELPAADSCAIMEGEDNEEEVVYSNKQSLLGKLKSLATKEKEDHFESVQLKTSRSPNI

SEQ ID NO: 59657 - protein, 1950 aa, Homo sapiens
MPGARRRRRGAAMEGKPRAGVALAPGPSGRRPSARCARRRRPGLLLPGLWLLLLARPASCAPDELSPEQHNLSLYSMELVLKKSTGHSAAQVALTETAPGSQHSSPLHVTAPPSATTFDTAFFNQGKQTKSTADPSIFVATYVSVTSKEVAVNDDEMDNFLPDTHWTTPRMVSPIQYITVSPPGLPREALEPMLTPSLPMVSLQDEEVTSGWQNTTRQPAAYAESASHFHTFRSAFRTSEGIVPTPGRNLVLYPTDAYSHLSSRTLPEIVASLTEGVETTLFLSSRSLMPQPLGDGITIPLPSLGEVSQPPEEVWATSADRYTDVTTVLSQSLEETISPRTYPTVTASHAALAFSRTHSPLLSTPLAFASSASPTDVSSNPFLPSDSSKTSELHSNSALPGPVDNTHILSPVSSFRPYTWCAACTVPSPQQVLATSLMEKDVGSGDGAETLCMTVLEESSISLMSSVVADFSEFEEDPQVFNTLFPSRPIVPLSSRSMEISETSVGISAEVDMSSVTTTQVPPAHGRLSVPASLDPTAGSLSVAETQVTPSSVTTAFFSVITSILLDSSFSVIANKNTPSLAVRDPSVFTPYSLVPSVESSLFSDQERSSFSEHKPRGALDFASSFFSTPPLELSGSISSPSEAPASLSLMPSDLSPFTSQSFSPLVETFTLFDSSDLQSSQLSLPSSTNLEFSQLQPSSELPLNTIMLLPSRSEVSPWSSFPSDSLEFVEASTVSLTDSEAHFTSAFIETTSYLESSLISHESAVTALVPPGSESFDILTAGIQATSPLTTVHTTPILTESSLFSTLTPPDDQISALDGHVSVLASFSKAIPTGTVLITDAYLPSGSSFVSEATPFPLPTELTVVGPSLTPTEVPLNTSTEVSTTSTGAATGGPLDSTLMGDAASQSPPESSAAPPLPSLRPVTAFTLEATVDTPTLATAKPPYVCDITVPDAYLITTVLARRAVQEYIITAIKEVLRIHFNRAVELKVYELFTDFTFLVTSGPFVYTAISVINVLINSKLVRDQTPLILSVKPSFLVPESRFQVQTVLQFVPPSVDTGFCNFTQRIEKGLMTALFEVRKHHQGTYNLTVQILNITISSSRVTPRRGPVNIIFAVKSTQGFLNGSEVSELLRNLSVVEFSFYLGYPVLQIAEPFQYPQLNLSQLLKSSWVRTVLLGVMEKQLQNEVFQAEMERKLAQLLSEVSTRRRMWRRATVAAGNSVVQVVNVSRLEGDDNPVQLIYFVEDQDGERLSAVKSSDLINKMDLQRAAIILGYRIQGVIAQPVDRVKRPSPESQSNNLWVIVGVVIPVLVVMVIVVILYWKLCRTDKLDFQPDTVANIQQRQKLQIPSVKGFDFAKQHLGQHNKDDILIIHEPAPLPGPLKDHTTPSENGDVPSPKSKIPSKNVRHRGRVSPSDADSTVSEESSERDAGDKTPGAVNDGRSHRAPQSGPPLPSSGNEQHSSASIFEHVDRISRPPEASRRVPSKIQLIAMQPIPAPPVQRPSPADRVAESNKINKEIQTALRHKSEIEHHRNKIRLRAKRRGHYEFPVVDDLSSGDTKERHRVYRRAQMQIDKILDPTASVPSVFIEPRKSSRIKRSPKPRRKHQVNGCPADAEKDRLITTDSDGTYRRPPGVHNSAYIGCPSDPDLPADVQTPSSVELGRYPALPFPASQYIPPQPSIEEARQTMHSLLDDAFALVAPSSQPASTAGVGPGVPPGLPANSTPSQEERRATQWGSFYSPAQTANNPCSRYEDYGMTPPTGPLPRPGFGPGLLQSTELVPPDPQQPQASAEAPFAARGIYSEEMPSVARPRPVGGTTGSQIQHLTQVGIASRIGAQPVEIPPSRGSQYGGPGWPSYGEDEAGRREATHMLGHQEYSSSPLFQVPRTSGREPSAPSGNLPHRGLQGPGLGYPTSSTEDLQPGHSSASLIKAIREELLRLSQKQSTVQNFHS

SEQ ID NO: 59658 - protein, 118 aa, Homo sapiens
  VARIANT 1: note = MOD_RES - Any amino acid
XKSNGKTAIGDPGRANMPGYNEDSRSTFFDKKYSNMSTLGNNGPTHKKLYRHKSSSKALRDEKCKGKHMEREQVHKDESGTASFEKLRDSDYNLLKAETTFWVLPVFEEETRIFQKDI

SEQ ID NO: 59659 - protein, 1027 aa, Homo sapiens
MRVSHTFPVVDCTAACCDLSSCDLAWWFEGRCYLVSCPHKENCEPKKMGPIRSYLTFVLRPVQRPAQLLDYGDMMLNRGSPSGIWGDSPEDIRKDLTFLGKDWGLEEMSEYSDDYRELEKDLLQPSGKQEPRGSAEYTDWGLLPGSEGAFNSSVGDSPAVPAETQQDPELHYLNESASTPAPKLPERSVLLPLPTTPSSGEVLEKEKASQLQEQSSNSSGKEVLMPSHSLPPASLELSSVTVEKSPVLTVTPGSTEHSIPTPPTSAAPSESTPSELPISPTTAPRTVKELTVSAGDNLIITLPDNEVELKAFVAPAPPVETTYNYEWNLISHPTDYQGEIKQGHKQTLNLSQLSVGLYVFKVTVSSENAFGEGFVNVTVKPARRVNLPPVAVVSPQLQELTLPLTSALIDGSQSTDDTEIVSYHWEEINGPFIEEKTSVDSPVLRLSNLDPGNYSFRLTVTDSDGATNSTTAALIVNNAVDYPPVANAGPNHTITLPQNSITLNGNQSSDDHQIVLYEWSLGPGSEGKHVVMQGVQTPYLHLSAMQEGDYTFQLKVTDSSRQQSTAVVTVIVQPENNRPPVAVAGPDKELIFPVESATLDGSSSSDDHGIVFYHWEHVRGPSAVEMENIDKAIATVTGLQVGTYHFRLTVKDQQGLSSTSTLTVAVKKENNSPPRARAGGRHVLVLPNNSITLDGSRSTDDQRIVSYLWIRDGQSPAAGDVIDGSDHSVALQLTNLVEGVYTFHLRVTDSQGASDTDTATVEVQPDPRKSGLVELTLQVGVGQLTEQRKDTLVRQLAVLLNVLDSDIKVQKIRAHSDLSTVIVFYVQSRPPFKVLKAAEVARNLHMRLSKEKADFLLFKVLRVDTAGCLLKCSGHGHCDPLTKRCICSHLWMENLIQRYIWDGESNCEWSIFYVTVLAFTLIVLTGGFTWLCICCCKRQKRTKIRKKTKYTILDNMDEQERMELRPKYGIKHRSTEHNSSLMVSESEFDSDQDTIFSREKMERGNPKVSMNGSIRNGASFSYCSKDR

SEQ ID NO: 59660 - protein, 606 aa, Homo sapiens
MGNTCRVCYQLEAIKRSNEMSNVMGNTTWTTSGLKSQGRLSVGSNRDREISMSVGLGRSQLDSKGGVVGGTIDVNALEMVAHISEHPNQQPSHKIQITMGSTEARVDYMGSSILMGIFSNADLKLQDEWKVNLYNTLDSSITDKSEIFVHGDLKWDIFQVMISRSTTPDLIKIGMKLQEFFTQQFDTSKRALSTWGPVPYLPPKTMTSNLEKSSQEQLLDAAHHRHWPGVLKVVSGCHISLFQIPLPEDGMQFGGSMSLHGNHMTLACFHGPNFRSKSWALFHLEEPNIAFWTEAQKIWEDGSSDHSTYIVQTLDFHLGHNTMVTKPCGALESPMATITKITRRRHENPPHGVASVKEWFNYVTATRNEELNLLRNVDANNTENSTTVKNSSLLSGFRGGSSYNHETETIFALPRMQLDFKSIHVQEPQEPSLQDASLKPKVECSVVTEFTDHICVTMDAELIMFLHDLVSAYLKEKEKAIFPPRILSTRPGQKSPIIIHDDNSSDKDREDSITYTTVDWRDFMCNTWHLEPTLRLISWTGRKIDPVGVDYILQKLGFHHARTTIPKWLQRGVMDPLDKVLSVLIKKLGTALQDEKEKKGKDKEEH

SEQ ID NO: 59661 - protein, 1934 aa, Homo sapiens
MPGARRRRRGAAMEGKPRAGVALAPGPSGRRPSARCARRRRPGLLLPGLWLLLLARPASCAPDELSPEQHNLSLYSMELVLKKSTGHSAAQVALTETAPGSQHSSPLHVTAPPSATTFDTAFFNQGKQTKSTADPSIFVATYVSVTSKEVAVNDDEMDNFLPDTHWTTPRMVSPIQYITVSPPGLPREALEPMLTPSLPMVSLQDEEVTSGWQNTTRQPAAYAESASHFHTFRSAFRTSEGIVPTPGRNLVLYPTDAYSHLSSRTLPEIVASLTEGVETTLFLSSRSLMPQPLGDGITIPLPSLGEVSQPPEEVWATSADRYTDVTTVLSQSLEETISPRTYPTVTASHAALAFSRTHSPLLSTPLAFASSASPTDVSSNPFLPSDSSKTSELHSNSALPGPVDNTHILSPVSSFRPYTWCAACTVPSPQQVLATSLMEKDVGSGDGAETLCMTVLEESSISLMSSVVADFSEFEEDPQVFNTLFPSRPIVPLSSRSMEISETSVGISAEVDMSSVTTTQVPPAHGRLSVPASLDPTAGSLSVAETQVTPSSVTTAFFSVITSILLDSSFSVIANKNTPSLAVRDPSVFTPYSLVPSVESSLFSDQERSSFSEHKPRGALDFASSFFSTPPLELSGSISSPSEAPASLSLMPSDLSPFTSQSFSPLVETFTLFDSSDLQSSQLSLPSSTNLEFSQLQPSSELPLNTIMLLPSRSEVSPWSSFPSDSLEFVEASTVSLTDSEAHFTSAFIETTSYLESSLISHESAVTALVPPGSESFDILTAGIQATSPLTTVHTTPILTESSLFSTLTPPDDQISALDGHVSVLASFSKAIPTGTVLITDAYLPSGSSFVSEATPFPLPTELTVVGPSLTPTEVPLNTSTEVSTTSTGAATGGPLDSTLMGDAASQSPPESSAAPPLPSLRPVTAFTLEATVDTPTLATAKPPYVCDITVPDAYLITTVLARRAVQEYIITAIKEVLRIHFNRAVELKVYELFTDFTFLVTSGPFVYTAISVINVLINSKLVRDQTPLILSVKPSFLVPESRFQVQTVLQFVPPSVDTGFCNFTQRIEKGLMTALFEVRKHHQGTYNLTVQILNITISSSRVTPRRGPVNIIFAVKSTQGFLNGSEVSELLRNLSVVEFSFYLGYPVLQIAEPFQYPQLNLSQLLKSSWVRTVLLGVMEKQLQNEVFQAEMERKLAQLLSEVSTRRRMWRRATVAAGNSVVQVVNVSRLEGDDNPVQLIYFVEDQDGERLSAVKSSDLINKMDLQRAAIILGYRIQGVIAQPVDRVKRPSPESQSNNLWVIVGVVIPVLVVMVIVVILYWKLCRTDKLDFQPDTVANIQQRQKLQIPSVKGFDFAKQHLGQHNKDDILIIHEPAPLPGPLKDHTTPSENGDVPSPKSKIPSKNVRHRGRVSPSDADSTVSEESSERDAGDKTPGAVNDGRSHRAPQSGPPLPSSGNEQHSSASIFEHVDRISRPPEASRRVPSKIQLIAMQPIPAPPVQRPSPADRVAESNKINKEIQTALRHKSEIEHHRNKIRLRAKRRGHYEFPVVDDLSSGDTKERHRVYRRAQMQIDKILDPTASVPSVFIEPRKSSRIKRSPKPRRKHQVNGCPADAEKDRLITTDSDGTYRRPPGVHNSAYIGCPSDPDLPADVQTPSSVELGRYPALPFPASQYIPPQPSIEEARQTMHSLLDDAFALVAPSSQPASTAGVGPGVPPGLPANSTPSQEERRATQWGSFYSPAQTANNPCSRYEDYGMTPPTGPLPRPGFGPGLLQSTELVPPDPQQPQASAEAPFAARGIYSEEMPSVARPRPVGGTTGSQIQHLTQVGIASRIGAQPVEIPPSRGSQYGGPGWPSYGEDEAGRREAVPRTSGREPSAPSGNLPHRGLQGPGLGYPTSSTEDLQPGHSSASLIKAIREELLRLSQKQSTVQNFHS

SEQ ID NO: 59662 - protein, 83 aa, Homo sapiens
MGGLFSRWRTKPSTVEVLESIDKEIQALEEFREKNQRLQKLWVGRLILYSSVLYLFTCLIVYLWYLPDEFTARLAMTLPFFAF

SEQ ID NO: 59663 - protein, 1029 aa, Homo sapiens
MLFRARGPVRGRGWGRPAEAPRRGRSPPWSPAWICCWALAGCQAAWAGDLPSSSSRPLPPCQEKDYHFEYTECDSSGSRWRVAIPNSAVDCSGLPDPVRGKECTFSCASGEYLEMKNQVCSKCGEGTYSLGSGIKFDEWDELPAGFSNIATFMDTVVGPSDSRPDGCNNSSWIPRGNYIESNRDDCTVSLIYAVHLKKSGYVFFEYQYVDNNIFFEFFIQNDQCQEMDTTTDKWVKLTDNGEWGSHSVMLKSGTNILYWRTTGILMGSKAVKPVLVKNITIEGVAYTSECFPCKPGTFSNKPGSFNCQVCPRNTYSEKGAKECIRCKDDSQFSEEGSSECTERPPCTTKDYFQIHTPCDEEGKTQIMYKWIEPKICREDLTDAIRLPPSGEKKDCPPCNPGFYNNGSSSCHPCPPGTFSDGTKECRPCPAGTEPALGFEYKWWNVLPGNMKTSCFNVGNSKCDGMNGWEVAGDHIQSGAGGSDNDYLILNLHIPGFKPPTSMTGATGSELGRITFVFETLCSADCVLYFMVDINRKSTNVVESWGGTKEKQAYTHIIFKNATFTFTWAFQRTNQGQDNRRFINDMVKIYSITATNAVDGVASSCRACALGSEQSGSSCVPCPPGHYIEKETNQCKECPPDTYLSIHQVYGKEACIPCGPGSKNNQDHSVCYSDCFFYHEKENQSLHYDFSNLSSVGSLMNGPSFTSKGTKYFHFFNISLCGHEGKKMALCTNNITDFTVKEIVAGSDDYTNLVGAFVCQSTIIPSESKGFRAALSSQSIILADTFIGVTVETTLKNINIKEDMFPVPTSQIPDVHFFYKSSTATTSCINGRSTAVKMRCNPTKSGAGVISVPSKCPAGTCDGCTFYFLWESAEACPLCTEHDFHEIEGACKRGFQETLYVWNEPKWCIKGISLPEKKLATCETVDFWLKVGAGVGAFTAVLLVALTCYFWKKNQKLEYKYSKLVMTTNSKECELPAADSCAIMEGEDNEEEVVYSNKQSLLGKLKSLATKEKEDHFESVQLKTSRSPNI

SEQ ID NO: 59664 - protein, 3680 aa, Homo sapiens
MDQRKNESIVPSITQLEDFLTEHNSNVVWLLVATILSCGWIIYLTYYNSRNVGLILTLVLNRLYKHGYIHIGSFSFSVLSGKVMVREIYYITEDMSIRIQDGFIIFRWWKMYNPKQKQHDPKAETRLYITVNDFEFHVYNRSDLYGRLQELFGLEPTIIPPKKDDDKTREIGRTRTQSKIERVKVKTESQDPTSSWRSLIPVIKVNVSTGRLAFGNHYQPQTLCINFDDAFLTYTTKPPSSHLDQFMHIVKGKLENVRVMLVPSPRYVGLQNDEPPRLMGEGFVVMQSNDVDIYYYMDEPGLVPEETEENIEGEMSSEDCKLQDLPPCWGLDIVCGKGTDFNYGPWADRQRDCLWKFFFPPDYQVLKVSEIAQPGRPRQILAFELRMNIIADATIDLLFTKNRETNAVHVNVGAGSYLEINIPMTVEENGYTPAIKGQLLHVDATTSMQYRTLLEAEMLAFHINASYPRIWNMPQTWQCELEVYKATYHFIFAQKNFFTDLIQDWSSDSPPDIFSFVPYTWNFKIMFHQFEMIWAANQHNWIDCSTKQQENVYLAACGETLNIDFSLPFTDFVPATCNTKFSLRGEDVDLHLFLPDCHPSKYSLFMLVKNCHPNKMIHDTGIPAECQSGQKTVKPKWRNVTQEKSGWVECWTVPSVMLTIDYTWHPIYPQKADEQLKQSLSEMEETMLSVLRPSQKTSDRVVSSPSTSSRPPIDPSELPPDKLHVEMELSPDSQITLYGPLLNAFLCIKENYFGEDDMYMDFEEVISSPVLSLSTSSSSGWTAVGMENDKKENEGSAKSIHPLALRPWDITVLVNLYKVHGRLPVHGTTDGPECPTAFLERLCFEMKKGFRETMLQLILSPLNVFVSDNYQQRPPVDEVLREGHINLSGLQLRAHAMFSAEGLPLGSDSLEYAWLIDVQAGSLTAKVTAPQLACLLEWGQTFVFHVVCREYELERPKSVIICQHGIDRRFCESKLSCIPGPCPTSDDLKYTMIRLAVDGADIYIVEHGCATNIKMGAIRVANCNLHNQSVGEGISAAIQDFQVRQYIEQLNNCRIGLQPAVLRRAYWLEAGSANLGLITVDIALAADHHSKHEAQRHFLETHDARTKRLWFLWPDDILKNKRCRNKCGCLGGCRFFGGTVTGLDFFKLEELTPSSSSAFSSTSAESDMYYGQSLLQPGEWIITKEIPKIIDGNVNGMKRKEWENKSVGIEVERKTQHLSLQVPLRSHSSSSSSEENSSSSAAQPLLAGEKESPSSVADDHLVQKEFLHGTKRDDGQASIPTEISGNSPVSPNTQDKSVGQSPLRSPLKRQASVCSTRLGSTKSLTAAFYGDKQPVTVGVQFSSDVSRSDENVLDSPKQRRSFGSFPYTPSADSNSFHQYRSMDSSMSMADSEAYFSAAEEFEPISSDEGPGTYPGRKKKKKQTQQIDYSRGSIYHSVEGPLTGHGESIQDSRTLPFKTHPSQASFVSALGGEDDVIEHLYIVEGEKTVESEQITPQQPVMNCYQTYLTQFQVINWSVKHPTNKRTSKSSLHRPLDLDTPTSEESSSSFEQLSVPTFKVIKQGLTANSLLDRGMQLSGSTSNTPYTPLEKKLADNTDDETLTEEWTLDQPVSQTRTTAIVEVKGTVDIVLTPLVAEALDRYIEAMVHCASTRHPAAIVDDLHAKVLREAVQNSKTTFSENLSSKQDIRGTKTEQSTIGTTNQGQAQTNLTMKQDNVTIKGLQTNVSIPKVNLCLLQASVEESPTTAPSRSVTHVSLVALCFDRIATQVRMNRGVVEETSNNAEPGRTSNFDRYVHATKMQPQSSGSLRSNAGAEKGKEIAAKLNIHRVHGQLRGLDTTDIGTCAITAIPFEKSKVLFTLEELDEFTFVDETDQQAVPDVTRIGPSQEKWGWIMFECGLENLTIKGGRQSGAVLYNSFGIMGKASDTERGGVLTSNNSSDSPTGSGYNTDVSDDNLPCDRTSPSSDLNGNSVSDEQDEGVESDDLKKDLPLMPPPPDSCSMKLTIKEIWFSFAAPTNVRSHTHAFSRQLNLLSTATPAVGAWLVPIDQLKSSLNKLETEGTLRICAVMGCIMTEALENKSVHFPLRSKYNRLTKVARFLQENPSCLLCNILHHYLHQANYSIIDDATMSDGLPALVTLKKGLVALARQWMKFIVVTPAFKGVSLHRPAQPLKPQIAMDHEHEDGLGLDNGGGLQSDTSADGAEFEFDAATVSEHTMLLEGTANRPPPGSSGPVTGAEIMRKLSKTHTHSDSALKIKGIHPYHSLSYTSGDTATDSPVHVGRAGMPVKDSPRKESLLSYLTGSFPSLHNLLEGTPQRSSAAVKSSSLTRTGNTVATDMLSEHPLLSEPSSVSFYNWMSNAVGNRGSVLQESPVTKSGHNSLPTGVAPNLPTIPSASDFNTVLSSDQNTLDGTHSQHSTSQDDVAGVEEANQGFPAVQLADAQVVFKPLLSHTGIQSQDTMPFCYRMYFGEHLSFSGTLDCLRADIVDSDTAKERKGKRARRQGHVNLPPLEFKPALMLGTFSISAVVMEKSVCTPQNSTSALSFHDLSKRYYNTFHCNFTISCQSISQHVDMALVRLIHQFSTMIDDIKATQTDIKLSRYTAGSASPTPTFKTRKHRDFRSSDFSRSSRGSLNGGNRVNNAKNKRTNNENNKKESRNKNSLGRSERRTSKVSRKGSKDVVDHMTIHMDDSDSITVSEQSEPSAECWQNMYKLLNFYSLISDPTGILEKSSETFGPAGVRSPTEPTCKVVFENEQDNSSLTKTQRKRSLVTSEPQHVTLIVFGIGMVNRTHLEADIGGLTMESELKRIHGSFTLKEKMKDVLHQKMTETCATAHIGGVNIVLLEGITPNIQLEDFPTSPTSTAKQEFLTVVKCSIAKSQALYSAQRGLKTNNAAVFKVGAISINIPQHPATLHSMMVRSSHQLSKQISDLIRQPSTAPQPVKEDIATPLPSEKTPTSVNQTPVETNEFPQLPEGLEKKPIVLKFSAMLDGIAIGAALLPSLKAEYKMGRMRSHGMTGAQTRFTFELPNHRLRFTSKVSATDMSTIPPSASLNLPPVTMSGKYIMEEHDSYSDQVWSIDELPSKQGYYLQGNYLRCVAEVGSFEHNLTTDLLNHLVFVQKVFMKEVNEVIQKVSGGEQPIPLWNEHDGTADGDKPKILLYSLNLQFKGIQVTATTPSMRAVRFETGLIELELSNRLQTKASPGSSSYLKLFGKCQVDLNLALGQIVKHQVYEEAGSDFHQVAYFKTRIGLRNALREEISGSSDREAVLITLNRPIVYAQPVAFDRAVLFWLNYKAAYDNWNEQRMALHKDIHMATKEVVDMLPGIQQTSAQAFGTLFLQLTVNDLGICLPITNTAQSNHTGDLDTGSALVLTIESTLITACSSESLVSKGHFKNFCIRFADGFETSWDDWKPEIHGDLVMNACVVPDGTYEVCSRTTGQAAAESSSAGTWTLNVLWKMCGIDVHMDPNIGKRLNALGNTLTTLTGEEDIDDIADLNSVNIADLSDEDEVDTMSPTIHTEATDYRRQAASASQPGELRGRKIMKRIVDIRELNEQAKVIDDLKKLGASEGTINQEIQRYQQLESVAVNDIRRDVRKKLRRSSMRAASLKDKWGLSYKPSYSRSKSISASGRPPLKRMERASSRVGETEELPEIRVDAASPGPRVTFNIQDTIAEIRRKKISFKVVF

SEQ ID NO: 59665 - protein, 746 aa, Homo sapiens
MPCLGLLANLCRHNLSVQTHIKTLSNVKSFYRTLITLLAHSSLTVVVFALSILSSLTLNEEVGEKLFHARNIHQTFQLIFNILINGDGTLTRKYSVDLLMDLLKNPKIADYLTRYEHFSSCLHQVLGLLNGKDPDSSSKVLELLLAFCSVTQLRHMLTQMMFEQSPPGSATLGSHTKCLEPTVALLRWLSQPLDGSENCSVLALELFKEIFEDVIDAANCSSADRFVTLLLPTILDQLQFTEQNLDEALTRKKCERIAKAIEVLLTLCGDDTLKMHIAKILTTVKCTTLIEQQFTYGKIDLGFGTKVADSELCKLAADVILKTLDLINKLKPLVPGMEVSFYKILQDPRLITPLAFALTSDNREQVQSGLRILLEAAPLPDFPALVLGESIAANNAYRQQETEHIPRKMPWQSSNHSFPTSIKCLTPHLKDGVPGLNIEELIEKLQSGMVVKDQICDVRISDIMDVYEMKLSTLASKESRLQDLLETKALALAQADRLIAQHRCQRTQAETEARTLASMLREVERKNEELSVLLKAQQVESERAQSDIEHLFQHNRKLESVAEEHEILTKSYMELLQRNESTEKKNKDLQITCDSLNKQIETVKKLNESLKEQNEKSIAQLIEKEEQRKEVQNQLVDREHKLANLHQKTKVQEEKIKTLQKEREDKEETIDILRKELSRTEQIRKELSIKASSLEVQKAQLEGRLEEKESLVKLQQEELNKHSHMIAMIHSLSGGKINPETVNLSI

SEQ ID NO: 59666 - protein, 279 aa, Homo sapiens
MTLPFFAFPLIIWSIRTVIIFFFSKRTERNNEALDDLKSQRKKILEEVMEKETYKTAKLILERFDPDSKKAKECEPPSAGAAVTARPGQEIRQRTAAQRNLSPTPASPNQGPPPQVPVSPGPPKDSSAPGGPPERTVTPALSSNVLPRHLGSPATSVPGMGLHPPGPPLARPILPRERGALDRIVEYLVGDGPQNRYALICQQCFSHNGMALKEEFEYIAFRCAYCFFLNPARKTRPQAPRLPEFSFEKRQVVEGSSSVGPLPSGSVLSSDNQFNEVQY

SEQ ID NO: 59667 - protein, 1063 aa, Homo sapiens
MTRLGWPSPCCARKQCSEGRTYSNAVISPNLETTRIMRVSHTFPVVDCTAACCDLSSCDLAWWFEGRCYLVSCPHKENCEPKKMGPIRSYLTFVLRPVQRPAQLLDYGDMMLNRGSPSGIWGDSPEDIRKDLTFLGKDWGLEEMSEYSDDYRELEKDLLQPSGKQEPRGSAEYTDWGLLPGSEGAFNSSVGDSPAVPAETQQDPELHYLNESASTPAPKLPERSVLLPLPTTPSSGEVLEKEKASQLQEQSSNSSGKEVLMPSHSLPPASLELSSVTVEKSPVLTVTPGSTEHSIPTPPTSAAPSESTPSELPISPTTAPRTVKELTVSAGDNLIITLPDNEVELKAFVAPAPPVETTYNYEWNLISHPTDYQGEIKQGHKQTLNLSQLSVGLYVFKVTVSSENAFGEGFVNVTVKPARRVNLPPVAVVSPQLQELTLPLTSALIDGSQSTDDTEIVSYHWEEINGPFIEEKTSVDSPVLRLSNLDPGNYSFRLTVTDSDGATNSTTAALIVNNAVDYPPVANAGPNHTITLPQNSITLNGNQSSDDHQIVLYEWSLGPGSEGKHVVMQGVQTPYLHLSAMQEGDYTFQLKVTDSSRQQSTAVVTVIVQPENNRPPVAVAGPDKELIFPVESATLDGSSSSDDHGIVFYHWEHVRGPSAVEMENIDKAIATVTGLQVGTYHFRLTVKDQQGLSSTSTLTVAVKKENNSPPRARAGGRHVLVLPNNSITLDGSRSTDDQRIVSYLWIRDGQSPAAGDVIDGSDHSVALQLTNLVEGVYTFHLRVTDSQGASDTDTATVEVQPDPRKSGLVELTLQVGVGQLTEQRKDTLVRQLAVLLNVLDSDIKVQKIRAHSDLSTVIVFYVQSRPPFKVLKAAEVARNLHMRLSKEKADFLLFKVLRVDTAGCLLKCSGHGHCDPLTKRCICSHLWMENLIQRYIWDGESNCEWSIFYVTVLAFTLIVLTGGFTWLCICCCKRQKRTKIRKKTKYTILDNMDEQERMELRPKYGIKHRSTEHNSSLMVSESEFDSDQDTIFSREKMERGNPKVSMNGSIRNGASFSYCSKDR

SEQ ID NO: 59668 - protein, 430 aa, Homo sapiens
MGRSWPGLSLCQWRLLPALEAGWAVAAETGGGGRPGRAAPASCSCEFLWTIDDIYHCAQFLQIKDGWIIFSMEARLAMTLPFFAFPLIIWSIRTVIIFFFSKRTERNNEALDDLKSQRKKILEEVMEKETYKTAKLILERFDPDSKKAKECEPPSAGAAVTARPGQEIRQRTAAQRNLSPTPASPNQGPPPQVPVSPGPPKDSSAPGGPPERTVTPALSSNVLPRHLGSPATSVPGMGLHPPGPPLARPILPRERGALDRIVEYLVGDGPQNRYALICQQCFSHNGMALKEEFEYIAFRCAYCFFLNPARKTRPQAPRLPEFSFEKRQVVEGSSSVGPLPSGSVLSSDNQFNEESLEHDVLDDNTEQTDDKIPATEQTNQVIEKASDSEEPEEKQETENEEASVIETNSTVPGADSIPDPELSGESLTAE

SEQ ID NO: 59669 - protein, 1011 aa, Homo sapiens
MAPPTGVLSSLLLLVTIAGCARKQCSEGRTYSNAVISPNLETTRIMRVSHTFPVVDCTAACCDLSSCDLAWWFEGRCYLVSCPHKENCEPKKMGPIRSYLTFVLRPVQRPAQLLDYGDMMLNRGSPSGIWGDSPEDIRKDLTFLGKDWGLEEMSEYSDDYRELEKDLLQPSGKQEPRGSAEYTDWGLLPGSEGAFNSSVGDSPAVPAETQQDPELHYLNESASTPAPKLPERSVLLPLPTTPSSGEVLEKEKASQLQEQSSNSSGKEVLMPSHSLPPASLELSSVTVEKSPVLTVTPGSTEHSIPTPPTSAAPSESTPSELPISPTTAPRTVKELTVSAGDNLIITLPDNEVELKAFVAPAPPVETTYNYEWNLISHPTDYQGEIKQGHKQTLNLSQLSVGLYVFKVTVSSENAFGEGFVNVTVKPARRVNLPPVAVVSPQLQELTLPLTSALIDGSQSTDDTEIVSYHWEEINGPFIEEKTSVDSPVLRLSNLDPGNYSFRLTVTDSDGATNSTTAALIVNNAVDYPPVANAGPNHTITLPQNSITLNGNQSSDDHQIVLYEWSLGPGSEGKHVVMQGVQTPYLHLSAMQEGDYTFQLKVTDSSRQQSTAVVTVIVQPENNRPPVAVAGPDKELIFPVESATLDGSSSSDDHGIVFYHWEHVRGPSAVEMENIDKAIATVTGLQVGTYHFRLTVKDQQGLSSTSTLTVAVKKENNSPPRARAGGRHVLVLPNNSITLDGSRSTDDQRIVSYLWIRDGQSPAAGDVIDGSDHSVALQLTNLVEGVYTFHLRVTDSQGASDTDTATVEVQPDPRKSGLVELTLQVGVGQLTEQRKDTLVRQLAVLLNVLDSDIKVQKIRAHSDLSTVIVFYVQSRPPFKVLKAAEVARNLHMRLSKEKADFLLFKVLRVDTAGCLLKCSGHGHCDPLTKRCICSHLWMENLIQRYIWDGESNCGIKHRSTEHNSSLMVSESEFDSDQDTIFSREKMERGNPKVSMNGSIRNGASFSYCSKDR

SEQ ID NO: 59670 - protein, 401 aa, Homo sapiens
METPEVPVGSLIDFGPEAPTSSPLEAPPPVLQDGDGSLGDGASESETTESADSENDMGESPSHPSWDQDRRSSSNESFSSNQSTESTQDEETLALRDFMRGYVEKIFSGGEDLDQEEKAKFGEYCSSENGKGREWFARYVSAQRCNSKCVSEATFYRLVQSFAVVLFECHQMDDFGPAKNLMTMCFTYYHIGKPQLLPPESREKPAGSIDSYLKSANSWLAEKKDIAERLLKNTSARTENVKGFFGGLETKLKGPLARRNEEDENKPQEKRPRAVTAYSPEDEKKGEKIYLYTHLKQQPIWHTLRFWNAAFFDAVHCERTKRSPTTREKWCHMTQEERDDSLRFNENITFGQLGTFTHNMLAFGLNKKLCNDFLKKQAVIGNLDEEQYKLLSDHIEQMATE

SEQ ID NO: 59671 - protein, 1072 aa, Homo sapiens; identical to SEQ ID NO: 59645

SEQ ID NO: 59672 - protein, 459 aa, Homo sapiens
MGGLFSRWRTKPSTVEVLESIDKEIQALEEFREKNQRLQKLWVGRLILYSSVLYLFTCLIVYLWYLPDEFTARLAMTLPFFAFPLIIWSIRTVIIFFFSKRTERNNEALDDLKSQRKKILEEVMEKETYKTAKLILERFDPDSKKAKECEPPSAGAAVTARPGQEIRQRTAAQRNLSPTPASPNQGPPPQVPVSPGPPKDSSAPGGPPERTVTPALSSNVLPRHLGSPATSVPGMEMGLPHIAQAGLEHLSSSDLSTSTSQSAGITGLHPPGPPLARPILPRERGALDRIVEYLVGDGPQNRYALICQQCFSHNGMALKEEFEYIAFRCAYCFFLNPARKTRPQAPRLPEFSFEKRQVVEGSSSVGPLPSGSVLSSDNQFNEESLEHDVLDDNTEQTDDKIPATEQTNQVIEKASDSEEPEEKQETENEEASVIETNSTVPGADSIPDPELSGESLTAE

SEQ ID NO: 59673 - protein, 525 aa, Homo sapiens
MSRQLLPVLLLLLLRASCPWGQEQGARSPSEEPPEEEIPKEDGILVLSRHTLGLALREHPALLVEFYAPWCGHCQALAPEYSKAAAVLAAESMVVTLAKVDGPAQRELAEEFGVTEYPTLKFFRNGNRTHPEEYTGPRDAEGIAEWLRRRVGPSAMRLEDEAAAQALIGGRDLVVIGFFQDLQDEDVATFLALAQDALDMTFGLTDRPRLFQQFGLTKDTVVLFKKFDEGRADFPVDEELGLDLGDLSRFLVTHSMRLVTEFNSQTSAKIFAARILNHLLLFVNQTLAAHRELLAGFGEAAPRFRGQVLFVVVDVAADNEHVLQYFGLKAEAAPTLRLVNLETTKKYAPVDGGPVTAASITAFCHAVLNGQVKPYLLSQEIPPDWDQRPVKTLVGKNFEQVAFDETKNVFVKFYAPWCTHCKEMAPAWEALAEKYQDHEDIIIAELDATANELDAFAVHGFPTLKYFPAGPGRKVIEYKSTRDLETFSKFLDNGGVLPTEEPPEEPAAPFPEPPANSTMGSKEEL

SEQ ID NO: 59674 - protein, 522 aa, Homo sapiens
MSRQLLPVLLLLLLRASCPWGQEQGARSPSEEPPEEEIPKEDGILVLSRHTLGLALREHPALLVEFYAPWCGHCQALAPEYSKAAAVLAAESMVVTLAKVDGPAQRELAEEFGVTEYPTLKFFRNGNRTHPEEYTGPRDAEGIAEWLRRRVGPSAMRLEDEAAAQALIGGRDLVVIGFFQDEDVATFLALAQDALDMTFGLTDRPRLFQQFGLTKDTVVLFKKFDEGRADFPVDEELGLDLGDLSRFLVTHSMRLVTEFNSQTSAKIFAARILNHLLLFVNQTLAAHRELLAGFGEAAPRFRGQVLFVVVDVAADNEHVLQYFGLKAEAAPTLRLVNLETTKKYAPVDGGPVTAASITAFCHAVLNGQVKPYLLSQEIPPDWDQRPVKTLVGKNFEQVAFDETKNVFVKFYAPWCTHCKEMAPAWEALAEKYQDHEDIIIAELDATANELDAFAVHGFPTLKYFPAGPGRKVIEYKSTRDLETFSKFLDNGGVLPTEEPPEEPAAPFPEPPANSTMGSKEEL

SEQ ID NO: 59675 - protein, 494 aa, Homo sapiens
MGSGTGSEEPLGGASRGGNPQGGWDLGAEPPHPGPGPAGAPCPAGGILCPVVWALPGPGPRVQQGSCRARGRVNGGHAEEFGVTEYPTLKFFRNGNRTHPEEYTGPRDAEGIAEWLRRRVGPSAMRLEDEAAAQALIGGRDLVVIGFFQDLQDEDVATFLALAQDALDMTFGLTDRPRLFQQFGLTKDTVVLFKKFDEGRADFPVDEELGLDLGDLSRFLVTHSMRLVTEFNSQTSAKIFAARILNHLLLFVNQTLAAHRELLAGFGEAAPRFRGQVLFVVVDVAADNEHVLQYFGLKAEAAPTLRLVNLETTKKYAPVDGGPVTAASITAFCHAVLNGQVKPYLLSQEIPPDWDQRPVKTLVGKNFEQVAFDETKNVFVKFYAPWCTHCKEMAPAWEALAEKYQDHEDIIIAELDATANELDAFAVHGFPTLKYFPAGPGRKVIEYKSTRDLETFSKFLDNGGVLPTEEPPEEPAAPFPEPPANSTMGSKEEL

SEQ ID NO: 59676 - protein, 440 aa, Homo sapiens
MALLVLGLVSCTFFLAVNGLYSSSDDVIELTPSNFNREVIQSDSLWLVEFYAPWCGHCQRLTPEWKKAATALKDVVKVGAVDADKHHSLGGQYGVQGFPTIKIFGSNKNRPEDYQGGRTGEAIVDAALSALRQLVKDRLGGRSGGYSSGKQGRSDSSSKKDVIELTDDSFDKNVLDSEDVWMVEFYAPWCGHCKNLEPEWAAAASEVKEQTKGKVKLAAVDATVNQVLASRYGIRGFPTIKIFQKGESPVDYDGGRTRSDIVSRALDLFSDNAPPPELLEIINEDIAKRTCEEHQLCVVAVLPHILDTGAAGRNSYLEVLLKLADKYKKKMWGWLWTEAGAQSELETALGIGGFGYPAMAAINARKMKFALLKGSFSEQGINEFLRELSFGRGSTAPVGGGAFPTIVEREPWDGRDGELPVEDDIDLSDVELDDLGKDEL

SEQ ID NO: 59677 - protein, 445 aa, Homo sapiens
MYPSTTMANAPGLVSCTFFLAVNGLYSSSDDVIELTPSNFNREVIQSDSLWLVEFYAPWCGHCQRLTPEWKKAATALKDVVKVGAVDADKHHSLGGQYGVQGFPTIKIFGSNKNRPEDYQGGRTGEAIVDAALSALRQLVKDRLGGRSGGYSSGKQGRSDSSSKKDVIELTDDSFDKNVLDSEDVWMVEFYAPWCGHCKNLEPEWAAAASEVKEQTKGKVKLAAVDATVNQVLASRYGIRGFPTIKIFQKGESPVDYDGGRTRSDIVSRALDLFSDNAPPPELLEIINEDIAKRTCEEHQLCVVAVLPHILDTGAAGRNSYLEVLLKLADKYKKKMWGWLWTEAGAQSELETALGIGGFGYPAMAAINARKMKFALLKGSFSEQGINEFLRELSFGRGSTAPVGGGAFPTIVEREPWDGRDGELPVEDDIDLSDVELDDLGKDEL

SEQ ID NO: 59678 - protein, 11 aa, Homo sapiens
MYPSTTMANAP

SEQ ID NO: 59679 - protein, 437 aa, Homo sapiens
MILGLVSCTFFLAVNGLYSSSDDVIELTPSNFNREVIQSDSLWLVEFYAPWCGHCQRLTPEWKKAATALKDVVKVGAVDADKHHSLGGQYGVQGFPTIKIFGSNKNRPEDYQGGRTGEAIVDAALSALRQLVKDRLGGRSGGYSSGKQGRSDSSSKKDVIELTDDSFDKNVLDSEDVWMVEFYAPWCGHCKNLEPEWAAAASEVKEQTKGKVKLAAVDATVNQVLASRYGIRGFPTIKIFQKGESPVDYDGGRTRSDIVSRALDLFSDNAPPPELLEIINEDIAKRTCEEHQLCVVAVLPHILDTGAAGRNSYLEVLLKLADKYKKKMWGWLWTEAGAQSELETALGIGGFGYPAMAAINARKMKFALLKGSFSEQGINEFLRELSFGRGSTAPVGGGAFPTIVEREPWDGRDGELPVEDDIDLSDVELDDLGKDEL

SEQ ID NO: 59680 - protein, 651 aa, Homo sapiens
MADSAELKQMVMSLRVSELQVLLGYAGRNKHGRKHELLTKALHLLKAGCSPAVQMKIKELYRRRFPQKIMTPADLSIPNVHSSPMPATLSPSTIPQLTYDGHPASSPLLPVSLLGPKHELELPHLTSALHPVHPDIKLQKLPFYDLLDELIKPTSLASDNSQRFRETCFAFALTPQQVQQISSSMDISGTKCDFTVQVQLRFCLSETSCPQEDHFPPNLCVKVNTKPCSLPGYLPPTKNGVEPKRPSRPINITSLVRLSTTVPNTIVVSWTAEIGRNYSMAVYLVKQLSSTVLLQRLRAKGIRNPDHSRALIKEKLTADPDSEIATTSLRVSLLCPLGKMRLTIPCRALTCSHLQCFDATLYIQMNEKKPTWVCPVCDKKAPYEHLIIDGLFMEILKYCTDCDEIQFKEDGTWAPMRSKKEVQEVSASYNGVDGCLSSTLEHQVASHHQSSNKNKKVEVIDLTIDSSSDEEEEEPSAKRTCPSLSPTSPLNNKGILSLPHQASPVSRTPSLPAVDTSYINTSLIQDYRHPFHMTPMPYDLQGLDFFPFLSGDNQHYNTSLLAAAAAAVSDDQDLLHSSRFFPYTSSQMFLDQLSAGGSTSLPTTNGSSSGSNSSLVSSNSLRESHSHTVTNRSSTDTASIFGIIPDIISLD

SEQ ID NO: 59681 - protein, 653 aa, Homo sapiens
MFTLQDSYVKQMVMSLRVSELQVLLGYAGRNKHGRKHELLTKALHLLKAGCSPAVQMKIKELYRRRFPQKIMTPADLSIPNVHSSPMPATLSPSTIPQLTYDGHPASSPLLPVSLLGPKHELELPHLTSALHPVHPDIKLQKLPFYDLLDELIKPTSLASDNSQRFRETCFAFALTPQQVQQISSSMDISGTKCDFTVQVQLRFCLSETSCPQEDHFPPNLCVKVNTKPCSLPGYLPPTKNGVEPKRPSRPINITSLVRLSTTVPNTIVVSWTAEIGRNYSMAVYLVKQLSSTVLLQRLRAKGIRNPDHSRALIKEKLTADPDSEIATTSLRVSLLCPLGKMRLTIPCRALTCSHLQCFDATLYIQMNEKKPTWVCPVCDKKAPYEHLIIDGLFMEILKYCTDCDEIQFKEDGTWAPMRSKKEVQEVSASYNGVDGCLSSTLEHQVASHHQSSNKNKKVEVIDLTIDSSSDEEEEEPSAKRTCPSLSPTSPLNNKGILSLPHQASPVSRTPSLPAVDTSYINTSLIQDYRHPFHMTPMPYDLQGLDFFPFLSGDNQHYNTSLLAAAAAAVSDDQDLLHSSRFFPYTSSQMFLDQLSAGGSTSLPTTNGSSSGSNSSLVSSNSLRESHSHTVTNRSSTDTASIFGIIPDIISLD

SEQ ID NO: 59682 - protein, 593 aa, Homo sapiens
MAELGELKHMVMSFRVSELQVLLGFAGRNKSGRKHELLAKALHLLKSSCAPSVQMKIKELYRRRFPRKTLGPSDLSLLSLPPGTSPPVHPDVTMKPLPFYEVYGELIRPTTLASTSSQRFEEAHFTFALTPQQVQQILTSREVLPGAKCDYTIQVQLRFCLCETSCPQEDYFPPNLFVKVNGKLCPLPGYLPPTKNGAEPKRPSRPINITPLARLSATVPNTIVVNWSSEFGRNYSLSVYLVRQLTAGTLLQKLRAKGIRNPDHSRALIKEKLTADPDSEVATTSLRVSLMCPLGKMRLTVPCRALTCAHLQSFDAALYLQMNEKKPTWTCPVCDKKAPYESLIIDGLFMEILSSCSDCDEIQFMEDGSWCPMKPKKEASEVCPPPGYGLDGLQYSPVQGGDPSENKKKVEVIDLTIESSSDEEDLPPTKKHCSVTSAAIPALPGSKGVLTSGHQPSSVLRSPAMGTLGGDFLSSLPLHEYPPAFPLGADIQGLDLFSFLQTESQHYGPSVITSLDEQDALGHFFQYRGTPSHFLGPLAPTLGSSHCSATPAPPPGRVSSIVAPGGALREGHGGPLPSGPSLTGCRSDIISLD

SEQ ID NO: 59683 - protein, 290 aa, Homo sapiens [sequence omitted]

SEQ ID NO: 59684 - protein, 628 aa, Homo sapiens
MAELGELKHMVMSFRVSELQVLLGFAGRNKSGRKHELLAKALHLLKSSCAPSVQMKIKELYRRRFPRKTLGPSDLSLLSLPPGTSPVGSPGPLAPIPPTLLAPGTLLGPKREVDMHPPLPQPVHPDVTMKPLPFYEVYGELIRPTTLASTSSQRFEEAHFTFALTPQQVQQILTSREVLPGAKCDYTIQVQLRFCLCETSCPQEDYFPPNLFVKVNGKLCPLPGYLPPTKNGAEPKRPSRPINITPLARLSATVPNTIVVNWSSEFGRNYSLSVYLVRQLTAGTLLQKLRAKGIRNPDHSRALIKEKLTADPDSEVATTSLRVSLMCPLGKMRLTVPCRALTCAHLQSFDAALYLQMNEKKPTWTCPVCDKKAPYESLIIDGLFMEILSSCSDCDEIQFMEDGSWCPMKPKKEASEVCPPPGYGLDGLQYSPVQGGDPSENKKKVEVIDLTIESSSDEEDLPPTKKHCSVTSAAIPALPGSKGVLTSGHQPSSVLRSPAMGTLGGDFLSSLPLHEYPPAFPLGADIQGLDLFSFLQTESQHYGPSVITSLDEQDALGHFFQYRGTPSHFLGPLAPTLGSSHCSATPAPPPGRVSSIVAPGGALREGHGGPLPSGPSLTGCRSDIISLD

SEQ ID NO: 59685 - protein, 259 aa, Homo sapiens
MVMSFRVSELQVLLGFAGRNKSGRKHELLAKALHLLKSSCAPSVQMKIKELYRRRFPRKTLGPSDLSLLSLPPGTSPVGSPGPLAPIPPTLLAPGTLLGPKREVDMHPPLPQPVHPDVTMKPLPFYEVYGELIRPTTLASTSSQRFEEAHFTFALTPQQVQQILTSREVLPGAKCDYTIQVQLRFCLCETSCPQEDYFPPNLFVKVNGKLCPLPGYLPPTKNGAEPKRPSRPINITPLARLSATVPNTIVVNWSSEFGR

SEQ ID NO: 59686 - protein, 415 aa, Homo sapiens
MFADLDYDIEEDKLGIPTVPGKVTLQKDAQNLIGISIGGGAQYCPCLYIVQVFDNTPAALDGTVAAGDEITGVNGRSIKGKTKVEVAKMIQEVKGEVTIHYNKLQADPKQGMSLDIVLKKVKHRLVENMSSGTADALGLSRAILCNDGLVKRLEELERTAELYKGMTEHTKNLLRAFYELSQTHRAFGDVFSVIGVREPQPAASEAFVKFADAHRSIEKFGIRLLKTIKPMLTDLNTYLNKAIPDTRLTIKKYLDVKFEYLSYCLKVKEMDDEEYSCIALGEPLYRVSTGNYEYRLILRCRQEARARFSQMRKDVLEKMELLDQKHVQDIVFQLQRLVSTMSKYYNDCYAVLRDADVFPIEVDLAHTTLAYGLNQEEFTDGEEEEEEEDTAAGEPSRDTRGAAGPLDKGGSWCDS

SEQ ID NO: 59687 - protein, 415 aa, Homo sapiens; identical to SEQ ID NO: 59686

SEQ ID NO: 59688 - protein, 229 aa, Homo sapiens
MFADLDYDIEEDKLGIPTVPGKVTLQKDAQNLIGISIGGGAQYCPCLYIVQVFDNTPAALDGTVAAGDEITGVNGRSIKGKTKVEVAKMIQEVKGEVTIHYNKLQADPKQGMSLDIVLKKVKHRLVENMSSGTADALGLSRAILCNDGLVKRLEELERTAELYKGMTEHTKNLLRAFYELSQTHRAFGDVFSVIGVREPQPAASEAFVKFADAHRSIEKFGIRLLKTIK

SEQ ID NO: 59689 - protein, 134 aa, Homo sapiens
MFADLDYDIEEDKLGIPTVPGKVTLQKDAQNLIGISIGGGAQYCPCLYIVQVFDNTPAALDGTVAAGDEITGVNGRSIKGKTKVEVAKMIQEVKGEVTIHYNKLQADPKQGMSLDIVLKKVKHRLVENMSSGTA

SEQ ID NO: 59690 - protein, 130 aa, Homo sapiens
MFADLDYDIEEDKLGIPTVPGKVTLQKDAQNLIGISIGGGAQYCPCLYIVQVFDNTPAALDGTVAAGDEITGVNGRSIKGKTKVEVAKMIQEVKGEVTIHYNKLQADPKQGMSLDIGQRLGFHGPGPHSS

SEQ ID NO: 59691 - protein, 38 aa, Homo sapiens
MFADLDYDIEEDKLGIPTVPGKVTLQKDAQNLIGISIG

SEQ ID NO: 59692 - protein, 76 aa, Homo sapiens
MTDVETTYADFIASGRTGRRNAIHDILVSSASGNSNELALKLAGLDINKTEGEEDAQRSSTEQSGEAQGEAAKSES

SEQ ID NO: 59693 - protein, 76 aa, Homo sapiens; identical to SEQ ID NO: 59692

SEQ ID NO: 59694 - protein, 76 aa, Homo sapiens; identical to SEQ ID NO: 59692

SEQ ID NO: 59695 - protein, 85 aa, Homo sapiens
MSHQDVAMRTDSSKMTDVESGVANFASSARAGRRNALPDIQSSAATDGTSDLPLKLEALSVKEDAKEKDEKTTQDQLEKPQNEEK

SEQ ID NO: 59696 - protein, 78 aa, Homo sapiens
MRTDSSKMTDVESGVANFASSARAGRRNALPDIQSSAATDGTSDLPLKLEALSVKEDAKEKDEKTTQDQLEKPQNEEK

SEQ ID NO: 59697 - protein, 87 aa, Homo sapiens
MHILFVDVAMRTDSSKMTDVESGVANFASSARAGRRNALPDIQSSAATDGTSDLPLKLEALSVKEDAKEKDEKTTQDQLEKPQNEEK

SEQ ID NO: 59698 - protein, 78 aa, Homo sapiens; identical to SEQ ID NO: 59696

SEQ ID NO: 59699 - protein, 78 aa, Homo sapiens; identical to SEQ ID NO: 59696

SEQ ID NO: 59700 - protein, 78 aa, Homo sapiens; identical to SEQ ID NO: 59696

SEQ ID NO: 59701 - protein, 78 aa, Homo sapiens; identical to SEQ ID NO: 59696

SEQ ID NO: 59702 - protein, 76 aa, Homo sapiens
MMEVESSYSDFISCDRTGRRNAVPDIQGDSEAVSVRKLAGDMGELALEGAEGQVEGSAPDKEAGNQPQSSDGTTSS

SEQ ID NO: 59703 - protein, 64 aa, Homo sapiens
MMEVESSYSDFISCDRTGRRNAVPDIQGDSEAVSVRKLAGDMGELALEGAEMDLTMLPWLVSNS

SEQ ID NO: 59704 - protein, 76 aa, Homo sapiens; identical to SEQ ID NO: 59702

SEQ ID NO: 59705 - protein, 76 aa, Homo sapiens; identical to SEQ ID NO: 59702

SEQ ID NO: 59706 - protein, 76 aa, Homo sapiens; identical to SEQ ID NO: 59702

SEQ ID NO: 59707 - protein, 76 aa, Homo sapiens; identical to SEQ ID NO: 59702

SEQ ID NO: 59708 - protein, 76 aa, Homo sapiens; identical to SEQ ID NO: 59702

SEQ ID NO: 59709 - protein, 525 aa, Homo sapiens
MPLLDGDLEGSGKHSSRKVDSPFGPGSPSKGFFSRGPQPRPSSPMSAPVRPKTSPGSPKTVFPFSYQESPPRSPRRMSFSGIFRSSSKESSPNSNPATSPGGIRFFSRSRKTSGLSSSPSTPTQVTKQHTFPLESYKHEPERLENRIYASSSPPDTGQRFCPSSFQSPTRPPLASPTHYAPSKAAALAAALGPAEAGMLEKLEFEDEAVEDSESGVYMRFMRSHKCYDIVPTSSKLVVFDTTLQVKKAFFALVANGVRAAPLWESKKQSFVGMLTITDFINILHRYYKSPMVQIYELEEHKIETWRELYLQETFKPLVNISPDASLFDAVYSLIKNKIHRLPVIDPISGNALYILTHKRILKFLQLFMSDMPKPAFMKQNLDELGIGTYHNIAFIHPDTPIIKALNIFVERRISALPVVDESGKVVDIYSKFDVINLAAEKTYNNLDITVTQALQHRSQYFEGVVKCNKLEILETIVDRIVRAEVHRLVVVNEADSIVGIISLSDILQALILTPAGAKQKETETE

SEQ ID NO: 59710 - protein, 328 aa, Homo sapiens
MLEKLEFEDEAVEDSESGVYMRFMRSHKCYDIVPTSSKLVVFDTTLQVKKAFFALVANGVRAAPLWESKKQSFVGMLTITDFINILHRYYKSPMVQIYELEEHKIETWRELYLQETFKPLVNISPDASLFDAVYSLIKNKIHRLPVIDPISGNALYILTHKRILKFLQLFMSDMPKPAFMKQNLDELGIGTYHNIAFIHPDTPIIKALNIFVERRISALPVVDESGKVVDIYSKFDVINLAAEKTYNNLDITVTQALQHRSQYFEGVVKCNKLEILETIVDRIVRAEVHRLVVVNEADSIVGIISLSDILQALILTPAGAKQKETETE

SEQ ID NO: 59711 - protein, 444 aa, Homo sapiens
MSSSYDEASLAPEETTDSFWEVGNYKRTVKRIDDGHRLCNDLMNCVQERAKIEKAYGQQLTDWAKRWRQLIEKGPQYGSLERAWGAIMTEADKVSELHQEVKNNLLNEDLEKVKNWQKDAYHKQIMGGFKETKEAEDGFRKAQKPWAKKMKELEAAKKAYHLACKEEKLAMTREMNSKTEQSVTPEQQKKLQDKVDKCKQDVQKTQEKYEKVLEDVGKTTPQYMENMEQVFEQCQQFEEKRLVFLKEVLLDIKRHLNLAENSSYIHVYRELEQAIRGADAQEDLRWFRSTSGPGMPMNWPQFEEWNPDLPHTTTKKEKQPKKAEGVALTNATGAVESTSQAGDRGSVSSYDRGQPYATEWSDDESGNPFGGSETNGGANPFEDDSKGVRVRALYDYDGQEQDELSFKAGDELTKLGEEDEQGWCRGRLDSGQLGLYPANYVEAI

SEQ ID NO: 59712 - protein, 426 aa, Homo sapiens
MSSSYDEASLAPEETTDSFWEVGNYKRTVKRIDDGHRLCNDLMNCVQERAKIEKAYGQQLTDWAKRWRQLIEKGPQYGSLERAWGAIMTEADKVSELHQEVKNNLLNEDLEKVKNWQKDAYHKQIMGGFKETKEAEDGFRKAQKPWAKKMKELEAAKKAYHLACKEEKLAMTREMNSKTEQSVTPEQQKKLQDKVDKCKQDVQKTQEKYEKVLEDVGKTTPQYMENMEQVFEQCQQFEEKRLVFLKEVLLDIKRHLNLAENSSYIHVYRELEQAIRGADAQEDLRWFRSTSGPGMPMNWPQFEEWNPDLPHTTTKKEKQPKKAEGVALTNATGAVESTSQAGDRGSVSSYDRGQPYATEWSDDESGNPFGGSETNGGANPFEDDSKGVRVRALYDYDGQEQDELSFKAGDELTKLGLYPANYVEAI

SEQ ID NO: 59713 - protein, 444 aa, Homo sapiens; identical to SEQ ID NO: 59711

SEQ ID NO: 59714 - protein, 424 aa, Homo sapiens [sequence omitted]

SEQ ID NO: 59715 - protein, 292 aa, Homo sapiens
MAPEEDAGGEALGGSFWEAGNYRRTVQRVEDGHRLCGDLVSCFQERARIEKAYAQQLADWARKWRGTVEKGPQYGTLEKAWHAFFTAAERLSALHLEVREKLQGQDSERVRAWQRGAFHRPVLGGFRESRAAEDGFRKAQKPWLKRLKEVEASKKSYHAARKDEKTAQTRETQRQTAPSPRSSCANCRNGWNAVPRRPRRQKLSMSRRWQSCIATLHATWRTWNRPLRPARPPSASGFFSSRICCSPYTSTWTFPAVRSSMNSTVTCTRALRQPVTKRICAGGAAPTGQAWP

SEQ ID NO: 59716 - protein, 69 aa, Homo sapiens
MAPEEDAGGEALGGSFWEAGNYRRTVQRVEDGHRLCGDLVSCFQERARIEKAYAQQLADWARKWRGTVE

SEQ ID NO: 59717 - protein, 142 aa, Homo sapiens
MAPEEDAGGEALGGSFWEAGNYRRTVQRVEDGHRLCGDLVSCFQERARIEKAYAQQLADWARKWRGTVEKGPQYGTLEKAWHAFFTAAERLSALHLEVREKLQGQDSERVRAWQRGAFHRPVLGGFRESRAAEDGFRKAQKP

SEQ ID NO: 59718 - protein, 405 aa, Homo sapiens
MAPEEDAGGEALGGSFWEAGNYRRTVQRVEDGHRLCGDLVSCFQERARIEKAYAQQLADWARKWRGTVEKGPQYGTLEKAWHAFFTAAERLSALHLEVREKLQGQDSERVRAWQRGAFHRPVLGGFRESRAAEDGFRKAQKPWLKRLKEVEASKKSYHAARKDEKTAQTRESHAKADSAVSQEQLRKLQERVERCAKEAEKTKAQYEQTLAELHRYTPRYMEDMEQAFETCQAAERQRLLFFKDMLLTLHQHLDLSSSEKFHELHRDLHQGIEAASDEEDLRWWRSTHGPGMAMNWPQFEEWSLDTQRTISRKEKGGRSPDEVTLTSIVPTRDGTAPPPQSPGSPGTGQDEEWSDEESPRKAATGVRVRALYDYAGQEADELSFRAGEELLKMSEEDEQGWCQGQ

SEQ ID NO: 59719 - protein, 69 aa, Homo sapiens; identical to SEQ ID NO: 59716

SEQ ID NO: 59720 - protein, 148 aa, Homo sapiens
MAPEEDAGGEALGGSFWEAGNYRRTVQRVEDGHRLCGDLVSCFQERARIEKAYAQQLADWARKWRGTVEKGPQYGTLEKAWHAFFTAAERLSALHLEVREKLQGQDSERVRAWQRGAFHRPVLGGFRESRAAEDGFRKAQKPWLKRLK

SEQ ID NO: 59721 - protein, 424 aa, Homo sapiens [sequence omitted]

SEQ ID NO: 59722 - protein, 528 aa, Homo sapiens
MLLPLLLLLPMCWAVEVKRPRGVSLTNHHFYDESKPFTCLDGSATIPFDQVNDDYCDCKDGSDEPGTAACPNGSFHCTNTGYKPLYIPSNRVNDGVCDCCDGTDEYNSGVICENTCKEKGRKERESLQQMAEVTREGFRLKKILIEDWKKAREEKQKKLIELQAGKKSLEDQVEMLRTVKEEAEKPEREAKEQHQKLWEEQLAAAKAQQEQELAADAFKELDDDMDGTVSVTELQTHPELDTDGDGALSEAEAQALLSGDTQTDATSFYDRVWAAIRDKYRSEALPTDLPAPSAPDLTEPKEEQPPVPSSPTEEEEEEEEEEEEEAEEEEEEEDSEEAPPPLSPPQPASPAEEDKMPPYDEQTQAFIDAAQEARNKFEEAERSLKDMEESIRNLEQEISFDFGPNGEFAYLYSQCYELTTNEYVYRLCPFKLVSQKPKLGGSPTSLGTWGSWIGPDHDKFSAMKYEQGTGCWQGPNRSTTVRLLCGKETMVTSTTEPSRCEYLMELMTPAACPEPPPEAPTEDDHDEL

SEQ ID NO: 59723 - protein, 525 aa, Homo sapiens
MLLPLLLLLPMCWAVEVKRPRGVSLTNHHFYDESKPFTCLDGSATIPFDQVNDDYCDCKDGSDEPGTAACPNGSFHCTNTGYKPLYIPSNRVNDGVCDCCDGTDEYNSGVICENTCKEKGRKERESLQQMAEVTREGFRLKKILIEDWKKAREEKQKKLIELQAGKKSLEDQVEMLRTVKEEAEKPEREAKEQHQKLWEEQLAAAKAQQEQELAADAFKELDDDMDGTVSVTELQTHPELDTDGDGALSEAEAQALLSGDTQTDATSFYDRVWAAIRDKYRSEALPTDLPAPSAPDLTEPKEEQPPVPSSPTEEEEEEEEEEEEEAEEEEEEEDSEVQGEQPKPASPAEEDKMPPYDEQTQAFIDAAQEARNKFEEAERSLKDMEESIRNLEQEISFDFGPNGEFAYLYSQCYELTTNEYVYRLCPFKLVSQKPKLGGSPTSLGTWGSWIGPDHDKFSAMKYEQGTGCWQGPNRSTTVRLLCGKETMVTSTTEPSRCEYLMELMTPAACPEPPPEAPTEDDHDEL

SEQ ID NO: 59724 - protein, 676 aa, Homo sapiens
MAPFLRIAFNSYELGSLQAEDEANQPFCAVKMKEALSTERGKTLVQKKPTMYPEWKSTFDAHIYEGRVIQIVLMRAAEEPVSEVTVGVSVLAERCKKNNGKAEFWLDLQPQAKVLMSVQYFLEDVDCKQSMRSEDEAKFPTMNRRGAIKQAKIHYIKNHEFIATFFGQPTFCSVCKDFVWGLNKQGYKCRQCNAAIHKKCIDKIIGRCTGTAANSRDTIFQKERFNIDMPHRFKVHNYMSPTFCDHCGSLLWGLVKQGLKCEDCGMNVHHKCREKVANLCGINQKLLAEALNQVTQRASRRSDSASSEPVGIYQGFEKKTGVAGEDMQDNSGTYGKIWEGSSKCNINNFIFHKVLGKGSFGKVLLGELKGRGEYFAIKALKKDVVLIDDDVECTMVEKRVLTLAAENPFLTHLICTFQTKDHLFFVMEFLNGGDLMYHIQDKGRFELYRATFYAAEIMCGLQFLHSKGIIYRDLKLDNVLLDRDGHIKIADFGMCKENIFGESRASTFCGTPDYIAPEILQGLKYTFSVDWWSFGVLLYEMLIGQSPFHGDDEDELFESIRVDTPHYPRWITKESKDILEKLFEREPTKRLGVTGNIKIHPFFKTINWTLLEKRRLEPPFRPKVKSPRDYSNFDQEFLNEKARLSYSDKNLIDSMDQSAFAGFSFVNPKFEHLLED

SEQ ID NO: 59725 - protein, 676 aa, Homo sapiens; identical to SEQ ID NO: 59724

SEQ ID NO: 59726 - protein, 77 aa, Homo sapiens
MAPFLRIAFNSYELGSLQAEDEANQPFCAVKMKEALSTERGKTLVQKKPTMYPEWKSTFDAHIYEGRVIQIVLMRAA

SEQ ID NO: 59727 - protein, 125 aa, Homo sapiens
MAPFLRIAFNSYELGSLQAEDEANQPFCAVKMKEALSTERGKTLVQKKPTMYPEWKSTFDAHIYEGRVIQIVLMRAAEEPVSEVTVGVSVLAERCKKNNGKAEFWLDLQPQAKVLMSVQYFLEDV

SEQ ID NO: 59728 - protein, 683 aa, Homo sapiens
MSSGTMKFNGYLRVRIGEAVGLQPTRWSLRHSLFKKGHQLLDPYLTVSVDQVRVGQTSTKQKTNKPTYNEEFCANVTDGGHLELAVFHETPLGYDHFVANCTLQFQELLRTTGASDTFEGWVDLEPEGKVFVVITLTGSFTEATLQRDRIFKHFTRKRQRAMRRRVHQINGHKFMATYLRQPTYCSHCREFIWGVFGKQGYQCQVCTCVVHKRCHHLIVTACTCQNNINKVDSKIAEQRFGINIPHKFSIHNYKVPTFCDHCGSLLWGIMRQGLQCKICKMNVHIRCQANVAPNCGVNAVELAKTLAGMGLQPGNISPTSKLVSRSTLRRQGKESSKEGNGIGVNSSNRLGIDNFEFIRVLGKGSFGKVMLARVKETGDLYAVKVLKKDVILQDDDVECTMTEKRILSLARNHPFLTQLFCCFQTPDRLFFVMEFVNGGDLMFHIQKSRRFDEARARFYAAEIISALMFLHDKGIIYRDLKLDNVLLDHEGHCKLADFGMCKEGICNGVTTATFCGTPDYIAPEILQEMLYGPAVDWWAMGVLLYEMLCGHAPFEAENEDDLFEAILNDEVVYPTWLHEDATGILKSFMTKNPTMRLGSLTQGGEHAILRHPFFKEIDWAQLNHRQIEPPFRPRIKSREDVSNFDPDFIKEEPVLTPIDEGHLPMINQDEFRNFSYVSPELQP

SEQ ID NO: 59729 - protein, 118 aa, Homo sapiens
MSSGTMKFNGYLRVRIGEAVGLQPTRWSLRHSLFKKGHQLLDPYLTVSVDQVRVGQTSTKQKTNKPTYNEEFCANVTDGGHLELAVFHETPLGYDHFVANCTLQFQELLRTTGASDTF

SEQ ID NO: 59730 - protein, 596 aa, Homo sapiens
MPTQRDSSTMSHTVAGGGSGDHSHQVRVKAYYRGDIMITHFEPSISFEGLCNEVRDMCSFDNEQLFTMKWIDEEGDPCTVSSQLELEEAFRLYELNKDSELLIHVFPCVPERPGMPCPGEDKSIYRRGARRWRKLYCANGHTFQAKRFNRRAHCAICTDRIWGLGRQGYKCINCKLLVHKKCHKLVTIECGRHSLPQEPVMPMDQSSMHSDHAQTVIPYNPSSHESLDQVGEEKEAMNTRESGKASSSLGLQDFDLLRVIGRGSYAKVLLVRLKKTDRIYAMKVVKKELVNDDEDIDWVQTEKHVFEQASNHPFLVGLHSCFQTESRLFFVIEYVNGGDLMFHMQRQRKLPEEHARFYSAEISLALNYLHERGIIYRDLKLDNVLLDSEGHIKLTDYGMCKEGLRPGDTTSTFCGTPNYIAPEILRGEDYGFSVDWWALGVLMFEMMAGRSPFDIVGSSDNPDQNTEDYLFQVILEKQIRIPRSLSVKAASVLKSFLNKDPKERLGCHPQTGFADIQGHPFFRNVDWDMMEQKQVVPPFKPNISGEFGLDNFDSQFTNEPVQLTPDDDDIVRKIDQSEFEGFEYINPLLMSAEECV

SEQ ID NO: 59731 - protein, 706 aa, Homo sapiens
MSPFLRIGLSNFDCGSCQSCQGEAVNPYCAVLVKEYVESENGQMYIQKKPTMYPPWDSTFDAHINKGRVMQIIVKGKNVDLISETTVELYSLAERCRKNNGKTEIWLELKPQGRMLMNARYFLEMSDTKDMNEFETEGFFALHQRRGAIKQAKVHHVKCHEFTATFFPQPTFCSVCHEFVWGLNKQGYQCRQCNAAIHKKCIDKVIAKCTGSAINSRETMFHKERFKIDMPHRFKVYNYKSPTFCEHCGTLLWGLARQGLKCDACGMNVHHRCQTKVANLCGINQKLMAEALAMIESTQQARCLRDTEQIFREGPVEIGLPCSIKNEARPPCLPTPGKREPQGISWESPLDEVDKMCHLPEPELNKERPSLQIKLKIEDFILHKMLGKGSFGKVFLAEFKKTNQFFAIKALKKDVVLMDDDVECTMVEKRVLSLAWEHPFLTHMFCTFQTKENLFFVMEYLNGGDLMYHIQSCHKFDLSRATFYAAEIILGLQFLHSKGIVYRDLKLDNILLDKDGHIKIADFGMCKENMLGDAKTNTFCGTPDYIAPEILLGQKYNHSVDWWSFGVLLYEMLIGQSPFHGQDEEELFHSIRMDNPFYPRWLEKEAKDLLVKLFVREPEKRLGVRGDIRQHPLFREINWEELERKEIDPPFRPKVKSPFDCSNFDKEFLNEKPRLSFADRALINSMDQNMFRNFSFMNPGMERLIS

SEQ ID NO: 59732 - protein, 643 aa, Homo sapiens
MSPFLRIGLSNFDCGSCQSCQGEAVNPYCAVLVKEYVESENGQMYIQKKPTMYPPWDSTFDAHINKGRVMQIIVKGKNVDLISETTVELYSLAERCRKNNGKTEIWLELKPQGRMLMNARYFLEMSDTKDMNEFETEGFFALHQRRGAIKQAKVHHVKCHEFTATFFPQPTFCSVCHEFVWGLNKQGYQCRQCNAAIHKKCIDKVIAKCTGSAINSRETMFHKERFKIDMPHRFKVYNYKSPTFCEHCGTLLWGLARQGLKCDACGMNVHHRCQTKVANLCGINQKLMAEALAMIESTQQARCLRDTEQIFREGPVEIGLPCSIKNEARPPCLPTPGKREPQGISWESPLDEVDKMCHLPEPELNKERPSLQIKLKIEDFILHKMLGKGSFGKVFLAEFKKTNQFFAIKALKKDVVLMDDDVECTMVEKRVLSLAWEHPFLTHMFCTFQTKENLFFVMEYLNGGDLMYHIQSCHKFDLSRATFYAAEIILGLQFLHSKGIVYRDLKLDNILLDKDGHIKIADFGMCKENMLGDAKTNTFCGTPDYIAPELFVREPEKRLGVRGDIRQHPLFREINWEELERKEIDPPFRPKVKSPFDCSNFDKEFLNEKPRLSFADRALINSMDQNMFRNFSFMNPGMERLIS

SEQ ID NO: 59733 - protein, 479 aa, Homo sapiens
  VARIANT 1: note = MOD_RES - Any amino acid
XLSLLPCLLFLPTIIPKKIVIQRDSLPSKKLSYGLIACGMNVHHRCQTKVANLCGINQKLMAEALAMIESTQQARCLRDTEQIFREGPVEIGLPCSIKNEARPPCLPTPGKREPQGISWESPLDEVDKMCHLPEPELNKERPSLQIKLKIEDFILHKMLGKGSFGKVFLAEFKKTNQFFAIKALKKDVVLMDDDVECTMVEKRVLSLAWEHPFLTHMFCTFQTKENLFFVMEYLNGGDLMYHIQSCHKFDLSRATFYAAEIILGLQFLHSKGIVYRDLKLDNILLDKDGHIKIADFGMCKENMLGDAKTNTFCGTPDYIAPEILLGQKYNHSVDWWSFGVLLYEMLIGQSPFHGQDEEELFHSIRMDNPFYPRWLEKEAKDLLVKLFVREPEKRLGVRGDIRQHPLFREINWEELERKEIDPPFRPKVKSPFDCSNFDKEFLNEKPRLSFADRALINSMDQNMFRNFSFMNPGMERLIS

SEQ ID NO: 59734 - protein, 581 aa, Homo sapiens
MDTKDMNEFETEGFFALHQRRGAIKQAKVHHVKCHEFTATFFPQPTFCSVCHEFVWGLNKQGYQCRQCNAAIHKKCIDKVIAKCTGSAINSRETMFHKERFKIDMPHRFKVYNYKSPTFCEHCGTLLWGLARQGLKCDACGMNVHHRCQTKVANLCGINQKLMAEALAMIESTQQARCLRDTEQIFREGPVEIGLPCSIKNEARPPCLPTPGKREPQGISWESPLDEVDKMCHLPEPELNKERPSLQIKLKIEDFILHKMLGKGSFGKVFLAEFKKTNQFFAIKALKKDVVLMDDDVECTMVEKRVLSLAWEHPFLTHMFCTFQTKENLFFVMEYLNGGDLMYHIQSCHKFDLSRATFYAAEIILGLQFLHSKGIVYRDLKLDNILLDKDGHIKIADFGMCKENMLGDAKTNTFCGTPDYIAPEILLGQKYNHSVDWWSFGVLLYEMLIGQSPFHGQDEEELFHSIRMDNPFYPRWLEKEAKDLLVKLFVREPEKRLGVRGDIRQHPLFREINWEELERKEIDPPFRPKVKSPFDCSNFDKEFLNEKPRLSFADRALINSMDQNMFRNFSFMNPGMERLIS

SEQ ID NO: 59735 - protein, 343 aa, Homo sapiens
MASNSSDVKEFLAKAKEDFLKKWESPAQNTAHLDQFERIKTLGTGSFGRVMLVKHKETGNHYAMKILDKQKVVKLKQIEHTLNEKRILQAVNFPFLVKLEFSFKDNSNLYMVMEYVPGGEMFSHLRRIGRFSEPHARFYAAQIVLTFEYLHSLDLIYRDLKPENLLIDQQGYIQVTDFGFAKRVKGRTWTLCGTPEYLAPEIILSKGYNKAVDWWALGVLIYEMAAGYPPFFADQPIQIYEKIVSGKVRFPSHFSSDLKDLLRNLLQVDLTKRFGNLKNGVNDIKNHKWFATTDWIAIYQRKVEAPFIPKFKGPGDTSNFDDYEEEEIRVSINEKCGKEFSEF

SEQ ID NO: 59736 - protein, 381 aa, Homo sapiens
MESGSTAASEEARSLRECELYVQKHNIQALLKDSIVQLCTARPERPMAFLREYFERLEKEEAKQIQNLQKAGTRTDSREDEISPPPPNPVVKGRRRRGAISAEVYTEEDAASYVRKVIPKDYKTMAALAKAIEKNVLFSHLDDNERSDIFDAMFSVSFIAGETVIQQGDEGDNFYVIDQGETDVYVNNEWATSVGEGGSFGELALIYGTPRAATVKAKTNVKLWGIDRDSYRRILMGSTLRKRKMYEEFLSKVSILESLDKWERLTVADALEPVQFEDGQKIVVQGEPGDEFFIILEGSAAVLQRRSENEEFVEVGRLGPSDYFGEIALLMNRPRAATVVARGPLKCVKLDRPRFERVLGPCSDILKRNIQQYNSFVSLSV

SEQ ID NO: 59737 - protein, 912 aa, Homo sapiens
MSAPPVLRPPSPLLPVAAAAAAAAAALVPGSGPGPAPFLAPVAAPVGGISFHLQIGLSREPVLLLQDSSGDYSLAHVREMACSIVDQKFPECGFYGMYDKILLFRHDPTSENILQLVKAASDIQEGDLIEVVLSASATFEDFQIRPHALFVHSYRAPAFCDHCGEMLWGLVRQGLKCEGCGLNYHKRCAFKIPNNCSGVRRRRLSNVSLTGVSTIRTSSAELSTSAPDEPLLQKSPSESFIGREKRSNSQSYIGRPIHLDKILMSKVKVPHTFVIHSYTRPTVCQYCKKLLKGLFRQGLQCKDCRFNCHKRCAPKVPNNCLGEVTINGDLLSPGAESDVVMEEGSDDNDSERNSGLMDDMEEAMVQDAEMAMAECQNDSGEMQDPDPDHEDANRTISPSTSNNIPLMRVVQSVKHTKRKSSTVMKEGWMVHYTSKDTLRKRHYWRLDSKCITLFQNDTGSRYYKEIPLSEILSLEPVKTSALIPNGANPHCFEITTANVVYYVGENVVNPSSPSPNNSVLTSGVGADVARMWEIAIQHALMPVIPKGSSVGTGTNLHRDISVSISVSNCQIQENVDISTVYQIFPDEVLGSGQFGIVYGGKHRKTGRDVAIKIIDKLRFPTKQESQLRNEVAILQNLHHPGVVNLECMFETPERVFVVMEKLHGDMLEMILSSEKGRLPEHITKFLITQILVALRHLHFKNIVHCDLKPENVLLASADPFPQVKLCDFGFARIIGEKSFRRSVVGTPAYLAPEVLRNKGYNRSLDMWSVGVIIYVSLSGTFPFNEDEDIHDQIQNAAFMYPPNPWKEISHEAIDLINNLLQVKMRKRYSVDKTLSHPWLQDYQTWLDLRELECKIGERYITHESDDLRWEKYAGEQGLQYPTHLINPSASHSDTPETEETEMKALGERVSIL

SEQ ID NO: 59738 - protein, 878 aa, Homo sapiens
MATAPSYPAGLPGSPGPGSPPPPGGLELQSPPPLLPQIPAPGSGVSFHIQIGLTREFVLLPAASELAHVKQLACSIVDQKFPECGFYGLYDKILLFKHDPTSANLLQLVRSSGDIQEGDLVEVVLSASATFEDFQIRPHALTVHSYRAPAFCDHCGEMLFGLVRQGLKCDGCGLNYHKRCAFSIPNNCSGARKRRLSSTSLASGHSVRLGTSESLPCTAEELSRSTTELLPRRPPSSSSSSSASSYTGRPIELDKMLLSKVKVPHTFLIHSYTRPTVCQACKKLLKGLFRQGLQCKDCKFNCHKRCATRVPNDCLGEALINGDVPMEEATDFSEADKSALMDESEDSGVIPGSHSENALHASEEEEGEGGKAQSSLGYIPLMRVVQSVRHTTRKSSTTLREGWVVHYSNKDTLRKRHYWRLDCKCITLFQNNTTNRYYKEIPLSEILTVESAQNFSLVPPGTNPHCFEIVTANATYFVGEMPGGTPGGPSGQGAEAARGWETAIRQALMPVILQDAPSAPGHAPHRQASLSISVSNSQIQENVDIATVYQIFPDEVLGSGQFGVVYGGKHRKTGRDVAVKVIDKLRFPTKQESQLRNEVAILQSLRHPGIVNLECMFETPEKVFVVMEKLHGDMLEMILSSEKGRLPERLTKFLITQILVALRHLHFKNIVHCDLKPENVLLASADPFPQVKLCDFGFARIIGEKSFRRSVVGTPAYLAPEVLLNQGYNRSLDMWSVGVIMYVSLSGTFPFNEDEDINDQIQNAAFMYPASPWSHISAGAIDLINNLLQVKMRKRYSVDKSLSHPWLQEYQTWLDLRELEGKMGERYITHESDDVRWEQFAAEHPLPGSGLPTDRDLGGACPPQDHDMQGLAERISVL

SEQ ID NO: 59739 - protein, 878 aa, Homo sapiens; identical to SEQ ID NO: 59738

SEQ ID NO: 59740 - protein, 721 aa, Homo sapiens
MLFGLVRQGLKCDGCGLNYHKRCAFSIPNNCSGARKRRLSSTSLASGHSVRLGTSESLPCTAEELSRSTTELLPRRPPSSSSSSSASSYTGRPIELDKMLLSKVKVPHTFLIHSYTRPTVCQACKKLLKGLFRQGLQCKDCKFNCHKRCATRVPNDCLGEALINGDVPMEEATDFSEADKSALMDESEDSGVIPGSHSENALHASEEEEGEGGKAQSSLGYIPLMRVVQSVRHTTRKSSTTLREGWVVHYSNKDTLRKRHYWRLDCKCITLFQNNTTNRYYKEIPLSEILTVESAQNFSLVPPGTNPHCFEIVTANATYFVGEMPGGTPGGPSGQGAEAARGWETAIRQALMPVILQDAPSAPGHAPHRQASLSISVSNSQIQENVDIATVYQIFPDEVLGSGQFGVVYGGKHRKTGRDVAVKVIDKLRFPTKQESQLRNEVAILQSLRHPGIVNLECMFETPEKVFVVMEKLHGDMLEMILSSEKGRLPERLTKFLITQILVALRHLHFKNIVHCDLKPENVLLASADPFPQVKLCDFGFARIIGEKSFRRSVVGTPAYLAPEVLLNQGYNRSLDMWSVGVIMYVSLSGTFPFNEDEDINDQIQNAAFMYPASPWSHISAGAIDLINNLLQVKMRKRYSVDKSLSHPWLQEYQTWLDLRELEGKMGERYITHESDDVRWEQFAAEHPLPGSGLPTDRDLGGACPPQDHDMQGLAERISVL

SEQ ID NO: 59741 - protein, 493 aa, Homo sapiens
MRRRRAAVAAGFCASFLLGSVLNVLFAPGSEPPRPGQSPEPSPAPGPGRRGGRGELARQIRARYEEVQRYSRGGPGPGAGRPERRRLMDLAPGGPGLPRPRPPWARPLSDGAPGWPPAPGPGSPGPGPRLGCAALRNVSGAQYMGSGYTKAVYRVRLPGGAAVALKAVDFSGHDLGSCVREFGVRRGCYRLAAHKLLKEMVLLERLRHPNVLQLYGYCYQDSEDIPDTLTTITELGAPVEMIQLLQTSWEDRFRICLSLGRLLHHLAHSPLGSVTLLDFRPRQFVLVDGELKVTDLDDARVEETPCAGSTDCILEFPARNFTLPCSAQGWCEGMNEKRNLYNAYRFFFTYLLPHSAPPSLRPLLDSIVNATGELAWGVDETLAQLEKVLHLYRSGQYLQNSTASSSTEYQCIPDSTIPQEDYRCWPSYHHGSCLLSVFNLAEAVDVCESHAQCRAFVVTNQTTWTGRQLVFFKTGWSQVVPDPNKTTYVKASG

SEQ ID NO: 59742 - protein, 942 aa, Homo sapiens
MASDAVQSEPRSWSLLEQLGLAGADLAAPGVQQQLELERERLRREIRKELKLKEGAENLRRATTDLGRSLGPVELLLRGSSRRLDLLHQQLQELHAHVVLPDPAATHDGPQSPGAGGPTCSATNLSRVAGLEKQLAIELKVKQGAENMIQTYSNGSTKDRKLLLTAQQMLQDSKTKIDIIRMQLRRALQAGQLENQAAPDDTQGSPDLGAVELRIEELRHHFRVEHAVAEGAKNVLRLLSAAKAPDRKAVSEAQEKLTESNQKLGLLREALERRLGELPADHPKGRLLREELAAASSAAFSTRLAGPFPATHYSTLCKPAPLTGTLEVRVVGCRDLPETIPWNPTPSMGGPGTPDSRPPFLSRPARGLYSRSGSLSGRSSLKAEAENTSEVSTVLKLDNTVVGQTSWKPCGPNAWDQSFTLELERARELELAVFWRDQRGLCALKFLKLEDFLDNERHEVQLDMEPQGCLVAEVTFRNPVIERIPRLRRQKKIFSKQQGKAFQRARQMNIDVATWVRLLRRLIPNATGTGTFSPGASPGSEARTTGDISVEKLNLGTDSDSSPQKSSRDPPSSPSSLSSPIQESTAPELPSETQETPGPALCSPLRKSPLTLEDFKFLAVLGRGHFGKVLLSEFRPSGELFAIKALKKGDIVARDEVESLMCEKRILAAVTSAGHPFLVNLFGCFQTPEHVCFVMEYSAGGDLMLHIHSDVFSEPRAIFYSACVVLGLQFLHEHKIVYRDLKLDNLLLDTEGYVKIADFGLCKEGMGYGDRTSTFCGTPEFLAPEVLTDTSYTRAVDWWGLGVLLYEMLVGESPFPGDDEEEVFDSIVNDEVRYPRFLSAEAIGIMRRLLRRNPERRLGSSERDAEDVKKQPFFRTLGWEALLARRLPPPFVPTLSGRTDVSNFDEEFTGEAPTLSPPRDARPLTAAEQAAFLDFDFVAGGC

SEQ ID NO: 59743 - protein, 948 aa, Homo sapiens
MAEANNPSEQELESEPRSWSLLEQLGLAGADLAAPGVQQQLELERERLRREIRKELKLKEGAENLRRATTDLGRSLGPVELLLRGSSRRLDLLHQQLQELHAHVVLPDPAATHDGPQSPGAGGPTCSATNLSRVAGLEKQLAIELKVKQGAENMIQTYSNGSTKDRKLLLTAQQMLQDSKTKIDIIRMQLRRALQAGQLENQAAPDDTQGSPDLGAVELRIEELRHHFRVEHAVAEGAKNVLRLLSAAKAPDRKAVSEAQEKLTESNQKLGLLREALERRLGELPADHPKGRLLREELAAASSAAFSTRLAGPFPATHYSTLCKPAPLTGTLEVRVVGCRDLPETIPWNPTPSMGGPGTPDSRPPFLSRPARGLYSRSGSLSGRSSLKAEAENTSEVSTVLKLDNTVVGQTSWKPCGPNAWDQSFTLELERARELELAVFWRDQRGLCALKFLKLEDFLDNERHEVQLDMEPQGCLVAEVTFRNPVIERIPRLRRQKKIFSKQQGKAFQRARQMNIDVATWVRLLRRLIPNATGTGTFSPGASPGSEARTTGDISVEKLNLGTDSDSSPQKSSRDPPSSPSSLSSPIQESTAPELPSETQETPGPALCSPLRKSPLTLEDFKFLAVLGRGHFGKVLLSEFRPSGELFAIKALKKGDIVARDEVESLMCEKRILAAVTSAGHPFLVNLFGCFQTPEHVCFVMEYSAGGDLMLHIHSDVFSEPRAIFYSACVVLGLQFLHEHKIVYRDLKLDNLLLDTEGYVKIADFGLCKEGMGYGDRTSTFCGTPEFLAPEVLTDTSYTRAVDWWGLGVLLYEMLVGESPFPGDDEEEVFDSIVNDEVRYPRFLSAEAIGIMRRLLRRNPERRLGSSERDAEDVKKQPFFRTLGWEALLARRLPPPFVPTLSGRTDVSNFDEEFTGEAPTLSPPRDARPLTAAEQAAFLDFDFVAGGC

SEQ ID NO: 59744 - protein, 604 aa, Homo sapiens
MASNPERGEILLTELQGDSRSLPFSENVSAVQKLDFSDTMVQQKLDDIKDRIKREIRKELKIKEGAENLRKVTTDKKSLAYVDNILKKSNKKLEELHHKLQELNAHIVVSDPEDITDCPRTPDTPNNDPRCSTSNNRLKALQKQLDIELKVKQGAENMIQMYSNGSSKDRKLHGTAQQLLQDSKTKIEVIRMQILQAVQTNELAFDNAKPVISPLELRMEELRHHFRIEFAVAEGAKNVMKLLGSGKVTDRKALSEAQARFNESSQKLDLLKYSLEQRLNEVPKNHPKSRIIIEELSLVAASPTLSPRQSMISTQNQYSTLSKPAALTGTLEVRLMGCQDILENVPGRSKATSVALPGWSPSETRSSFMSRTSKSKSGSSRNLLKTDDLSNDVCAVLKLDNTVVGQTSWKPISNQSWDQKFTLELDRSRELEISVYWRDWRSLCAVKFLRLEDFLDNQRHGMCLYLEPQGTLFAEVTFFNPVIERRPKLQRQKKIFSKQQGKTFLRAPQMNINIATWGRLVRRAIPTVNHSGTFSPQAPVPTTVPVVDVRIPQLAPPARYVSEILSISYTKLLGHSYVLIIAGVLSLAFFPSSILKVVFCLLKK

SEQ ID NO: 59745 - protein, 827 aa, Homo sapiens
MIQMYSNGSSKDRKLHGTAQQLLQDSKTKIEVIRMQILQAVQTNELAFDNAKPVISPLELRMEELRHHFRIEFAVAEGAKNVMKLLGSGKVTDRKALSEAQARFNESSQKLDLLKYSLEQRLNEVPKNHPKSRIIIEELSLVAASPTLSPRQSMISTQNQYSTLSKPAALTGTLEVRLMGCQDILENVPGRSKATSVALPGWSPSETRSSFMSRTSKSKSGSSRNLLKTDDLSNDVCAVLKLDNTVVGQTSWKPISNQSWDQKFTLELDRSRELEISVYWRDWRSLCAVKFLRLEDFLDNQRHGMCLYLEPQGTLFAEVTFFNPVIERRPKLQRQKKIFSKQQGKTFLRAPQMNINIATWGRLVRRAIPTVNHSGTFSPQAPVPTTVPVVDVRIPQLAPPASDSTVTKLDFDLEPEPPPAPPRASSLGEIDESSELRVLDIPGQDSETVFDIQNDRNSILPKSQSEYKPDTPQSGLEYSGIQELEDRRSQQRFQFNLQDFRCCAVLGRGHFGKVLLAEYKNTNEMFAIKALKKGDIVARDEVDSLMCEKRIFETVNSVRHPFLVNLFACFQTKEHVCFVMEYAAGGDLMMHIHTDVFSEPRAVFYAACVVLGLQYLHEHKIVYRDLKLDNLLLDTEGFVKIADFGLCKEGMGYGDRTSTFCGTPEFLAPEVLTETSYTRAVDWWGLGVLIYEMLVGESPFPGDDEEEVFDSIVNDEVRYPRFLSTEAISIMRRLLRRNPERRLGASEKDAEDVKKHPFFRLIDWSALMDKKVKPPFIPTIRGREDVSNFDDEFTSEAPILTPPREPRILSEEEQEMFRDFDYIADWC

SEQ ID NO: 59746 - protein, 936 aa, Homo sapiens
MASNPERGEILLTELQGDSRSLPFSENVSAVQKLDFSDTMVQQKLDDIKDRIKREIRKELKIKEGAENLRKVTTDKKSLAYVDNILKKSNKKLEELHHKLQELNAHIVVSDPEDITDCPRTPDTPNNDPRCSTSNNRLKALQKQLDIELKVKQGAENMIQMYSNGSSKDRKLHGTAQQLLQDSKTKIEVIRMQILQAVQTNELAFDNAKPVISPLELRMEELRHHFRIEFAVAEGAKNVMKLLGSGKVTDRKALSEAQARFNESSQKLDLLKYSLEQRLNEVPKNHPKSRIIIEELSLVAASPTLSPRQSMISTQNQYSTLSKPAALTGTLEVRLMGCQDILENVPGRSKATSVALPGWSPSETRSSFMSRTSKSKSGSSRNLLKTDDLSNDVCAVLKLDNTVVGQTSWKPISNQSWDQKFTLELDRVTFFNPVIERRPKLQRQKKIFSKQQGKTFLRAPQMNINIATWGRLVRRAIPTVNHSGTFSPQAPVPTTVPVVDVRIPQLAPPASDSTVTKLDFDLEPEPPPAPPRASSLGEIDESSELRVLDIPGQDSETVFDIQNDRNSILPKSQSEYKPDTPQSGLEYSGIQELEDRRSQQRFQFNLQDFRCCAVLGRGHFGKVLLAEYKNTNEMFAIKALKKGDIVARDEVDSLMCEKRIFETVNSVRHPFLVNLFACFQTKEHVCFVMEYAAGGDLMMHIHTDVFSEPRAVFYAACVVLGLQYLHEHKIVYRDLKLDNLLLDTEGFVKIADFGLCKEGMGYGDRTSTFCGTPEFLAPEVLTETSYTRAVDWWGLGVLIYEMLVGESPFPGDDEEEVFDSIVNDEVRYPRFLSTEAISIMRRLLRRNPERRLGASEKDAEDVKKHPFFRLIDWSALMDKKVKPPFIPTIRGREDVSNFDDEFTSEAPILTPPREPRILSEEEQEMFRDFDYIADWC

SEQ ID NO: 59747 - protein, 984 aa, Homo sapiens
MASNPERGEILLTELQGDSRSLPFSENVSAVQKLDFSDTMVQQKLDDIKDRIKREIRKELKIKEGAENLRKVTTDKKSLAYVDNILKKSNKKLEELHHKLQELNAHIVVSDPEDITDCPRTPDTPNNDPRCSTSNNRLKALQKQLDIELKVKQGAENMIQMYSNGSSKDRKLHGTAQQLLQDSKTKIEVIRMQILQAVQTNELAFDNAKPVISPLELRMEELRHHFRIEFAVAEGAKNVMKLLGSGKVTDRKALSEAQARFNESSQKLDLLKYSLEQRLNEVPKNHPKSRIIIEELSLVAASPTLSPRQSMISTQNQYSTLSKPAALTGTLEVRLMGCQDILENVPGRSKATSVALPGWSPSETRSSFMSRTSKSKSGSSRNLLKTDDLSNDVCAVLKLDNTVVGQTSWKPISNQSWDQKFTLELDRSRELEISVYWRDWRSLCAVKFLRLEDFLDNQRHGMCLYLEPQGTLFAEVTFFNPVIERRPKLQRQKKIFSKQQGKTFLRAPQMNINIATWGRLVRRAIPTVNHSGTFSPQAPVPTTVPVVDVRIPQLAPPASDSTVTKLDFDLEPEPPPAPPRASSLGEIDESSELRVLDIPGQDSETVFDIQNDRNSILPKSQSEYKPDTPQSGLEYSGIQELEDRRSQQRFQFNLQDFRCCAVLGRGHFGKVLLAEYKNTNEMFAIKALKKGDIVARDEVDSLMCEKRIFETVNSVRHPFLVNLFACFQTKEHVCFVMEYAAGGDLMMHIHTDVFSEPRAVFYAACVVLGLQYLHEHKIVYRDLKLDNLLLDTEGFVKIADFGLCKEGMGYGDRTSTFCGTPEFLAPEVLTETSYTRAVDWWGLGVLIYEMLVGESPFPGDDEEEVFDSIVNDEVRYPRFLSTEAISIMRRLLRRNPERRLGASEKDAEDVKKHPFFRLIDWSALMDKKVKPPFIPTIRGREDVSNFDDEFTSEAPILTPPREPRILSEEEQEMFRDFDYIADWC

SEQ ID NO: 59748 - protein, 211 aa, Homo sapiens
  VARIANT 1: note = MOD_RES - Any amino acid
XEELRHHFRIEFAVAEGAKNVMKLLGSGKVTDRKALSEAQARFNESSQKLDLLKYSLEQRLNEVPKNHPKSRIIIEELSLVAASPTLSPRQSMISTQNQYSTLSKPAALTDDVCAVLKLDNTVVGQTSWKPISNQSWDQKFTLELDRSRELEISVYWRDWRSLCAVKFLRLEDFLDNQRHGMCLYLEPQGTLFAEVTFFNPVIERRPKLQR

SEQ ID NO: 59749 - protein, 65 aa, Homo sapiens
  VARIANT 1: note = MOD_RES - Any amino acid
XGFVKIADFGLCKEGMGYGDRTSTFCGTPEFLAPEVLTETSYTRAVDWWGLGVLIYEMLVGETSV

SEQ ID NO: 59750 - protein, 658 aa, Homo sapiens
MNSTLEVRLMGCQDILENVPGRSKATSVALPGWSPSETRSSFMSRTSKSKSGSSRNLLKTDDLSNDVCAVLKLDNTVVGQTSWKPISNQSWDQKFTLELDRSRELEISVYWRDWRSLCAVKFLRLEDFLDNQRHGMCLYLEPQGTLFAEVTFFNPVIERRPKLQRQKKIFSKQQGKTFLRAPQMNINIATWGRLVRRAIPTVNHSGTFSPQAPVPTTVPVVDVRIPQLAPPASDSTVTKLDFDLEPEPPPAPPRASSLGEIDESSELRVLDIPGQDSETVFDIQNDRNSILPKSQSEYKPDTPQSGLEYSGIQELEDRRSQQRFQFNLQDFRCCAVLGRGHFGKVLLAEYKNTNEMFAIKALKKGDIVARDEVDSLMCEKRIFETVNSVRHPFLVNLFACFQTKEHVCFVMEYAAGGDLMMHIHTDVFSEPRAVFYAACVVLGLQYLHEHKIVYRDLKLDNLLLDTEGFVKIADFGLCKEGMGYGDRTSTFCGTPEFLAPEVLTETSYTRAVDWWGLGVLIYEMLVGESPFPGDDEEEVFDSIVNDEVRYPRFLSTEAISIMRRLLRRNPERRLGASEKDAEDVKKHPFFRLIDWSALMDKKVKPPFIPTIRGREDVSNFDDEFTSEAPILTPPREPRILSEEEQEMFRDFDYIADWC

SEQ ID NO: 59751 - protein, 111 aa, Homo sapiens
MHIHTDVFSEPRAVFYAACVVLGLQYLHEHKIVYRDLKLDNLLLDTEGFVKIADFGLCKEGMGYGDRTSTFCGTPEFLAPEVLTETSYTRAVDWWGLGVLIYEMLVGETSV

SEQ ID NO: 59752 - protein, 889 aa, Homo sapiens
MEEGAPRQPGPSQWPPEDEKEVIRRAIQKELKIKEGVENLRRVATDRRHLGHVQQLLRSSNRRLEQLHGELRELHARILLPGPGPGPAEPVASGPRPWAEQLRARHLEALRRQLHVELKVKQGAENMTHTCASGTPKERKLLAAAQQMLRDSQLKVALLRMKISSLEASGSPEPGPELLAEELQHRLHVEAAVAEGAKNVVKLLSSRRTQDRKALAEAQAQLQESSQKLDLLRLALEQLLEQLPPAHPLRSRVTRELRAAVPGYPQPSGTPVKPTALTGTLQVRLLGCEQLLTAVPGRSPAAALASSPSEGWLRTKAKHQRGRGELASEVLAVLKVDNRVVGQTGWGQVAEQSWDQTFVIPLERARELEIGVHWRDWRQLCGVAFLRLEDFLDNACHQLSLSLVPQGLLFAQVTFCDPVIERRPRLQRQERIFSKRRGQDFLRASQMNLGMAAWGRLVMNLLPPCSSPSTISPPKGCPRTPTTLREASDPATPSNFLPKKTPLGEEMTPPPKPPRLYLPQEPTSEETPRTKRPHMEPRTRRGPSPPASPTRKPPRLQDFRCLAVLGRGHFGKVLLVQFKGTGKYYAIKALKKQEVLSRDEIESLYCEKRILEAVGCTGHPFLLSLLACFQTSSHACFVTEFVPGGDLMMQIHEDVFPEPQARFYVACVVLGLQFLHEKKIIYRDLKLDNLLLDAQGFLKIADFGLCKEGIGFGDRTSTFCGTPEFLAPEVLTQEAYTRAVDWWGLGVLLYEMLVGECPFPGDTEEEVFDCIVNMDAPYPGFLSVQGLEFIQKLLQKCPEKRLGAGEQDAEEIKVQPFFRTTNWQALLARTIQPPFVPTLCGPADLRYFEGEFTGLPPALTPPAPHSLLTARQQAAFRDFDFVSERFLEP

SEQ ID NO: 59753 - protein, 574 aa, Homo sapiens
MRRLSSWRKMATAEKQKHDGRVKIGHYILGDTLGVGTFGKVKVGKHELTGHKVAVKILNRQKIRSLDVVGKIRREIQNLKLFRHPHIIKLYQVISTPSDIFMVMEYVSGGELFDYICKNGRKSDVPGVVKTGSTKELDEKESRRLFQQILSGVDYCHRHMVVHRDLKPENVLLDAHMNAKIADFGLSNMMSDGEFLRTSCGSPNYAAPEVISGRLYAGPEVDIWSSGVILYALLCGTLPFDDDHVPTLFKKICDGIFYTPQYLNPSVISLLKHMLQVDPMKRATIKDIREHEWFKQDLPKYLFPEDPSYSSTMIDDEALKEVCEKFECSEEEVLSCLYNRNHQDPLAVAYHLIIDNRRIMNEAKDFYLATSPPDSFLDDHHLTRPHPERVPFLVAETPRARHTLDELNPQKSKHQGVRKAKWHLGIRSQSRPNDIMAEVCRAIKQLDYEWKVVNPYYLRVRRKNPVTSTYSKMSLQLYQVDSRTYLLDFRSIDDEITEAKSGTATPQRSGSVSNYRSCQRSDSDAEAQGKSSEVSLTSSVTSLDSSPVDLTPRPGSHTIEFFEMCANLIKILAQ

SEQ ID NO: 59754 - protein, 559 aa, Homo sapiens
MRRLSSWRKMATAEKQKHDGRVKIGHYILGDTLGVGTFGKVKVGKHELTGHKVAVKILNRQKIRSLDVVGKIRREIQNLKLFRHPHIIKLYQVISTPSDIFMVMEYVSGGELFDYICKNGRLDEKESRRLFQQILSGVDYCHRHMVVHRDLKPENVLLDAHMNAKIADFGLSNMMSDGEFLRTSCGSPNYAAPEVISGRLYAGPEVDIWSSGVILYALLCGTLPFDDDHVPTLFKKICDGIFYTPQYLNPSVISLLKHMLQVDPMKRATIKDIREHEWFKQDLPKYLFPEDPSYSSTMIDDEALKEVCEKFECSEEEVLSCLYNRNHQDPLAVAYHLIIDNRRIMNEAKDFYLATSPPDSFLDDHHLTRPHPERVPFLVAETPRARHTLDELNPQKSKHQGVRKAKWHLGIRSQSRPNDIMAEVCRAIKQLDYEWKVVNPYYLRVRRKNPVTSTYSKMSLQLYQVDSRTYLLDFRSIDDEITEAKSGTATPQRSGSVSNYRSCQRSDSDAEAQGKSSEVSLTSSVTSLDSSPVDLTPRPGSHTIEFFEMCANLIKILAQ

SEQ ID NO: 59755 - protein, 552 aa, Homo sapiens
MAEKQKHDGRVKIGHYVLGDTLGVGTFGKVKIGEHQLTGHKVAVKILNRQKIRSLDVVGKIKREIQNLKLFRHPHIIKLYQVISTPTDFFMVMEYVSGGELFDYICKHGRVEEMEARRLFQQILSAVDYCHRHMVVHRDLKPENVLLDAHMNAKIADFGLSNMMSDGEFLRTSCGSPNYAAPEVISGRLYAGPEVDIWSCGVILYALLCGTLPFDDEHVPTLFKKIRGGVFYIPEYLNRSVATLLMHMLQVDPLKRATIKDIREHEWFKQDLPSYLFPEDPSYDANVIDDEAVKEVCEKFECTESEVMNSLYSGDPQDQLAVAYHLIIDNRRIMNQASEFYLASSPPSGSFMDDSAMHIPPGLKPHPERMPPLIADSPKARCPLDALNTTKPKSLAVKKAKWHLGIRSQSKPYDIMAEVYRAMKQLDFEWKVVNAYHLRVRRKNPVTGNYVKMSLQLYLVDNRSYLLDFKSIDDEVVEQRSGSSTPQRSCSAAGLHRPRSSFDSTTAESHSLSGSLTGSLTGSTLSSVSPRLGSHTMDFFEMCASLITTLAR

SEQ ID NO: 59756 - protein, 247 aa, Homo sapiens
MLTITDFINILHRYYKSALVQIYELEEHKIETWREVYLQDSFKPLVCISPNASLFDAVSSLIRNKIHRLPVIDPESGNTLYILTHKRILKFLKLFITEFPKPEFMSKSLEELQIGTYANIAMVRTTTPVYVALGIFVQHRVSALPVVDEKGRVVDIYSKFDVINLAAEKTYNNLDVSVTKALQHRSHYFEGVLKCYLHETLETIINRLVEAEVHRLVVVDENDVVKGIVSLSDILQALVLTGGEKKP

SEQ ID NO: 59757 - protein, 331 aa, Homo sapiens
METVISSDSSPAVENEHPQETPESNNSVYTSFMKSHRCYDLIPTSSKLVVFDTSLQVKKAFFALVTNGVRAAPLWDSKKQSFVGMLTITDFINILHRYYKSALVQIYELEEHKIETWREVYLQDSFKPLVCISPNASLFDAVSSLIRNKIHRLPVIDPESGNTLYILTHKRILKFLKLFITEFPKPEFMSKSLEELQIGTYANIAMVRTTTPVYVALGIFVQHRVSALPVVDEKGRVVDIYSKFDVINLAAEKTYNNLDVSVTKALQHRSHYFEGVLKCYLHETLETIINRLVEAEVHRLVVVDENDVVKGIVSLSDILQALVLTGGEKKP

SEQ ID NO: 59758 - protein, 569 aa, Homo sapiens
MGSAVMDTKKKKDVSSPGGSGGKKNASQKRRSLRVHIPDLSSFAMPLLDGDLEGSGKHSSRKVDSPFGPGSPSKGFFSRGPQPRPSSPMSAPVRPKTSPGSPKTVFPFSYQESPPRSPRRMSFSGIFRSSSKESSPNSNPATSPGGIRFFSRSRKTSGLSSSPSTPTQVTKQHTFPLESYKHEPERLENRIYASSSPPDTGQRFCPSSFQSPTRPPLASPTHYAPSKAAALAAALGPAEAGMLEKLEFEDEAVEDSESGVYMRFMRSHKCYDIVPTSSKLVVFDTTLQVKKAFFALVANGVRAAPLWESKKQSFVGMLTITDFINILHRYYKSPMVQIYELEEHKIETWRELYLQETFKPLVNISPDASLFDAVYSLIKNKIHRLPVIDPISGNALYILTHKRILKFLQLFMSDMPKPAFMKQNLDELGIGTYHNIAFIHPDTPIIKALNIFVERRISALPVVDESGKVVDIYSKFDVINLAAEKTYNNLDITVTQALQHRSQYFEGVVKCNKLEILETIVDRIVRAEVHRLVVVNEADSIVGIISLSDILQALILTPAGAKQKETETE

SEQ ID NO: 59759 - protein, 444 aa, Homo sapiens
MKRFGSLRSNKKHKDQNRSTERRQSEPHGLFASGLSSSPSTPTQVTKQHTFPLESYKHEPERLENRIYASSSPPDTGQRFCPSSFQSPTRPPLASPTHYAPSKAAALAAALGPAEAGMLEKLEFEDEVEDSESGVYMRFMRSHKCYDIVPTSSKLVVFDTTLQVKKAFFALVANGVRAAPLWESKKQSFVGMLTITDFINILHRYYKSPMVQIYELEEHKIETWRELYLQETFKPLVNISPDASLFDAVYSLIKNKIHRLPVIDPISGNALYILTHKRILKFLQLFMSDMPKPAFMKQNLDELGIGTYHNIAFIHPDTPIIKALNIFVERRISALPVVDESGKVVDIYSKFDVINLAAEKTYNNLDITVTQALQHRSQYFEGVVKCNKLEILETIVDRIVRAEVHRLVVVNEADSIVGIISLSDILQALILTPAGAKQKETETE

SEQ ID NO: 59760 - protein, 489 aa, Homo sapiens
MEPGLEHALRRTPSWSSLGGSEHQEMSFLEQENSSSWPSPAVTSSSERIRGKRRAKALRWTRQKSVEEGEPPGQGEGPRSRPAAESTGLEATFPKTTPLAQADPAGVGTPPTGWDCLPSDCTASAAGSSTDDVELATEFPATEAWECELEGLLEERPALCLSPQAPFPKLGWDDELRKPGAQIYMRFMQEHTCYDAMATSSKLVIFDTMLEIKKAFFALVANGVRAAPLWDSKKQSFVGMLTITDFILVLHRYYRSPLVQIYEIEQHKIETWREIYLQGCFKPLVSISPNDSLFEAVYTLIKNRIHRLPVLDPVSGNVLHILTHKRLLKFLHIFGSLLPRPSFLYRTIQDLGIGTFRDLAVVLETAPILTALDIFVDRRVSALPVVNECGQVVGLYSRFDVIHLAAQQTYNHLDMSVGEALRQRTLCLEGVLSCQPHESLGEVIDRIAREQVHRLVLVDETQHLLGVVSLSDILQALVLSPAGIDALGA

SEQ ID NO: 59761 - protein, 353 aa, Homo sapiens
MEPGLEHALRRTPSWSSLGGSEHQEMSFLEQENSSSWPSPAVTSSSERIRGKRRAKALRWTRQKSVEEGEPPGQGEGPRSRPAAESTGLEATFPKTTPLAQADPAGVGTPPTGWDCLPSDCTASAAGSSTDDVELATEFPATEAWECELEGLLEERPALCLSPQAPFPKLGWDDELRKPGAQIYMRFMQEHTCYDAMATSSKLVIFDTMLEIKKAFFALVANGVRAAPLWDSKKQSFVGMLTITDFILVLHRYYRSPLRSTCKAASSLWSPSLLMIACLKLSTPSSRTGSIACLFLTRCQATYSTSSHTNACSSSCTSLVPCCPGPPSSTALSKIWASAHSETWLWCWRQHPS

SEQ ID NO: 59762 - protein, 464 aa, Homo sapiens
MSFLEQENSSSWPSPAVTSSSERIRGKRRAKALRWTRQKSVEEGEPPGQGEGPRSRPAAESTGLEATFPKTTPLAQADPAGVGTPPTGWDCLPSDCTASAAGSSTDDVELATEFPATEAWECELEGLLEERPALCLSPQAPFPKLGWDDELRKPGAQIYMRFMQEHTCYDAMATSSKLVIFDTMLEIKKAFFALVANGVRAAPLWDSKKQSFVGMLTITDFILVLHRYYRSPLVQIYEIEQHKIETWREIYLQGCFKPLVSISPNDSLFEAVYTLIKNRIHRLPVLDPVSGNVLHILTHKRLLKFLHIFGSLLPRPSFLYRTIQDLGIGTFRDLAVVLETAPILTALDIFVDRRVSALPVVNECGQVVGLYSRFDVIHLAAQQTYNHLDMSVGEALRQRTLCLEGVLSCQPHESLGEVIDRIAREQVHRLVLVDETQHLLGVVSLSDILQALVLSPAGIDALGA

SEQ ID NO: 59763 - protein, 489 aa, Homo sapiens; identical to SEQ ID NO: 59760

SEQ ID NO: 59764 - protein, 305 aa, Homo sapiens
MRFMQEHTCYDAMATSSKLVIFDTMLEIKKAFFALVANGVRAAPLWDSKKQSFVGMLTITDFILVLHRYYRSPLVQIYEIEQHKIETWREIYLQGCFKPLVSISPNDSLFEAVYTLIKNRIHRLPVLDPVSGNVLHILTHKRLLKFLHIFGSLLPRPSFLYRTIQDLGIGTFRDLAVVLETAPILTALDIFVDRRVSALPVVNECGQVVGLYSRFDVIHLAAQQTYNHLDMSVGEALRQRTLCLEGVLSCQPHESLGEVIDRIAREQVHRLVLVDETQHLLGVVSLSDILQALVLSPAGIDALGA

SEQ ID NO: 59765 - protein, 351 aa, Homo sapiens
MGNAAAAKKGSEQESVKEFLAKAKEDFLKKWESPAQNTAHLDQFERIKTLGTGSFGRVMLVKHKETGNHYAMKILDKQKVVKLKQIEHTLNEKRILQAVNFPFLVKLEFSFKDNSNLYMVMEYVPGGEMFSHLRRIGRFSEPHARFYAAQIVLTFEYLHSLDLIYRDLKPENLLIDQQGYIQVTDFGFAKRVKGRTWTLCGTPEYLAPEIILSKGYNKAVDWWALGVLIYEMAAGYPPFFADQPIQIYEKIVSGKVRFPSHFSSDLKDLLRNLLQVDLTKRFGNLKNGVNDIKNHKWFATTDWIAIYQRKVEAPFIPKFKGPGDTSNFDDYEEEEIRVSINEKCGKEFSEF

SEQ ID NO: 59766 - protein, 343 aa, Homo sapiens; identical to SEQ ID NO: 59735

SEQ ID NO: 59767 - protein, 351 aa, Homo sapiens; identical to SEQ ID NO: 59765

SEQ ID NO: 59768 - protein, 230 aa, Homo sapiens
MLVKHKETGNHYAMKILDKQKVVKLKQIEHTLNEKRILQAVNFPFLVKLEFSFKDNSNLYMVMEYVPGGEMFSHLRRIGRFSEPHARFYAAQIVLTFEYLHSLDLIYRDLKPENLLIDQQGYIQVTDFGFAKRVKGRTWTLCGTPEYLAPEIILSKGYNKAVDWWALGVLIYEMAAGYPPFFADQPIQIYEKIVSGKVRSGCGDTALEETDRSLLTHPIPWGALLVVRII

SEQ ID NO: 59769 - protein, 357 aa, Homo sapiens
MGLSRKSSDASACSSSEISDFVKEFLAKAKEDFLKKWENPTQNNAGLEDFERKKTLGTGSFGRVMLVKHKATEQYYAMKILDKQKVVKLKQIEHTLNEKRILQAVNFPFLVRLEYAFKDNSNLYMVMEYVPGGEMFSHLRRIGRFSEPHARFYAAQIVLTFEYLHSLDLIYRDLKPENLLIDHQGYIQVTDFGFAKRVKGRTWTLCGTPEYLAPEIILSKGYNKAVDWWALGVLIYEMAAGYPPFFADQPIQIYEKIVSGKVRFPSHFSSDLKDLLRNLLQVDLTKRFGNLKNGVSDIKTHKWFATTDWIAIYQRKVEAPFIPKFRGSGDTSNFDDYEEEDIRVSITEKCAKEFGEF

SEQ ID NO: 59770 - protein, 264 aa, Homo sapiens
MSARKSSDASACSSSEISDSFVKEFLAKAKEDFLKKWENPTQNNAGLEDFERKKTLGTGSFGRVMLVKHKATEQYYAMKILDKQKVVKLKQIEHTLNEKRILQAVNFPFLVRLEYAFKDNSNLYMVMEYVPGGEMFSHLRRIGRFSEPHARFYAAQIVLTFEYLHSLDLIYRDLKPENLLIDHQGYIQVTDFGFAKRVKGRTWTLCGTPEYLAPEIILSKGYNKAVDWWALGVLIYEMAAGYPPFFADQPIQIYEKIVSGKQNF

SEQ ID NO: 59771 - protein, 313 aa, Homo sapiens
MPDLKILKGKTLGTGSFGRVMLVKHKATEQYYAMKILDKQKVVKLKQIEHTLNEKRILQAVNFPFLVRLEYAFKDNSNLYMVMEYVPGGEMFSHLRRIGRFSEPHARFYAAQIVLTFEYLHSLDLIYRDLKPENLLIDHQGYIQVTDFGFAKRVKGRTWTLCGTPEYLAPEIILSKGYNKAVDWWALGVLIYEMAAGYPPFFADQPIQIYEKIVSGKVRFPSHFSSDLKDLLRNLLQVDLTKRFGNLKNGVSDIKTHKWFATTDWIAIYQRKVEAPFIPKFRGSGDTSNFDDYEEEDIRVSITEKCAKEFGEF

SEQ ID NO: 59772 - protein, 355 aa, Homo sapiens
MGLSRKSSDASACSSSEISVKEFLAKAKEDFLKKWENPTQNNAGLEDFERKKTLGTGSFGRVMLVKHKATEQYYAMKILDKQKVVKLKQIEHTLNEKRILQAVNFPFLVRLEYAFKDNSNLYMVMEYVPGGEMFSHLRRIGRFSEPHARFYAAQIVLTFEYLHSLDLIYRDLKPENLLIDHQGYIQVTDFGFAKRVKGRTWTLCGTPEYLAPEIILSKGYNKAVDWWALGVLIYEMAAGYPPFFADQPIQIYEKIVSGKVRFPSHFSSDLKDLLRNLLQVDLTKRFGNLKNGVSDIKTHKWFATTDWIAIYQRKVEAPFIPKFRGSGDTSNFDDYEEEDIRVSITEKCAKEFGEF

SEQ ID NO: 59773 - protein, 245 aa, Homo sapiens
MGLLKEFLAKAKEDFLKKWENPTQNNAGLEDFERKKTLGTGSFGRVMLVKHKATEQYYAMKILDKQKVVKLKQIEHTLNEKRILQAVNFPFLVRLEYAFKDNSNLYMVMEYVPGGEMFSHLRRIGRFSEPHARFYAAQIVLTFEYLHSLDLIYRDLKPENLLIDHQGYIQVTDFGFAKRVKGRTWTLCGTPEYLAPEIILSKGYNKAVDWWALGVLIYEMAAGYPPFFADQPIQIYEKIVSGKNF

SEQ ID NO: 59774 - protein, 398 aa, Homo sapiens
MAAYREPPCNQYTGTTTALQKLEGFASRLFHRHSKGTAHDQKTALENDSLHFSEHTALWDRSMKEFLAKAKEDFLKKWENPTQNNAGLEDFERKKTLGTGSFGRVMLVKHKATEQYYAMKILDKQKVVKLKQIEHTLNEKRILQAVNFPFLVRLEYAFKDNSNLYMVMEYVPGGEMFSHLRRIGRFSEPHARFYAAQIVLTFEYLHSLDLIYRDLKPENLLIDHQGYIQVTDFGFAKRVKGRTWTLCGTPEYLAPEIILSKGYNKAVDWWALGVLIYEMAAGYPPFFADQPIQIYEKIVSGKVRFPSHFSSDLKDLLRNLLQVDLTKRFGNLKNGVSDIKTHKWFATTDWIAIYQRKVEAPFIPKFRGSGDTSNFDDYEEEDIRVSITEKCAKEFGEF

SEQ ID NO: 59775 - protein, 257 aa, Homo sapiens
MGNAATAKKGSEVESVKEFLAKAKEDFLKKWENPTQNNAGLEDFERKKTLGTGSFGRVMLVKHKATEQYYAMKILDKQKVVKLKQIEHTLNEKRILQAVNFPFLVRLEYAFKDNSNLYMVMEYVPGGEMFSHLRRIGRFSEPHARFYAAQIVLTFEYLHSLDLIYRDLKPENLLIDHQGYIQVTDFGFAKRVKGRTWTLCGTPEYLAPEIILSKGYNKAVDWWALGVLIYEMAAGYPPFFADQPIQIYEKIVSGKNF

SEQ ID NO: 59776 - protein, 351 aa, Homo sapiens
MGNAATAKKGSEVESVKEFLAKAKEDFLKKWENPTQNNAGLEDFERKKTLGTGSFGRVMLVKHKATEQYYAMKILDKQKVVKLKQIEHTLNEKRILQAVNFPFLVRLEYAFKDNSNLYMVMEYVPGGEMFSHLRRIGRFSEPHARFYAAQIVLTFEYLHSLDLIYRDLKPENLLIDHQGYIQVTDFGFAKRVKGRTWTLCGTPEYLAPEIILSKGYNKAVDWWALGVLIYEMAAGYPPFFADQPIQIYEKIVSGKVRFPSHFSSDLKDLLRNLLQVDLTKRFGNLKNGVSDIKTHKWFATTDWIAIYQRKVEAPFIPKFRGSGDTSNFDDYEEEDIRVSITEKCAKEFGEF

SEQ ID NO: 59777 - protein, 358 aa, Homo sapiens
MGLSRKSSDASACSSSEISDSFVKEFLAKAKEDFLKKWENPTQNNAGLEDFERKKTLGTGSFGRVMLVKHKATEQYYAMKILDKQKVVKLKQIEHTLNEKRILQAVNFPFLVRLEYAFKDNSNLYMVMEYVPGGEMFSHLRRIGRFSEPHARFYAAQIVLTFEYLHSLDLIYRDLKPENLLIDHQGYIQVTDFGFAKRVKGRTWTLCGTPEYLAPEIILSKGYNKAVDWWALGVLIYEMAAGYPPFFADQPIQIYEKIVSGKVRFPSHFSSDLKDLLRNLLQVDLTKRFGNLKNGVSDIKTHKWFATTDWIAIYQRKVEAPFIPKFRGSGDTSNFDDYEEEDIRVSITEKCAKEFGEF

SEQ ID NO: 59778 - protein, 321 aa, Homo sapiens
MSARKSSDASACSSSEISVKEFLAKAKEDFLKKWENPTQNNAGLEDFERKKTLGTGSFGRVMLVKHKATEQYYAMKILDKQKDNSNLYMVMEYVPGGEMFSHLRRIGRFSEPHARFYAAQIVLTFEYLHSLDLIYRDLKPENLLIDHQGYIQVTDFGFAKRVKGRTWTLCGTPEYLAPEIILSKGYNKAVDWWALGVLIYEMAAGYPPFFADQPIQIYEKIVSGKVRFPSHFSSDLKDLLRNLLQVDLTKRFGNLKNGVSDIKTHKWFATTDWIAIYQRKVEAPFIPKFRGSGDTSNFDDYEEEDIRVSITEKCAKEFGEF

SEQ ID NO: 59779 - protein, 209 aa, Homo sapiens
MSACSSSEISVKEFLAKAKEDFLKKWENPTQNNAGLEDFERKKTLGTGSFGRVMLVKHKATEQYYAMKILDKQKVVKLKQIEHTLNEKRILQAVNFPFLVRLEYAFKDNSNLYMVMEYVPGGEMFSHLRRIGRFSEPHARFYAAQIVLTFEYLHSLDLIYRDLKPENLLIDHQGYIQVTDFGFAKRVKGRTWTLCGTPEYLAPEIILSK

SEQ ID NO: 59780 - protein, 197 aa, Homo sapiens
MSVKEFLAKAKEDFLKKWENPTQNNAGLEDFERKKTLGTGSFGRVMLVKHKATEQYYAMKILDKQKVVKLKQIEHTLNEKRILQAVNFPFLVRLEYAFKDNSNLYMVMEYVPGGEMFSHLRRIGRFSEPHARFYAAQIVLTFEYLHSLDLIYRDLKPENLLIDHQGYIQVTDFGFAKRVKGRTWTLCGTPEYLAPEI

SEQ ID NO: 59781 - protein, 214 aa, Homo sapiens
MGLSCSSSEISVKEFLAKAKEDFLKKWENPTQNNAGLEDFERKKTLGTGSFGRVMLVKHKATEQYYAMKILDKQKVVKLKQIEHTLNEKRILQAVNFPFLVRLEYAFKDNSNLYMVMEYVPGGEMFSHLRRIGRFSEPHARFYAAQIVLTFEYLHSLDLIYRDLKPENLLIDHQGYIQVTDFGFAKRVKGRTWTLCGTPEYLAPEIILSKGYNK

SEQ ID NO: 59782 - protein, 186 aa, Homo sapiens
MGLSRKSSDASACSSSEISVKEFLAKAKEDFLKKWENPTQNNAGLEDFERKKTLGTGSFGRVMLVKHKATEQYYAMKILDKQKVVKLKQIEHTLNEKRILQAVNFPFLVRLEYAFKDNSNLYMVMEYVPGGEMFSHLRRIGRFSEPHARFYAAQIVLTFEYLHSLDLIYRDLKPENLLIDHQGYIQ

SEQ ID NO: 59783 - protein, 175 aa, Homo sapiens
MGLSRKSSDASACSSSEISDSFVKEFLAKAKEDFLKKWENPTQNNAGLEDFERKKTLGTGSFGRVMLVKHKATEQYYAMKILDKQKVVKLKQIEHTLNEKRILQAVNFPFLVRLEYAFKDNSNLYMVMEYVPGGEMFSHLRRIGRFSEPHARFYAAQIVLTFEYLHSLDLIYRDL

SEQ ID NO: 59784 - protein, 206 aa, Homo sapiens
MSARKSSDASACSSSEISVKEFLAKAKEDFLKKWENPTQNNAGLEDFERKKTLGTGSFGRVMLVKHKATEQYYAMKILDKQKVVKLKQIEHTLNEKRILQAVNFPFLVRLEYAFKDNSNLYMVMEYVPGGEMFSHLRRIGRFSEPHARFYAAQIVLTFEYLHSLDLIYRDLKPENLLIDHQGYIQVTDFGFAKRVKGRTWTLCGTP

SEQ ID NO: 59785 - protein, 351 aa, Homo sapiens
MGNAPAKKDTEQEESVNEFLAKARGDFLYRWGNPAQNTASSDQFERLRTLGMGSFGRVMLVRHQETGGHYAMKILNKQKVVKMKQVEHILNEKRILQAIDFPFLVKLQFSFKDNSYLYLVMEYVPGGEMFSRLQRVGRFSEPHACFYAAQVVLAVQYLHSLDLIHRDLKPENLLIDQQGYLQVTDFGFAKRVKGRTWTLCGTPEYLAPEIILSKGYNKAVDWWALGVLIYEMAVGFPPFYADQPIQIYEKIVSGRVRFPSKLSSDLKHLLRSLLQVDLTKRFGNLRNGVGDIKNHKWFATTSWIAIYEKKVEAPFIPKYTGPGDASNFDDYEEEELRISINEKCAKEFSEF

SEQ ID NO: 59786 - protein, 381 aa, Homo sapiens; identical to SEQ ID NO: 59736

SEQ ID NO: 59787 - protein, 381 aa, Homo sapiens; identical to SEQ ID NO: 59736

SEQ ID NO: 59788 - protein, 381 aa, Homo sapiens; identical to SEQ ID NO: 59736

SEQ ID NO: 59789 - protein, 381 aa, Homo sapiens; identical to SEQ ID NO: 59736

SEQ ID NO: 59790 - protein, 80 aa, Homo sapiens
MGSTLRKRKMYEEFLSKVSILESLEKWERLTVADALEPVQFEDGEKIVVQGEPGDDFYIITEKNLPGVVAHACNPSYLGG

SEQ ID NO: 59791 - protein, 381 aa, Homo sapiens
MASPPACPSEEDESLKGCELYVQLHGIQQVLKDCIVHLCISKPERPMKFLREHFEKLEKEENRQILARQKSNSQSDSHDEEVSPTPPNPVVKARRRRGGVSAEVYTEEDAVSYVRKVIPKDYKTMTALAKAISKNVLFAHLDDNERSDIFDAMFPVTHIAGETVIQQGNEGDNFYVVDQGEVDVYVNGEWVTNISEGGSFGELALIYGTPRAATVKAKTDLKLWGIDRDSYRRILMGSTLRKRKMYEEFLSKVSILESLEKWERLTVADALEPVQFEDGEKIVVQGEPGDDFYIITEGTASVLQRRSPNEEYVEVGRLGPSDYFGEIALLLNRPRAATVVARGPLKCVKLDRPRFERVLGPCSEILKRNIQRYNSFISLTV

SEQ ID NO: 59792 - protein, 381 aa, Homo sapiens; identical to SEQ ID NO: 59791

SEQ ID NO: 59793 - protein, 381 aa, Homo sapiens; identical to SEQ ID NO: 59791

SEQ ID NO: 59794 - protein, 165 aa, Homo sapiens
MASPPACPSEEDESLKGCELYVQLHGIQQVLKDCIVHLCISKPERPMKFLREHFEKLEKEENRQILARQKSNSQSDSHDEEVSPTPPNPVVKARRRRGGVSAEVYTEEDAVSYVRKVIPKDYKTMTALAKAISKNVLFAHLDDNERSDIFDAMFPVTHIAGETVI

SEQ ID NO: 59795 - protein, 297 aa, Homo sapiens
MASPPACPSEEDESLKGCELYVQLHGIQQVLKDCIVHLCISKPERPMKFLREHFEKLEKEENRQILARQKSNSQSDSHDEEVSPTPPNPVVKARRRRGGVSAEVYTEEDAVSYVRKVIPKDYKTMTALAKAISKNVLFAHLDDNERSDIFDAMFPVTHIAGETVIQQGNEGDNFYVVDQGEVDVYVNGEWVTNISEGGSFGELALIYGTPRAATVKAKTDLKLWGIDRDSYRRILMGSTLRKRKMYEEFLSKVSILESLEKWERLTVADALEPVQFEDGEKIVVQGEPGDDFYIITE

SEQ ID NO: 59796 - protein, 58 aa, Homo sapiens
MASPPACPSEEDESLKGCELYVQLHGIQQVLKDCIVHLCISKPERPMKFLREHFEKLE

SEQ ID NO: 59797 - protein, 381 aa, Homo sapiens; identical to SEQ ID NO: 59791

SEQ ID NO: 59798 - protein, 381 aa, Homo sapiens; identical to SEQ ID NO: 59791

SEQ ID NO: 59799 - protein, 404 aa, Homo sapiens
MSHIQIPPGLTELLQGYTVEVLRQQPPDLVEFAVEYFTRLREARAPASVLPAATPRQSLGHPPPEPGPDRVADAKGDSESEEDEDLEVPVPSRFNRRVSVCAETYNPDEEEEDTDPRVIHPKTDEQRCRLQEACKDILLFKNLDQEQLSQVLDAMFERIVKADEHVIDQGDDGDNFYVIERGTYDILVTKDNQTRSVGQYDNRGSFGELALMYNTPRAATIVATSEGSLWGLDRVTFRRIIVKNNAKKRKMFESFIESVPLLKSLEVSERMKIVDVIGEKIYKDGERIITQGEKADSFYIIESGEVSILIRSRTKSNKDGGNQEVEIARCHKGQYFGELALVTNKPRAASAYAVGDVKCLVMDVQAFERLLGPCMDIMKRNISHYEEQLVKMFGSSVDLGNLGQ

SEQ ID NO: 59800 - protein, 382 aa, Homo sapiens
MSHIQIPPGLTELLQGYTVEVLRQQPPDLVEFAVEYFTRLREARAPASVLPAATPRQSLGHPPPEPGPDRVADAKGDSESEEDEDLEVPVPSRFNRRVSVCAETYNPDEEEEDTDPRVIHPKTDEQRCRLQEACKDILLFKNLDQEQLSQVLDAMFERIVKADEHVIDQGDDGDNFYVIERGTYDILVTKDNQTRSVGQYDNRGSFGELALMYNTPRAATIVATSEGSLWGLDRVTFRRIIVKNNAKKRKMFESFIESVPLLKSLEVSERMKIVDVIGEKIYKDGERIITQTKSNKDGGNQEVEIARCHKGQYFGELALVTNKPRAASAYAVGDVKCLVMDVQAFERLLGPCMDIMKRNISHYEEQLVKMFGSSVDLGNLGQ

SEQ ID NO: 59801 - protein, 404 aa, Homo sapiens; identical to SEQ ID NO: 59799

SEQ ID NO: 59802 - protein, 418 aa, Homo sapiens
MSIEIPAGLTELLQGFTVEVLRHQPADLLEFALQHFTRLQQENERKGTARFGHEGRTWGDLGAAAGGGTPSKGVNFAEEPMQSDSEDGEEEEAAPADAGAFNAPVINRFTRRASVCAEAYNPDEEEDDAESRIIHPKTDDQRNRLQEACKDILLFKNLDPEQMSQVLDAMFEKLVKDGEHVIDQGDDGDNFYVIDRGTFDIYVKCDGVGRCVGNYDNRGSFGELALMYNTPRAATITATSPGALWGLDRVTFRRIIVKNNAKKRKMYESFIESLPFLKSLEFSERLKVVDVIGTKVYNDGEQIIAQGDSADSFFIVESGEVKITMKRKGKSEVEENGAVEIARCSRGQYFGELALVTNKPRAASAHAIGTVKCLAMDVQAFERLLGPCMEIMKRNIATYEEQLVALFGTNMDIVEPTA

SEQ ID NO: 59803 - protein, 405 aa, Homo sapiens
MSIEIPAGLTELLQGFTVEVLRHQPADLLEFALQHFTRLQQENERKGTARFGHEGRTWGDLGAAAGGGTPSKGVNFAEEAAPADAGAFNAPVINRFTRRASVCAEAYNPDEEEDDAESRIIHPKTDDQRNRLQEACKDILLFKNLDPEQMSQVLDAMFEKLVKDGEHVIDQGDDGDNFYVIDRGTFDIYVKCDGVGRCVGNYDNRGSFGELALMYNTPRAATITATSPGALWGLDRVTFRRIIVKNNAKKRKMYESFIESLPFLKSLEFSERLKVVDVIGTKVYNDGEQIIAQGDSADSFFIVESGEVKITMKRKGKSEVEENGAVEIARCSRGQYFGELALVTNKPRAASAHAIGTVKCLAMDVQAFERLLGPCMEIMKRNIATYEEQLVALFGTNMDIVEPTA

SEQ ID NO: 59804 - protein, 418 aa, Homo sapiens; identical to SEQ ID NO: 59802

SEQ ID NO: 59805 - protein, 389 aa, Homo sapiens
MEKQNMFLHGSYILREDVRTANVIAAEAVTCLVIDRDSFKHLIGGLDDVSNKAYEDAEAKAKYEAEAAFFANLKLSDFNIIDTLGVGGFGRVELVQLKSEESKTFAMKILKKRHIVDTRQQEHIRSEKQIMQGAHSDFIVRLYRTFKDSKYLYMLMEACLGGELWTILRDRGSFEDSTTRFYTACVVEAFAYLHSKGIIYRDLKPENLILDHRGYAKLVDFGFAKKIGFGKKTWTFCGTPEYVAPEIILNKGHDISADYWSLGILMYELLTGSPPFSGPDPMKTYNIILRGIDMIEFPKKIAKNAANLIKKLCRDNPSERLGNLKNGVKDIQKHKWFEGFNWEGLRKGTLTPPIIPSVASPTDTSNFDSFPEDNDEPPPDDNSGWDIDF

SEQ ID NO: 59806 - protein, 283 aa, Homo sapiens
MKILKKRHIVDTRQQEHIRSEKQIMQGAHSDFIVRLYRTFKDSKYLYMLMEACLGGELWTILRDRGSFEDSTTRFYTACVVEAFAYLHSKGIIYRDLKPENLILDHRGYAKLVDFGFAKKIGFGKKTWTFCGTPEYVAPEIILNKGHDISADYWSLGILMYELLTGSPPFSGPDPMKTYNIILRGIDMIEFPKKIAKNAANLIKKLCRDNPSERLGNLKNGVKDIQKHKWFEGFNWEGLRKGTLTPPIIPSVASPTDTSNFDSFPEDNDEPPPDDNSGWDIDF

SEQ ID NO: 59807 - protein, 181 aa, Homo sapiens
SCIIKEGDVGSLVYVMEDGKVEVTKEGVKLCTMGPGKVFGELAILYNCTRTATVKTLVNVKLWAIDRQCFQTIMMRTGLIKHTEYMEFLKSVPTFQSLPEEILSKLADVLEETHYENGEYIIRQGARGDTFFIISKGTVNVTREDSPSEDPVFLRTLGKGDWFGEKALQGWTWNLFEYVVE

SEQ ID NO: 59808 - protein, 686 aa, Homo sapiens
MGTLRDLQYALQEKIEELRQRDALIDELELELDQKDELIQKLQNELDKYRSVIRPATQQAQKQSASTLQGEPRTKRQAISAEPTAFDIQDLSHVTLPFYPKSPQSKDLIKEAILDNDFMKNLELSQIQEIVDCMYPVEYGKDSCIIKEGDVGSLVYVMEDGKVEVTKEGVKLCTMGPGKVFGELAILYNCTRTATVKTLVNVKLWAIDRQCFQTIMMRTGLIKHTEYMEFLKSVPTFQSLPEEILSKLADVLEETHYENGEYIIRQGARGDTFFIISKGTVNVTREDSPSEDPVFLRTLGKGDWFGEKALQGEDVRTANVIAAEAVTCLVIDRDSFKHLIGGLDDVSNKAYEDAEAKAKYEAEAAFFANLKLSDFNIIDTLGVGGFGRVELVQLKSEESKTFAMKILKKRHIVDTRQQEHIRSEKQIMQGAHSDFIVRLYRTFKDSKYLYMLMEACLGGELWTILRDRGSFEDSTTRFYTACVVEAFAYLHSKGIIYRDLKPENLILDHRGYAKLVDFGFAKKIGFGKKTWTFCGTPEYVAPEIILNKGHDISADYWSLGILMYELLTGSPPFSGPDPMKTYNIILRGIDMIEFPKKIAKNAANLIKKLCRDNPSERLGNLKNGVKDIQKHKWFEGFNWEGLRKGTLTPPIIPSVASPTDTSNFDSFPEDNDEPPPDDNSGWDIDF

SEQ ID NO: 59809 - protein, 659 aa, Homo sapiens
MLKEERIKELEKRLSEKEEEIQELKRKLHKCQSVLPVPSTHIGPRTTRAQGISAEPQTYRSFHDLRQAFRKFTKSERSKDLIKEAILDNDFMKNLELSQIQEIVDCMYPVEYGKDSCIIKEGDVGSLVYVMEDGKVEVTKEGVKLCTMGPGKVFGELAILYNCTRTATVKTLVNVKLWAIDRQCFQTIMMRTGLIKHTEYMEFLKSVPTFQSLPEEILSKLADVLEETHYENGEYIIRQGARGDTFFIISKGTVNVTREDSPSEDPVFLRTLGKGDWFGEKALQGEDVRTANVIAAEAVTCLVIDRDSFKHLIGGLDDVSNKAYEDAEAKAKYEAEAAFFANLKLSDFNIIDTLGVGGFGRVELVQLKSEESKTFAMKILKKRHIVDTRQQEHIRSEKQIMQGAHSDFIVRLYRTFKDSKYLYMLMEACLGGELWTILRDRGSFEDSTTRFYTACVVEAFAYLHSKGIIYRDLKPENLILDHRGYAKLVDFGFAKKIGFGKKTWTFCGTPEYVAPEIILNKGHDISADYWSLGILMYELLTGSPPFSGPDPMKTYNIILRGIDMIEFPKKIAKNAANLIKKLCRDNPSERLGNLKNGVKDIQKHKWFEGFNWEGLRKGTLTPPIIPSVASPTDTSNFDSFPEDNDEPPPDDNSGWDIDF

SEQ ID NO: 59810 - protein, 671 aa, Homo sapiens
MSELEEDFAKILMLKEERIKELEKRLSEKEEEIQELKRKLHKCQSVLPVPSTHIGPRTTRAQGISAEPQTYRSFHDLRQAFRKFTKSERSKDLIKEAILDNDFMKNLELSQIQEIVDCMYPVEYGKDSCIIKEGDVGSLVYVMEDGKVEVTKEGVKLCTMGPGKVFGELAILYNCTRTATVKTLVNVKLWAIDRQCFQTIMMRTGLIKHTEYMEFLKSVPTFQSLPEEILSKLADVLEETHYENGEYIIRQGARGDTFFIISKGTVNVTREDSPSEDPVFLRTLGKGDWFGEKALQGEDVRTANVIAAEAVTCLVIDRDSFKHLIGGLDDVSNKAYEDAEAKAKYEAEAAFFANLKLSDFNIIDTLGVGGFGRVELVQLKSEESKTFAMKILKKRHIVDTRQQEHIRSEKQIMQGAHSDFIVRLYRTFKDSKYLYMLMEACLGGELWTILRDRGSFEDSTTRFYTACVVEAFAYLHSKGIIYRDLKPENLILDHRGYAKLVDFGFAKKIGFGKKTWTFCGTPEYVAPEIILNKGHDISADYWSLGILMYELLTGSPPFSGPDPMKTYNIILRGIDMIEFPKKIAKNAANLIKKLCRDNPSERLGNLKNGVKDIQKHKWFEGFNWEGLRKGTLTPPIIPSVASPTDTSNFDSFPEDNDEPPPDDNSGWDIDF

SEQ ID NO: 59811 - protein, 762 aa, Homo sapiens
MGNGSVKPKHSKHPDGHSGNLTTDALRNKVTELERELRRKDAEIQEREYHLKELREQLSKQTVAIAELTEELQNKCIQLNKLQDVVHMQGGSPLQASPDKVPLEVHRKTSGLVSLHSRRGAKAGVSAEPTTRTYDLNKPPEFSFEKARVRKDSSEKKLITDALNKNQFLKRLDPQQIKDMVECMYGRNYQQGSYIIKQGEPGNHIFVLAEGRLEVFQGEKLLSSIPMWTTFGELAILYNCTRTASVKAITNVKTWALDREVFQNIMRRTAQARDEQYRNFLRSVSLLKNLPEDKLTKIIDCLEVEYYDKGDYIIREGEEGSTFFILAKGKVKVTQSTEGHDQPQLIKTLQKGEYFGEKALISDDVRSANIIAEENDVACLVIDRETFNQTVGTFEELQKYLEGYVANLNRDDEKRHAKRSMSNWKLSKALSLEMIQLKEKVARFSSSSPFQNLEIIATLGVGGFGRVELVKVKNENVAFAMKCIRKKHIVDTKQQEHVYSEKRILEELCSPFIVKLYRTFKDNKYVYMLLEACLGGELWSILRDRGSFDEPTSKFCVACVTEAFDYLHRLGIIYRDLKPENLILDAEGYLKLVDFGFAKKIGSGQKTWTFCGTPEYVAPEVILNKGHDFSVDFWSLGILVYELLTGNPPFSGVDQMMTYNLILKGIEKMDFPRKITRRPEDLIRRLCRQNPTERLGNLKNGINDIKKHRWLNGFNWEGLKARSLPSPLQRELKGPIDHSYFDKYPPEKGMPPDELSGWDKDF

SEQ ID NO: 59812 - protein, 762 aa, Homo sapiens; identical to SEQ ID NO: 59811

SEQ ID NO: 59813 - protein, 733 aa, Homo sapiens
MGNGSVKPKHSKHPDGHSGNLTTDALRNKVTELERELRRKDAEIQEREYHLKELREQLSKQTVAIAELTEELQNKCIQLNKLQDVVHMQGGSPLQASPDKVPLEVHRKTSGLVSLHSRRGAKAGVSAEPTTRTYDLNKPPEFSFEKARVRKDSSEKKLITDALNKNQFLKRLDPQQIKDMVECMYGRNYQQGSYIIKQGEPGNHIFVLAEGRLEVFQGEKLLSSIPMWTTFGELAILYNCTRTASVKAITNVKTWALDREVFQNIMRRTAQARDEQYRNFLRSVSLLKNLPEDKLTKIIDCLEVEYYDKGDYIIREGEEGSTFFILAKGKVKVTQSTEGHDQPQLIKTLQKGEYFGEKALISDDVRSANIIAEENDVACLVIDRETFNQTVGTFEELQKYLEGYVANLNRDDEKRHAKRSMSNWKLSKALSLEMIQLKEKVKVKNENVAFAMKCIRKKHIVDTKQQEHVYSEKRILEELCSPFIVKLYRTFKDNKYVYMLLEACLGGELWSILRDRGSFDEPTSKFCVACVTEAFDYLHRLGIIYRDLKPENLILDAEGYLKLVDFGFAKKIGSGQKTWTFCGTPEYVAPEVILNKGHDFSVDFWSLGILVYELLTGNPPFSGVDQMMTYNLILKGIEKMDFPRKITRRPEDLIRRLCRQNPTERLGNLKNGINDIKKHRWLNGFNWEGLKARSLPSPLQRELKGPIDHSYFDKYPPEKGMPPDELSGWDKDF

SEQ ID NO: 59814 - protein, 342 aa, Homo sapiens
MSNWKLSKALSLEMIQLKEKVARFSSSSPFQNLEIIATLGVGGFGRVELVKVKNENVAFAMKCIRKKHIVDTKQQEHVYSEKRILEELCSPFIVKLYRTFKDNKYVYMLLEACLGGELWSILRDRGSFDEPTSKFCVACVTEAFDYLHRLGIIYRDLKPENLILDAEGYLKLVDFGFAKKIGSGQKTWTFCGTPEYVAPEVILNKGHDFSVDFWSLGILVYELLTGNPPFSGVDQMMTYNLILKGIEKMDFPRKITRRPEDLIRRLCRQNPTERLGNLKNGINDIKKHRWLNGFNWEGLKARSLPSPLQRELKGPIDHSYFDKYPPEKGMPPDELSGWDKDF

SEQ ID NO: 59815 - protein, 313 aa, Homo sapiens
MSQSRHRAEAPPLEREDSGTFSLGKMITAKPGKTPIQVLHEYGMKTKNIPVYECERSDVQIHVPTFTFRVTVGDITCTGEGTSKKLAKHRAAEAAINILKANASICFAVPDPLMPDPSKQPKNQLNPIGSLQELAIHHGWRLPEYTLSQEGGPAHKREYTTICRLESFMETGKGASKKQAKRNAAEKFLAKFSNISPENHISLTNVVGHSLGCTWHSLRNSPGEKINLLKRSLLSIPNTDYIQLLSEIAKEQGFNITYLDIDELSANGQYQCLAELSTSPITVCHGSGISCGNAQSDAAHNALQYLKIIAERK

SEQ ID NO: 59816 - protein, 302 aa, Homo sapiens
MQSTPFCGFCSLGKMITAKPGKTPIQVLHEYGMKTKNIPVYECERSDVQIHVPTFTFRVTVGDITCTGEGTSKKLAKHRAAEAAINILKANASICFAVPDPLMPDPSKQPKNQLNPIGSLQELAIHHGWRLPEYTLSQEGGPAHKREYTTICRLESFMETGKGASKKQAKRNAAEKFLAKFSNISPENHISLTNVVGHSLGCTWHSLRNSPGEKINLLKRSLLSIPNTDYIQLLSEIAKEQGFNITYLDIDELSANGQYQCLAELSTSPITVCHGSGISCGNAQSDAAHNALQYLKIIAERK

SEQ ID NO: 59817 - protein, 200 aa, Homo sapiens
MPDPSKQPKNQLNPIGSLQELAIHHGWRLPEYTLSQEGGPAHKREYTTICRLESFMETGKGASKKQAKRNAAEKFLAKFSNISPENHISLTNVVGHSLGCTWHSLRNSPGEKINLLKRSLLSIPNTDYIQLLSEIAKEQGFNITYLDIDELSANGQYQCLAELSTSPITVCHGSGISCGNAQSDAAHNALQYLKIIAERK

SEQ ID NO: 59818 - protein, 288 aa, Homo sapiens
MITAKPGKTPIQVLHEYGMKTKNIPVYECERSDVQIHVPTFTFRVTVGDITCTGEGTSKKLAKHRAAEAAINILKANASICFAVPDPLMPDPSKQPKNQLNPIGSLQELAIHHGWRLPEYTLSQEGGPAHKREYTTICRLESFMETGKGASKKQAKRNAAEKFLAKFSNISPENHISLTNVVGHSLGCTWHSLRNSPGEKINLLKRSLLSIPNTDYIQLLSEIAKEQGFNITYLDIDELSANGQYQCLAELSTSPITVCHGSGISCGNAQSDAAHNALQYLKIIAERK

SEQ ID NO: 59819 - protein, 358 aa, Homo sapiens
MEAPGLAQAAAAESDSRKVAEETPDGAPALCPSPEALSPEPPVYSLQDFDTLATVGTGTFGRVHLVKEKTAKHFFALKVMSIPDVIRLKQEQHVHNEKSVLKEVSHPFLIRLFWTWHDERFLYMLMEYVPGGELFSYLRNRGRFSSTTGLFYSAEIICAIEYLHSKEIVYRDLKPENILLDRDGHIKLTDFGFAKKLVDRTWTLCGTPEYLAPEVIQSKGHGRAVDWWALGILIFEMLSGFPPFFDDNPFGIYQKILAGKIDFPRHLDFHVKDLIKKLLVVDRTRRLGNMKNGANDVKHHRWFRSVDWEAVPQRKLKPPIVPKIAGDGDTSNFETYPENDWDTAAPVPQKDLEIFKNF

SEQ ID NO: 59820 - protein, 660 aa, Homo sapiens
MDDWKPSPLIKPFGARKKRSWYLTWKYKLTNQRALRRFCQTGAVLFLLVTVIVNIKLILDTRRAISEANEDPEPEQDYDEALGRLEPPRRRGSGPRRVLDVEVYSSRSKVYVAVDGTTVLEDEAREQGRGIHVIVLNQATGHVMAKRVFDTYSPHEDEAMVLFLNMVAPGRVLICTVKDEGSFHLKDTAKALLRSLGSQAGPALGWRDTWAFVGRKGGPVFGEKHSKSPALSSWGDPVLLKTDVPLSSAEEAECHWADTELNRRRRRFCSKVEGYGSVCSCKDPTPIEFSPDPLPDNKVLNVPVAVIAGNRPNYLYRMLRSLLSAQGVSPQMITVFIDGYYEEPMDVVALFGLRGIQHTPISIKNARVSQHYKASLTATFNLFPEAKFAVVLEEDLDIAVDFFSFLSQSIHLLEEDDSLYCISAWNDQGYEHTAEDPALLYRVETMPGLGWVLRRSLYKEELEPKWPTPEKLWDWDMWMRMPEQRRGRECIIPDVSRSYHFGIVGLNMNGYFHEAYFKKHKFNTVPGVQLRNVDSLKKEAYEVEVHRLLSEAEVLDHSKNPCEDSFLPDTEGHTYVAFIRMEKDDDFTTWTQLAKCLHIWDLDVRGNHRGLWRLFRKKNHFLMVGVPASPYSVKKPPSVTPIFLEPPPKEEGAPGAPEQT

SEQ ID NO: 59821 - protein, 748 aa, Homo sapiens
MDDWKPSPLIKPFGARKKRSWYLTWKYKLTNQRALRRFCQTGAVLFLLVTVIVNIKLILDTRRAISEANEDPEPEQDYDEALGRLEPPRRRGSGPRRVLDVEVYSSRSKVYVAVDGTTVLEDEAREQGRGIHVIVLNQATGHVMAKRVFDTYSPHEDEAMVLFLNMVAPGRVLICTVKDEGSFHLKDTAKALLRSLGSQAGPALGWRDTWAFVGRKGGPVFGEKHSKSPALSSWGDPVLLKTDVPLSSAEEAECHWADTELNRRRRRFCSKVEGYGSVCSCKDPTPIEFSPDPLPDNKVLNVPVAVIAGNRPNYLYRMLRSLLSAQGVSPQMITVFIDGYYEEPMDVVALFGLRGIQHTPISIKNARVSQHYKASLTATFNLFPEAKFAVVLEEDLDIAVDFFSFLSQSIHLLEEDDSLYCISAWNDQGYEHTAEDPALLYRVETMPGLGWVLRRSLYKEELEPKWPTPEKLWDWDMWMRMPEQRRGRECIIPDVSRSYHFGIVGLNMNGYFHEAYFKKHKFNTVPGVQLRNVDSLKKEAYEVEVHRLLSEAEVLDHSKNPCEDSFLPDTEGHTYVAFIRMEKDDDFTTWTQLAKCLHIWDLDVRGNHRGLWRLFRKKNHFLMSEEATLSHPNFPGATPKGGGSPRSPRTDMRPPPGPCGAGPGSESNLFIDCPEGLENRPNLEGLDFFLGWNAALRVGLALTQETAVPNPWTGPAGAHMLTQTHSETLRHWTRPPLSLLFVQISKAG

SEQ ID NO: 59822 - protein, 748 aa, Homo sapiens; identical to SEQ ID NO: 59821

SEQ ID NO: 59823 - protein, 200 aa, Homo sapiens
MDDWKPSPLIKPFGARKKRSWYLTWKYKLTNQRALRRFCQTGAVLFLLVTVIVNIKLILDTRRAISEANEDPEPEQDYDEALGRLEPPRRRGSGPRRVLDVEVYSSRSKVYVAVDGTTVLEDEAREQGRGIHVIVLNQATGHVMAKRVFDTYSPHEDEAMVLFLNMVAPGRVLICTVKVLSSGRNILNHLPSLPGGTQSC

SEQ ID NO: 59824 - protein, 638 aa, Homo sapiens
MEGTKEIKVSNRRIQEHWTGAVLFLLVTVIVNIKLILDTRRAISEANEDPEPEQDYDEALGRLEPPRRRGSGPRRVLDVEVYSSRSKVYVAVDGTTVLEDEAREQGRGIHVIVLNQATGHVMAKRVFDTYSPHEDEAMVLFLNMVAPGRVLICTVKDEGSFHLKDTAKALLRSLGSQAGPALGWRDTWAFVGRKGGPVFGEKHSKSPALSSWGDPVLLKTDVPLSSAEEAECHWADTELNRRRRRFCSKVEGYGSVCSCKDPTPIEFSPDPLPDNKVLNVPVAVIAGNRPNYLYRMLRSLLSAQGVSPQMITVFIDGYYEEPMDVVALFGLRGIQHTPISIKNARVSQHYKASLTATFNLFPEAKFAVVLEEDLDIAVDFFSFLSQSIHLLEEDDSLYCISAWNDQGYEHTAEDPALLYRVETMPGLGWVLRRSLYKEELEPKWPTPEKLWDWDMWMRMPEQRRGRECIIPDVSRSYHFGIVGLNMNGYFHEAYFKKHKFNTVPGVQLRNVDSLKKEAYEVEVHRLLSEAEVLDHSKNPCEDSFLPDTEGHTYVAFIRMEKDDDFTTWTQLAKCLHIWDLDVRGNHRGLWRLFRKKNHFLMVGVPASPYSVKKPPSVTPIFLEPPPKEEGAPGAPEQT

SEQ ID NO: 59825 - protein, 286 aa, Homo sapiens
MSDSEKLNLDSIIGRLLEGDIHGQYYDLLRLFEYGGFPPESNYLFLGDYVDRGKQSLETICLLLAYKIKYPENFFLLRGNHECASINRIYGFYDECKRRYNIKLWKTFTDCFNCLPIAAIVDEKIFCCHGGLSPDLQSMEQIRRIMRPTDVPDQGLLCDLLWSDPDKDVQGWGENDRGVSFTFGAEVVAKFLHKHDLDLICRAHQVVEDGYEFFAKRQLVTLFSAPNYCGEFDNAGAMMSVDETLMCSFQILKPADKNKGKYGQFSGLNPGGRPITPPRNSAKAKK

SEQ ID NO: 59826 - protein, 515 aa, Homo sapiens
MAELEHLGGKRAESARMRRAEQLRRWRGSLTEQEPAERRGAGRQPLTRRGSPRVRFEDGAVFLAACSSGDTDEVRKLLARGADINTVNVDGLTALHQACIDENLDMVKFLVENRANVNQQDNEGWTPLHAAASCGYLNIAEYFINHGASVGIVNSEGEVPSDLAEEPAMKDLLLEQVKKQGVDLEQSRKEEEQQMLQDARQWLNSGKIEDVRQARSGATALHVAAAKGYSEVLRLLIQAGYELNVQDYDGWTPLHAAAHWGVKEACSILAEALCDMDIRNKLGQTPFDVADEGLVEHLELLQKKQNVLRSEKETRNKLIESDLNSKIQSGFFKNKEKMLYEEETPKSQEMEEENKESSSSSSEEEEGEDEASESETEKEADKKPEAFVNHSNSESKSSITEQIPAPAQNTFSASSARRFSSGLFNKPEEPKDESPSSWRLGLRKTGSHNMLSEVANSREPIRDRGSSIYRSSSSPRISALLDNKDKVQFGRVWGNSKAVFFFHENSILGTNENIF

SEQ ID NO: 59827 - protein, 1374 aa, Homo sapiens
MLKTESSGERTTLRSASPHRNAYRTEFQALKSTFDKPKSDGEQKTKEGEGSQQSRGRKYGSNVNRIKNLFMQMGMEPNENAAVIAKTRGKGGHSSPQRRMKPKEFLEKTDGSVVKLESSVSERISRFDTMYDGPSYSKFTETRKMFERSVHESGQNNRYSPKKEKAGGSEPQDEWGGSKSNRGSTDSLDSLSSRTEAVSPTVSQLSAVFENTDSPSAIISEKAENNEYSVTGHYPLNLPSVTVTNLDTFGHLKDSNSWPPSNKRGVDTEDAHKSNATPVPEVASKSTSLASIPGEEIQQSKEPEDSTSNQQTPDSIDKDGPEEPCAESKAMPKSEIPSPQSQLLEDAEANLVGREAAKQQRKELAGGDFTSPDASASSCGKEVPEDSNNFDGSHVYMHSDYNVYRVRSRYNSDWGETGTEQDEEEDSDENSYYQPDMEYSEIVGLPEEEEIPANRKIKFSSAPIKVFNTYSNEDYDRRNDEVDPVAASAEYELEKRVEKLELFPVELEKDEDGLGISIIGMGVGADAGLEKLGIFVKTVTEGGAAQRDGRIQVNDQIVEVDGISLVGVTQNFAATVLRNTKGNVRFVIGREKPGQVSEVAQLISQTLEQERRQRELLEQHYAQYDADDDENTVAELQGMSGNCNNNNNYFLKTGEYATDEEEDEVGPVLPGSDMAIEVFELPENEDMFSPSELDTSKLSHKFKELQIKHAVTEAEIQKLKTKLQAAENEKVRWELEKTQLQQNIEENKERMLKLESYWIEAQTLCHTVNEHLKETQSQYQALEKKYNKAKKLIKDFQQKELDFIKRQEAERKKIEDLEKAHLVEVQGLQVRIRDLEAEVFRLLKQNGTQVNNNNNIFERRTSLGEVSKGDTMENLDGKQTSCQDGLSQDLNEAVPETERLDSKALKTRAQLSVKNRRQRPSRTRLYDSVSSTDGEDSLERKPSNSFYNHMHITKLLPPKGLRTSSPESDSGVPPLTPVDSNVPFSSDHIAEFQEEPLDPEMGPLSSMWGDTSLFSTSKSDHDVEESPCHHQTTNKKILREKDDAKDPKSLRASSSLAVQGGKIKRKFVDLGAPLRRNSSKGKKWKEKEKEASRFSAGSRIFRGRLENWTPKPCSTAQTSTRSPCMPFSWFNDSRKGSYSFRNLPAPTSSLQPSPETLISDKKGSKVENTWITKANKRNPNPSSSSIFGRHSQLMSVVWIQETNNFTFNDDFSPSSTSSADLSGLGAEPKTPGLSQSLALSSDEILDDGQSPKHSQCQNRAVQEWSVQQVSHWLMSLNLEQYVSEFSAQNITGEQLLQLDGNKLKALGMTASQDRAVVKKKLKEMKMSLEKARKAQEKMEKQREKLRRKEQEQMQRKSKKTEKMTSTTAEGAGEQ

SEQ ID NO: 59828 - protein, 341 aa, Homo sapiens
MSDSEKLNLDSIIGRLLEGSRVLTPHCAPVQGSRPGKNVQLTENEIRGLCLKSREIFLSQPILLELEAPLKICGDIHGQYYDLLRLFEYGGFPPESNYLFLGDYVDRGKQSLETICLLLAYKIKYPENFFLLRGNHECASINRIYGFYDECKRRYNIKLWKTFTDCFNCLPIAAIVDEKIFCCHGGLSPDLQSMEQIRRIMRPTDVPDQGLLCDLLWSDPDKDVQGWGENDRGVSFTFGAEVVAKFLHKHDLDLICRAHQVVEDGYEFFAKRQLVTLFSAPNYCGEFDNAGAMMSVDETLMCSFQILKPADKNKGKYGQFSGLNPGGRPITPPRNSAKAKK

SEQ ID NO: 59829 - protein, 330 aa, Homo sapiens
MSDSEKLNLDSIIGRLLEVQGSRPGKNVQLTENEIRGLCLKSREIFLSQPILLELEAPLKICGDIHGQYYDLLRLFEYGGFPPESNYLFLGDYVDRGKQSLETICLLLAYKIKYPENFFLLRGNHECASINRIYGFYDECKRRYNIKLWKTFTDCFNCLPIAAIVDEKIFCCHGGLSPDLQSMEQIRRIMRPTDVPDQGLLCDLLWSDPDKDVQGWGENDRGVSFTFGAEVVAKFLHKHDLDLICRAHQVVEDGYEFFAKRQLVTLFSAPNYCGEFDNAGAMMSVDETLMCSFQILKPADKNKGKYGQFSGLNPGGRPITPPRNSAKAKK

SEQ ID NO: 59830 - protein, 414 aa, Homo sapiens
MRQRADRRSMVSTSGAATASSAAGPSRGAAHSPSSAPHASRHRPPFSSRATGLLQQRQHCVHHCTQLCPRVQTPCLPPPPAPATELHSYLQQGGERGLLDTTPGTAGWGTSATGAVQGSRPGKNVQLTENEIRGLCLKSREIFLSQPILLELEAPLKICGDIHGQYYDLLRLFEYGGFPPESNYLFLGDYVDRGKQSLETICLLLAYKIKYPENFFLLRGNHECASINRIYGFYDECKRRYNIKLWKTFTDCFNCLPIAAIVDEKIFCCHGGLSPDLQSMEQIRRIMRPTDVPDQGLLCDLLWSDPDKDVQGWGENDRGVSFTFGAEVVAKFLHKHDLDLICRAHQVVEDGYEFFAKRQLVTLFSAPNYCGEFDNAGAMMSVDETLMCSFQILKPADKNKGKYGQFSGLNPGGR

SEQ ID NO: 59831 - protein, 327 aa, Homo sapiens
MADGELNVDSLITRLLEVRGCRPGKIVQMTEAEVRGLCIKSREIFLSQPILLELEAPLKICGDIHGQYTDLLRLFEYGGFPPEANYLFLGDYVDRGKQSLETICLLLAYKIKYPENFFLLRGNHECASINRIYGFYDECKRRFNIKLWKTFTDCFNCLPIAAIVDEKIFCCHGGLSPDLQSMEQIRRIMRPTDVPDTGLLCDLLWSDPDKDVQGWGENDRGVSFTFGADVVSKFLNRHDLDLICRAHQVVEDGYEFFAKRQLVTLFSAPNYCGEFDNAGGMMSVDETLMCSFQILKPSEKKAKYQYGGLNSGRPVTPPRTANPPKKR

SEQ ID NO: 59832 - protein, 327 aa, Homo sapiens; identical to SEQ ID NO: 59831

SEQ ID NO: 59833 - protein, 327 aa, Homo sapiens; identical to SEQ ID NO: 59831

SEQ ID NO: 59834 - protein, 125 aa, Homo sapiens
MADGELNVDSLITRLLEVRGCRPGKIVQMTEAEVRGLCIKSREIFLSQPILLELEAPLKICGDIHGQYTDLLRLFEYGGFPPEANYLFLGDYVDRGKQSLETICLLLAYKIKYPENFFLLRGNHE

SEQ ID NO: 59835 - protein, 138 aa, Homo sapiens
MADGELNVDSLITRLLEVRGCRPGKIVQMTEAEVRGLCIKSREIFLSQPILLELEAPLKICGDIHGQYTDLLRLFEYGGFPPEANYLFLGDYVDRGKQSLETICLLLAYKIKYPENFFLLRGNHECASINRIYGFYDE

SEQ ID NO: 59836 - protein, 169 aa, Homo sapiens
MTEAEVRGLCIKSREIFLSQPILLELEAPLKICGDIHGQYTDLLRLFEYGGFPPEANYLFLGDYVDRGKQSLETICLLLAYKIKYPENFFLLRGNHECASINRIYGFYDECKRRFNIKLWKTFTDCFNCLPIAAIVDEKIFCCHGGLSPDLQSMEQIRRIMRPTDVPDT

SEQ ID NO: 59837 - protein, 323 aa, Homo sapiens
MADLDKLNIDSIIQRLLEVRGSKPGKNVQLQENEIRGLCLKSREIFLSQPILLELEAPLKICGDIHGQYYDLLRLFEYGGFPPESNYLFLGDYVDRGKQSLETICLLLAYKIKYPENFFLLRGNHECASINRIYGFYDECKRRYNIKLWKTFTDCFNCLPIAAIVDEKIFCCHGGLSPDLQSMEQIRRIMRPTDVPDQGLLCDLLWSDPDKDVLGWGENDRGVSFTFGAEVVAKFLHKHDLDLICRAHQVVEDGYEFFAKRQLVTLFSAPNYCGEFDNAGAMMSVDETLMCSFQILKPAEKKKPNATRPVTPPRGMITKQAKK

SEQ ID NO: 59838 - protein, 337 aa, Homo sapiens
MADLDKLNIDSIIQRLLEVRGSKPGKNVQLQENEIRGLCLKSREIFLSQPILLELEAPLKICGDIHGQYYDLLRLFEYGGFPPESNYLFLGDYVDRGKQSLETICLLLAYKIKYPENFFLLRGNHECASINRIYGFYDECKRRYNIKLWKTFTDCFNCLPIAAIVDEKIFCCHGGLSPDLQSMEQIRRIMRPTDVPDQGLLCDLLWSDPDKDVLGWGENDRGVSFTFGAEVVAKFLHKHDLDLICRAHQVVEDGYEFFAKRQLVTLFSAPNYCGEFDNAGAMMSVDETLMCSFQILKPAEKKKPNATRPVTPPRVASGLNPSIQKASNYRNNTVLYE

SEQ ID NO: 59839 - protein, 332 aa, Homo sapiens
MFLPLYLNLVLYFVFWLHWTNCDFSLAVRGSKPGKNVQLQENEIRGLCLKSREIFLSQPILLELEAPLKICGDIHGQYYDLLRLFEYGGFPPESNYLFLGDYVDRGKQSLETICLLLAYKIKYPENFFLLRGNHECASINRIYGFYDECKRRYNIKLWKTFTDCFNCLPIAAIVDEKIFCCHGGLSPDLQSMEQIRRIMRPTDVPDQGLLCDLLWSDPDKDVLGWGENDRGVSFTFGAEVVAKFLHKHDLDLICRAHQVVEDGYEFFAKRQLVTLFSAPNYCGEFDNAGAMMSVDETLMCSFQILKPAEKKKPNATRPVTPPRGMITKQAKK

SEQ ID NO: 59840 - protein, 141 aa, Homo sapiens
MEQIRRIMRPTDVPDQGLLCDLLWSDPDKDVLGWGENDRGVSFTFGAEVVAKFLHKHDLDLICRAHQVVEDGYEFFAKRQLVTLFSAPNYCGEFDNAGAMMSVDETLMCSFQILKPAEKKKPNATRPVTPPRGMITKQAKK

SEQ ID NO: 59841 - protein, 74 aa, Homo sapiens
MGRRSSKCCCIYEKPRAFGESSTESDEEEEEGCGHTHCVRGHRKGRRRATLGPTPTTPPQPPDPSQPPPGPMQH

SEQ ID NO: 59842 - protein, 74 aa, Homo sapiens; identical to SEQ ID NO: 59841

SEQ ID NO: 59843 - protein, 74 aa, Homo sapiens; identical to SEQ ID NO: 59841

SEQ ID NO: 59844 - protein, 74 aa, Homo sapiens; identical to SEQ ID NO: 59841

SEQ ID NO: 59845 - protein, 126 aa, Homo sapiens
MAEAGAGLSETVTETTVTVTTEPENRSLTIKLRKRKPEKKVEWTSDTVDNEHMGRRSSKCCCIYEKPRAFGESSTESDEEEEEGCGHTHCVRGHRKGRRRATLGPTPTTPPQPPDPSQPPPGPMQH

SEQ ID NO: 59846 - protein, 74 aa, Homo sapiens; identical to SEQ ID NO: 59841

SEQ ID NO: 59847 - protein, 126 aa, Homo sapiens; identical to SEQ ID NO: 59845

SEQ ID NO: 59848 - protein, 74 aa, Homo sapiens; identical to SEQ ID NO: 59841

SEQ ID NO: 59849 - protein, 74 aa, Homo sapiens; identical to SEQ ID NO: 59841

SEQ ID NO: 59850 - protein, 74 aa, Homo sapiens; identical to SEQ ID NO: 59841

SEQ ID NO: 59851 - protein, 74 aa, Homo sapiens; identical to SEQ ID NO: 59841

SEQ ID NO: 59852 - protein, 74 aa, Homo sapiens; identical to SEQ ID NO: 59841

SEQ ID NO: 59853 - protein, 74 aa, Homo sapiens; identical to SEQ ID NO: 59841

SEQ ID NO: 59854 - protein, 74 aa, Homo sapiens; identical to SEQ ID NO: 59841

SEQ ID NO: 59855 - protein, 74 aa, Homo sapiens; identical to SEQ ID NO: 59841

SEQ ID NO: 59856 - protein, 74 aa, Homo sapiens; identical to SEQ ID NO: 59841

SEQ ID NO: 59857 - protein, 74 aa, Homo sapiens; identical to SEQ ID NO: 59841

SEQ ID NO: 59858 - protein, 74 aa, Homo sapiens; identical to SEQ ID NO: 59841

SEQ ID NO: 59859 - protein, 74 aa, Homo sapiens; identical to SEQ ID NO: 59841

SEQ ID NO: 59860 - protein, 74 aa, Homo sapiens; identical to SEQ ID NO: 59841

SEQ ID NO: 59861 - protein, 74 aa, Homo sapiens; identical to SEQ ID NO: 59841

SEQ ID NO: 59862 - protein, 74 aa, Homo sapiens; identical to SEQ ID NO: 59841

SEQ ID NO: 59863 - protein, 126 aa, Homo sapiens; identical to SEQ ID NO: 59845

SEQ ID NO: 59864 - protein, 126 aa, Homo sapiens; identical to SEQ ID NO: 59845

SEQ ID NO: 59865 - protein, 74 aa, Homo sapiens; identical to SEQ ID NO: 59841

SEQ ID NO: 59866 - protein, 74 aa, Homo sapiens; identical to SEQ ID NO: 59841

SEQ ID NO: 59867 - protein, 74 aa, Homo sapiens; identical to SEQ ID NO: 59841

SEQ ID NO: 59868 - protein, 126 aa, Homo sapiens; identical to SEQ ID NO: 59845

SEQ ID NO: 59869 - protein, 74 aa, Homo sapiens; identical to SEQ ID NO: 59841

SEQ ID NO: 59870 - protein, 74 aa, Homo sapiens; identical to SEQ ID NO: 59841

SEQ ID NO: 59871 - protein, 126 aa, Homo sapiens; identical to SEQ ID NO: 59845

SEQ ID NO: 59872 - protein, 74 aa, Homo sapiens; identical to SEQ ID NO: 59841

SEQ ID NO: 59873 - protein, 74 aa, Homo sapiens; identical to SEQ ID NO: 59841

SEQ ID NO: 59874 - protein, 74 aa, Homo sapiens; identical to SEQ ID NO: 59841

SEQ ID NO: 59875 - protein, 74 aa, Homo sapiens; identical to SEQ ID NO: 59841

SEQ ID NO: 59876 - protein, 74 aa, Homo sapiens; identical to SEQ ID NO: 59841

SEQ ID NO: 59877 - protein, 74 aa, Homo sapiens; identical to SEQ ID NO: 59841

SEQ ID NO: 59878 - protein, 126 aa, Homo sapiens; identical to SEQ ID NO: 59845

SEQ ID NO: 59879 - protein, 74 aa, Homo sapiens; identical to SEQ ID NO: 59841

SEQ ID NO: 59880 - protein, 74 aa, Homo sapiens; identical to SEQ ID NO: 59841

SEQ ID NO: 59881 - protein, 74 aa, Homo sapiens; identical to SEQ ID NO: 59841

SEQ ID NO: 59882 - protein, 74 aa, Homo sapiens; identical to SEQ ID NO: 59841

SEQ ID NO: 59883 - protein, 74 aa, Homo sapiens; identical to SEQ ID NO: 59841

SEQ ID NO: 59884 - protein, 74 aa, Homo sapiens; identical to SEQ ID NO: 59841

SEQ ID NO: 59885 - protein, 126 aa, Homo sapiens; identical to SEQ ID NO: 59845

SEQ ID NO: 59886 - protein, 74 aa, Homo sapiens; identical to SEQ ID NO: 59841

SEQ ID NO: 59887 - protein, 74 aa, Homo sapiens; identical to SEQ ID NO: 59841

SEQ ID NO: 59888 - protein, 74 aa, Homo sapiens; identical to SEQ ID NO: 59841

SEQ ID NO: 59889 - protein, 147 aa, Homo sapiens
MADSGTAGGAALAAPAPGPGSGGPGPRVYFQSPPGAAGEGPGGADDEGPVRRQGKVTVKYDRKELRKRLNLEEWILEQLTRLYDCQEEEIPELEIDVDELLDMESDDARAARVKELLVDCYKPTEAFISGLLDKIRGMQKLSTPQKK

SEQ ID NO: 59890 - protein, 165 aa, Homo sapiens
MSVATGSSETAGGASGGGARVFFQSPRGGAGGSPGSSSGSGSSREDSAPVATAAAAGQVQQQQQRRHQQGKVTVKYDRKELRKRLVLEEWIVEQLGQLYGCEEEEMPEVEIDIDDLLDADSDEERASKLQEALVDCYKPTEEFIKELLSRIRGMRKLSPPQKKSV

SEQ ID NO: 59891 - protein, 145 aa, Homo sapiens
MLSSSPASCTSPSPDGENPCKKVHWASGRRRTSSTDSESKSHPDSSKIPRSRRPSRLTVKYDRGQLQRWLEMEQWVDAQVQELFQDQATPSEPEIDLEALMDLSTEEQKTQLEAILGNCPRPTEAFISELLSQLKKLRRLSRPQK

SEQ ID NO: 59892 - protein, 200 aa, Homo sapiens
MLSSSPASCTSPSPDGENPCKKVHWASGRRRTSSTDSESKSHPDSSKIPRSRRPSRLTVKYDRGQLQRWLEMEQWVDAQVQELFQSLALSPRLECSGVIHSLQLLPPGFNRFSCLSSWSSWDYGIKQPLLSLRLTWKLSWIYPQRSRRLSWRPFLGTAPAPQRLLSLSCSVNSRNSGDSAGLRNKPERPSLAASALPGLP

SEQ ID NO: 59893 - protein, 171 aa, Homo sapiens
MEQDNSPRKIQFTVPLLEPHLDPEAAEQIRRRRPTPATLVLTSDQSSPEIDEDRIPNPHLKSTLAMSPRQRKKMTRITPTMKELQMMVEHHLGQQQQGEEPEGAAESTETQESRPPGIPDTEVESRLGTSGTAKKTAECIPKTHERGSKEPSTKEPSTHIPPLDSKGANSV

SEQ ID NO: 59894 - protein, 153 aa, Homo sapiens
MEQDNSPRKIQFTVPLLEPHLDPEAAEQIRRRRPTPATLVLTSDQSSPEIDEDRIPNPHLKKLQNASLKLTREAVRNPAQKNPQPIYHHWIPREPTRCHRRGGTGGQKSVGGFPCSTHTLAPFYVFTRSILLLKRGERMSHPLEPRDDPTKMP

SEQ ID NO: 59895 - protein, 109 aa, Homo sapiens
MEPNSPKKIQFAVPVFQSQIAPEAAEQIRKRRPTPASLVILNEHNPPEIDDKRGPNTQGELQNASPKQRKQSVYTPPTIKGVKHLKGQNESAFPEEEEGTNEREEQRDH

SEQ ID NO: 59896 - protein, 109 aa, Homo sapiens; identical to SEQ ID NO: 59895

SEQ ID NO: 59897 - protein, 109 aa, Homo sapiens; identical to SEQ ID NO: 59895

SEQ ID NO: 59898 - protein, 205 aa, Homo sapiens
MAASTASHRPIKGILKNKTSTTSSMVASAEQPRGNVDEELSKKSQKWDEMNILATYHPADKDYGLMKIDEPSTPYHSMMGDDEDACSDTEATEAMAPDILARKLAAAEGLEPKYRIQEQESSGEEDSDLSPEEREKKRQFEMKRKLHYNEGLNIKLARQLISKDLHDDDEDEEMLETADGESMNTEESNQGSTPSDQQQNKLRSS

SEQ ID NO: 59899 - protein, 1030 aa, Homo sapiens
MKMADAKQKRNEQLKRWIGSETDLEPPVVKRQKTKVKFDDGAVFLAACSSGDTDEVLKLLHRGADINYANVDGLTALHQACIDDNVDMVKFLVENGANINQPDNEGWIPLHAAASCGYLDIAEFLIGQGAHVGAVNSEGDTPLDIAEEEAMEELLQNEVNRQGVDIEAARKEEERIMLRDARQWLNSGHINDVRHAKSGGTALHVAAAKGYTEVLKLLIQAGYDVNIKDYDGWTPLHAAAHWGKEEACRILVDNLCDMEMVNKVGQTAFDVADEDILGYLEELQKKQNLLHSEKRDKKSPLIESTANMDNNQSQKTFKNKETLIIEPEKNASRIESLEQEKVDEEEEGKKDESSCSSEEDEEDDSESEAETDKTKPLASVTNANTSSTQAAPVAVTTPTVSSGQATPTSPIKKFPTTATKISPKEEERKDESPATWRLGLRKTGSYGALAEITASKEGQKEKDTAGVTRSASSPRLSSSLDNKEKEKDSKGTRLAYVAPTIPRRLASTSDIEEKENRDSSSLRTSSSYTRRKWEDDLKKNSSVNEGSTYHKSCSFGRRQDDLISSSVPSTTSTPTVTSAAGLQKSLLSSTSTTTKITTGSSSAGTQSSTSNRLWAEDSTEKEKDSVPTAVTIPVAPTVVNAAASTTTLTTTTAGTVSSTTEVRERRRSYLTPVRDEESESQRKARSRQARQSRRSTQGVTLTDLQEAEKTIGRSRSTRTREQENEEKEKEEKEKQDKEKQEEKKESETSREDEYKQKYSRTYDETYQRYRPVSTSSSTTPSSSLSTMSSSLYASSQLNRPNSLVGITSAYSRGITKENEREGEKREEEKEGEDKSQPKSIRERRRPREKRRSTGVSFWTQDSDENEQEQQSDTEEGSNKKETQTDSISRYETSSTSAGDRYDSLLGRSGSYSYLEERKPYSSRLEKDDSTDFKKLYEQILAENEKLKAQLHDTNMELTDLKLQLEKATQRQERFADRSLLEMEKRERRALERRISEMEEELKMLPDLKADNQRLKDENGALIRVISKLSK

SEQ ID NO: 59900 - protein, 971 aa, Homo sapiens
MKMADAKQKRNEQLKRWIGSETDLEPPVVKRQKTKVKFDDGAVFLAACSSGDTDEVLKLLHRGADINYANVDGLTALHQACIDDNVDMVKFLVENGANINQPDNEGWIPLHAAASCGYLDIAEFLIGQGAHVGAVNSEGDTPLDIAEEEAMEELLQNEVNRQGVDIEAARKEEERIMLRDARQWLNSGHINDVRHAKSGGTALHVAAAKGYTEVLKLLIQAGYDVNIKDYDGWTPLHAAAHWGKEEACRILVDNLCDMEMVNKVGQTAFDVADEDILGYLEELQKKQNLLHSEKRDKKSPLIESTANMDNNQSQKTFKNKETLIIEPEKNASRIESLEQEKVDEEEEGKKDESSCSSEEDEEDDSESEAETDKTKPLASVTNANTSSTQAAPVAVTTPTVSSGQATPTSPIKKFPTTATKISPKEEERKDESPATWRLGLRKTGSYGALAEITASKEGQKEKDTAGVTRSASSPRLSSSLDNKEKEKDSKGTRLAYVAPTIPRRLASTSDIEEKENRDSSSLRTSSSYTRRKWEDDLKKNSSVNEGSTYHKSCSFGRRQDDLISSSVPSTTSTPTVTSAAGLQKSLLSSTSTTTKITTGSSSAGTQSRSYLTPVRDEESESQRKARSRQARQSRRSTQGVTLTDLQEAEKTIGRSRSTRTREQENEEKEKEEKEKQDKEKQEEKKESETSREDEYKQKYSRTYDETYQRYRPVSTSSSTTPSSSLSTMSSSLYASSQLNRPNSLVGITSAYSRGITKENEREGEKREEEKEGEDKSQPKSIRERRRPREKRRSTGVSFWTQDSDENEQEQQSDTEEGSNKKETQVNTITLYETSSTSAGDRYDSLLGRSGSYSYLEERKPYSSRLEKDDSTDFKKLYEQILAENEKLKAQLHDTNMELTDLKLQLEKATQRQERFADRSLLEMEKRERRALERRISEMEEELKMLPDLKADNQRLKDENGALIRVISKLSK

SEQ ID NO: 59901 - protein, 974 aa, Homo sapiens
MKMADAKQKRNEQLKRWIGSETDLEPPVVKRQKTKVKFDDGAVFLAACSSGDTDEVLKLLHRGADINYANVDGLTALHQACIDDNVDMVKFLVENGANINQPDNEGWIPLHAAASCGYLDIAEFLIGQGAHVGAVNSEGDTPLDIAEEEAMEELLQNEVNRQGVDIEAARKEEERIMLRDARQWLNSGHINDVRHAKSGGTALHVAAAKGYTEVLKLLIQAGYDVNIKDYDGWTPLHAAAHWGKEEACRILVDNLCDMEMVNKVGQTAFDVADEDILGYLEELQKKQNLLHSEKRDKKSPLIESTANMDNNQSQKTFKNKETLIIEPEKNASRIESLEQEKVDEEEEGKKDESSCSSEEDEEDDSESEAETDKTKPLASVTNANTSSTQAAPVAVTTPTVSSGQATPTSPIKKFPTTATKISPKEEERKDESPATWRLGLRKTGSYGALAEITASKEGQKEKDTAGVTRSASSPRLSSSLDNKEKEKDSKGTRLAYVAPTIPRRLASTSDIEEKENRDSSSLRTSSSYTRRKWEDDLKKNSSVNEGSTYHKSTSNRLWAEDSTEKEKDSVPTAVTIPVAPTVVNAAASTTTLTTTTAGTVSSTTEVRERRRSYLTPVRDEESESQRKARSRQARQSRRSTQGVTLTDLQEAEKTIGRSRSTRTREQENEEKEKEEKEKQDKEKQEEKKESETSREDEYKQKYSRTYDETYQRYRPVSTSSSTTPSSSLSTMSSSLYASSQLNRPNSLVGITSAYSRGITKENEREGEKREEEKEGEDKSQPKSIRERRRPREKRRSTGVSFWTQDSDENEQEQQSDTEEGSNKKETQVNTITLYETSSTSAGDRYDSLLGRSGSYSYLEERKPYSSRLEKDDSTDFKKLYEQILAENEKLKAQLHDTNMELTDLKLQLEKATQRQERFADRSLLEMEKRERRALERRISEMEEELKMLPDLKADNQRLKDENGALIRVISKLSK

SEQ ID NO: 59902 - protein, 995 aa, Homo sapiens
MKMADAKQKRNEQLKRWIGSETDLEPPVVKRQKTKVKFDDGAVFLAACSSGDTDEVLKLLHRGADINYANVDGLTALHQACIDDNVDMVKFLVENGANINQPDNEGWIPLHAAASCGYLDIAEFLIGQGAHVGAVNSEGDTPLDIAEEEAMEELLQNEVNRQGVDIEAARKEEERIMLRDARQWLNSGHINDVRHAKSGGTALHVAAAKGYTEVLKLLIQAGYDVNIKDYDGWTPLHAAAHWGKEEACRILVDNLCDMEMVNKVGQTAFDVADEDILGYLEELQKKQNLLHSEKRDKKSPLIESTANMDNNQSQKTFKNKETLIIEPEKNASRIESLEQEKVDEEEEGKKDESSCSSEEDEEDDSESEAETDKTKPLASVTNANTSSTQAAPVAVTTPTVSSGQATPTSPIKKFPTTATKISPKEEERKDESPATWRLGLRKTGSYGALAEITASKEGQKEKDTAGVTRSASSPRLSSSLDNKEKEKDSKGTRLAYVAPTIPRRLASTSDIEEKENRDSSSLRTSSSYTRRKWEDDLKKNSSVNEGSTYHKSCSFGRRQDDLISSSVPSTTSTPTVTSAAGLQKSLLSSTSTTTKITTGSSSAGTQSSTSNRLWAEDSTEKEKDSVPTAVTIPVAPTVVNAAASTTTLTTTTAGTVSSTTEVRERRRSYLTPVRDEESESQRKARSRQARQSRRSTQGVTLTDLQEAEKTIGRSRSTRTREQENEEKEKEEKEKQDKEKQEEKKESETSREDEYKQKYSRTYDETYQRYRPVSTSSSTTPSSSLSTMSSSLYASSQLNRPNSLVGITSAYSRGITKENEREGEKREEEKEGEDKSQPKSIRERRRPREKRRSTGVSFWTQDSDENEQEQQSDTEEGSNKKETQVNTITLYETSSTSAGDRYDSLLGRSGSYSYLEERKPYSSRLEKDDSTDFKKRQERFADRSLLEMEKRERRALERRISEMEEELKMLPDLKADNQRLKDENGALIRVISKLSK

SEQ ID NO: 59903 - protein, 995 aa, Homo sapiens
MKMADAKQKRNEQLKRWIGSETDLEPPVVKRQKTKVKFDDGAVFLAACSSGDTDEVLKLLHRGADINYANVDGLTALHQACIDDNVDMVKFLVENGANINQPDNEGWIPLHAAASCGYLDIAEFLIGQGAHVGAVNSEGDTPLDIAEEEAMEELLQNEVNRQGVDIEAARKEEERIMLRDARQWLNSGHINDVRHAKSGGTALHVAAAKGYTEVLKLLIQAGYDVNIKDYDGWTPLHAAAHWGKEEACRILVDNLCDMEMVNKVGQTAFDVADEDILGYLEELQKKQNLLHSEKRDKKSPLIESTANMDNNQSQKTFKNKETLIIEPEKNASRIESLEQEKVDEEEEGKKDESSCSSEEDEEDDSESEAETDKTKPLASVTNANTSSTQAAPVAVTTPTVSSGQATPTSPIKKFPTTATKISPKEEERKDESPATWRLGLRKTGSYGALAEITASKEGQKEKDTAGVTRSASSPRLSSSLDNKEKEKDSKGTRLAYVAPTIPRRLASTSDIEEKENRDSSSLRTSSSYTRRKWEDDLKKNSSVNEGSTYHKSCSFGRRQDDLISSSVPSTTSTPTVTSAAGLQKSLLSSTSTTTKITTGSSSAGTQSSTSNRLWAEDSTEKEKDSVPTAVTIPVAPTVVNAAASTTTLTTTTAGTVSSTTEVRERRRSYLTPVRDEESESQRKARSRQARQSRRSTQGVTLTDLQEAEKTIGRSRSTRTREQENEEKEKEEKEKQDKEKQEEKKESETSREDEYKQKYSRTYDETYQRYRPVSTSSSTTPSSSLSTMSSSLYASSQLNRPNSLVGITSAYSRGITKENEREGEKREEEKEGEDKSQPKSIRERRRPREKRRSTGVSFWTQDSDENEQEQQSDTEEGSNKKETQTDSISRYETSSTSAGDRYDSLLGRSGSYSYLEERKPYSSRLEKDDSTDFKKRQERFADRSLLEMEKRERRALERRISEMEEELKMLPDLKADNQRLKDENGALIRVISKLSK

SEQ ID NO: 59904 - protein, 1030 aa, Homo sapiens; identical to SEQ ID NO: 59899

SEQ ID NO: 59905 - protein, 1030 aa, Homo sapiens
MKMADAKQKRNEQLKRWIGSETDLEPPVVKRQKTKVKFDDGAVFLAACSSGDTDEVLKLLHRGADINYANVDGLTALHQACIDDNVDMVKFLVENGANINQPDNEGWIPLHAAASCGYLDIAEFLIGQGAHVGAVNSEGDTPLDIAEEEAMEELLQNEVNRQGVDIEAARKEEERIMLRDARQWLNSGHINDVRHAKSGGTALHVAAAKGYTEVLKLLIQAGYDVNIKDYDGWTPLHAAAHWGKEEACRILVDNLCDMEMVNKVGQTAFDVADEDILGYLEELQKKQNLLHSEKRDKKSPLIESTANMDNNQSQKTFKNKETLIIEPEKNASRIESLEQEKVDEEEEGKKDESSCSSEEDEEDDSESEAETDKTKPLASVTNANTSSTQAAPVAVTTPTVSSGQATPTSPIKKFPTTATKISPKEEERKDESPATWRLGLRKTGSYGALAEITASKEGQKEKDTAGVTRSASSPRLSSSLDNKEKEKDSKGTRLAYVAPTIPRRLASTSDIEEKENRDSSSLRTSSSYTRRKWEDDLKKNSSVNEGSTYHKSCSFGRRQDDLISSSVPSTTSTPTVTSAAGLQKSLLSSTSTTTKITTGSSSAGTQSSTSNRLWAEDSTEKEKDSVPTAVTIPVAPTVVNAAASTTTLTTTTAGTVSSTTEVRERRRSYLTPVRDEESESQRKARSRQARQSRRSTQGVTLTDLQEAEKTIGRSRSTRTREQENEEKEKEEKEKQDKEKQEEKKESETSREDEYKQKYSRTYDETYQRYRPVSTSSSTTPSSSLSTMSSSLYASSQLNRPNSLVGITSAYSRGITKENEREGEKREEEKEGEDKSQPKSIRERRRPREKRRSTGVSFWTQDSDENEQEQQSDTEEGSNKKETQVNTITLYETSSTSAGDRYDSLLGRSGSYSYLEERKPYSSRLEKDDSTDFKKLYEQILAENEKLKAQLHDTNMELTDLKLQLEKATQRQERFADRSLLEMEKRERRALERRISEMEEELKMLPDLKADNQRLKDENGALIRVISKLSK

SEQ ID NO: 59906 - protein, 943 aa, Homo sapiens
MVKFLVENGANINQPDNEGWIPLHAAASCGYLDIAEFLIGQGAHVGAVNSEGDTPLDIAEEEAMEELLQNEVNRQGVDIEAARKEEERIMLRDARQWLNSGHINDVRHAKSGGTALHVAAAKGYTEVLKLLIQAGYDVNIKDYDGWTPLHAAAHWGKEEACRILVDNLCDMEMVNKVGQTAFDVADEDILGYLEELQKKQNLLHSEKRDKKSPLIESTANMDNNQSQKTFKNKETLIIEPEKNASRIESLEQEKVDEEEEGKKDESSCSSEEDEEDDSESEAETDKTKPLASVTNANTSSTQAAPVAVTTPTVSSGQATPTSPIKKFPTTATKISPKEEERKDESPATWRLGLRKTGSYGALAEITASKEGQKEKDTAGVTRSASSPRLSSSLDNKEKEKDSKGTRLAYVAPTIPRRLASTSDIEEKENRDSSSLRTSSSYTRRKWEDDLKKNSSVNEGSTYHKSCSFGRRQDDLISSSVPSTTSTPTVTSAAGLQKSLLSSTSTTTKITTGSSSAGTQSSTSNRLWAEDSTEKEKDSVPTAVTIPVAPTVVNAAASTTTLTTTTAGTVSSTTEVRERRRSYLTPVRDEESESQRKARSRQARQSRRSTQGVTLTDLQEAEKTIGRSRSTRTREQENEEKEKEEKEKQDKEKQEEKKESETSREDEYKQKYSRTYDETYQRYRPVSTSSSTTPSSSLSTMSSSLYASSQLNRPNSLVGITSAYSRGITKENEREGEKREEEKEGEDKSQPKSIRERRRPREKRRSTGVSFWTQDSDENEQEQQSDTEEGSNKKETQTDSISRYETSSTSAGDRYDSLLGRSGSYSYLEERKPYSSRLEKDDSTDFKKLYEQILAENEKLKAQLHDTNMELTDLKLQLEKATQRQERFADRSLLEMEKRERRALERRISEMEEELKMLPDLKADNQRLKDENGALIRVISKLSK

SEQ ID NO: 59907 - protein, 974 aa, Homo sapiens
MKMADAKQKRNEQLKRWIGSETDLEPPVVKRQKTKVKFDDGAVFLAACSSGDTDEVLKLLHRGADINYANVDGLTALHQACIDDNVDMVKFLVENGANINQPDNEGWIPLHAAASCGYLDIAEFLIGQGAHVGAVNSEGDTPLDIAEEEAMEELLQNEVNRQGVDIEAARKEEERIMLRDARQWLNSGHINDVRHAKSGGTALHVAAAKGYTEVLKLLIQAGYDVNIKDYDGWTPLHAAAHWGKEEACRILVDNLCDMEMVNKVGQTAFDVADEDILGYLEELQKKQNLLHSEKRDKKSPLIESTANMDNNQSQKTFKNKETLIIEPEKNASRIESLEQEKVDEEEEGKKDESSCSSEEDEEDDSESEAETDKTKPLASVTNANTSSTQAAPVAVTTPTVSSGQATPTSPIKKFPTTATKISPKEEERKDESPATWRLGLRKTGSYGALAEITASKEGQKEKDTAGVTRSASSPRLSSSLDNKEKEKDSKGTRLAYVAPTIPRRLASTSDIEEKENRDSSSLRTSSSYTRRKWEDDLKKNSSVNEGSTYHKSTSNRLWAEDSTEKEKDSVPTAVTIPVAPTVVNAAASTTTLTTTTAGTVSSTTEVRERRRSYLTPVRDEESESQRKARSRQARQSRRSTQGVTLTDLQEAEKTIGRSRSTRTREQENEEKEKEEKEKQDKEKQEEKKESETSREDEYKQKYSRTYDETYQRYRPVSTSSSTTPSSSLSTMSSSLYASSQLNRPNSLVGITSAYSRGITKENEREGEKREEEKEGEDKSQPKSIRERRRPREKRRSTGVSFWTQDSDENEQEQQSDTEEGSNKKETQTDSISRYETSSTSAGDRYDSLLGRSGSYSYLEERKPYSSRLEKDDSTDFKKLYEQILAENEKLKAQLHDTNMELTDLKLQLEKATQRQERFADRSLLEMEKRERRALERRISEMEEELKMLPDLKADNQRLKDENGALIRVISKLSK

SEQ ID NO: 59908 - protein, 982 aa, Homo sapiens
MAELEHLGGKRAESARMRRAEQLRRWRGSLTEQEPAERRGAGRQPLTRRGSPRVRFEDGAVFLAACSSGDTDEVRKLLARGADINTVNVDGLTALHQACIDENLDMVKFLVENRANVNQQDNEGWTPLHAAASCGYLNIAEYFINHGASVGIVNSEGEVPSDLAEEPAMKDLLLEQVKKQGVDLEQSRKEEEQQMLQDARQWLNSGKIEDVRQARSGATALHVAAAKGYSEVLRLLIQAGYELNVQDYDGWTPLHAAAHWGVKEACSILAEALCDMDIRNKLGQTPFDVADEGLVEHLELLQKKQNVLRSEKETRNKLIESDLNSKIQSGFFKNKEKMLYEEETPKSQEMEEENKESSSSSSEEEEGEDEASESETEKEADKKPEAFVNHSNSESKSSITEQIPAPAQNTFSASSARRFSSGLFNKPEEPKDESPSSWRLGLRKTGSHNMLSEVANSREPIRDRGSSIYRSSSSPRISALLDNKDKERENKSYISSLAPRKLNSTSDIEEKENRESAVNLVRSGSYTRQLWRDEAKGNEIPQTIAPSTYVSTYLKRTPHKSQADTTAEKTADNVSSSTPLCVITNRPLPSTANGVTATPVLSITGTDSSVEAREKRRSYLTPVRDEEAESLRKARSRQARQTRRSTQGVTLTDLQEAERTFSRSRAERQAQEQPREKPTDTEGLEGSPEKHEPSAVPATEAGEGQQPWGRSLDEEPICHRLRCPAQPDKPTTPASPSTSRPSLYTSSHLLWTNRFSVPDSESSETTTNTTTAKEMDKNENEEADLDEQSSKRLSIRERRRPKERRRGTGINFWTKDEDETDGSEEVKETWAERLKRLESGGSNPTTSDSYGDRASARARREAREARLATLTSRVEEDSNRDYKKLYESALTENQKLKTKLQEAQLELADIKSKLEKVAQQKQEKTSDRSSVLEMEKRERRALERKMSEMEEEMKVLTELKSDNQRLKDENGALIRVISKLSK

SEQ ID NO: 59909 - protein, 386 aa, Homo sapiens
MAELEHLGGKRAESARMRRAEQLRRWRGSLTEQEPAERRGAGRQPLTRRGSPRVRFEDGAVFLAACSSGDTDEVRKLLARGADINTVNVDGLTALHQACIDENLDMVKFLVENRANVNQQDNEGWTPLHAAASCGYLNIAEYFINHGASVGIVNSEGEVPSDLAEEPAMKDLLLEQVKKQGVDLEQSRKEEEQQMLQDARQWLNSGKIEDVRQARSGATALHVAAAKGYSEVLRLLIQAGYELNVQDYDGWTPLHAAAHWGVKEACSILAEALCDMDIRNKLGQTPFDVADEGLVEHLELLQKKQNVLRSEKETRNKLIESDLNSKIQSGFFKNKEKMLYEEETPKSQEMEEENKESSSSSSEEEEGEDEASESETEKEAVLFWPF

SEQ ID NO: 59910 - protein, 224 aa, Homo sapiens
MDKNENEEADLDEQSSKRLSIRERRRPKERRRGTGINFWTKDEDETDGSEEVKETWHERLSRLESGGSNPTTSDSYGDRASARARREAREARLATLTSRVEEDSNRDYKKLYESALTENQKLKTKLQEAQLELADIKSKLEKVAQQKQEKTSDRSSVLEMEKRERRALERKMSEMEEEMKNLHQLKQIQTLKQMNEQLQAENRALTRVVARLSESIESSDTQEL

SEQ ID NO: 59911 - protein, 208 aa, Homo sapiens
MDKNENEEADLDEQSSKRLSIRERRRPKERRRGTGINFWTKDEDETDGSEEVKETWHERLSRLESGGSNPTTSDSYGDRASARARREAREARLATLTSRVEEDSNRDYKKLYESALTENQKLKTKLQEAQLELADIKSKLEKVAQQKQEKTSDRSSVLEMEKRERRALERKMSEMEEEMKVLTELKSDNQRLKDENGALIRVISKLSK

SEQ ID NO: 59912 - protein, 982 aa, Homo sapiens
MAELEHLGGKRAESARMRRAEQLRRWRGSLTEQEPAERRGAGRQPLTRRGSPRVRFEDGAVFLAACSSGDTDEVRKLLARGADINTVNVDGLTALHQACIDENLDMVKFLVENRANVNQQDNEGWTPLHAAASCGYLNIAEYFINHGASVGIVNSEGEVPSDLAEEPAMKDLLLEQVKKQGVDLEQSRKEEEQQMLQDARQWLNSGKIEDVRQARSGATALHVAAAKGYSEVLRLLIQAGYELNVQDYDGWTPLHAAAHWGVKEACSILAEALCDMDIRNKLGQTPFDVADEGLVEHLELLQKKQNVLRSEKETRNKLIESDLNSKIQSGFFKNKEKMLYEEETPKSQEMEEENKESSSSSSEEEEGEDEASESETEKEADKKPEAFVNHSNSESKSSITEQIPAPAQNTFSASSARRFSSGLFNKPEEPKDESPSSWRLGLRKTGSHNMLSEVANSREPIRDRGSSIYRSSSSPRISALLDNKDKERENKSYISSLAPRKLNSTSDIEEKENRESAVNLVRSGSYTRQLWRDEAKGNEIPQTIAPSTYVSTYLKRTPHKSQADTTAEKTADNVSSSTPLCVITNRPLPSTANGVTATPVLSITGTDSSVEAREKRRSYLTPVRDEEAESLRKARSRQARQTRRSTQGVTLTDLQEAERTFSRSRAERQAQEQPREKPTDTEGLEGSPEKHEPSAVPATEAGEGQQPWGRSLDEEPICHRLRCPAQPDKPTTPASPSTSRPSLYTSSHLLWTNRFSVPDSESSETTTNTTTAKEMDKNENEEADLDEQSSKRLSIRERRRPKERRRGTGINFWTKDEDETDGSEEVKETWHERLSRLESGGSNPTTSDSYGDRASARARREAREARLATLTSRVEEDSNRDYKKLYESALTENQKLKTKLQEAQLELADIKSKLEKVAQQKQEKTSDRSSVLEMEKRERRALERKMSEMEEEMKVLTELKSDNQRLKDENGALIRVISKLSK

SEQ ID NO: 59913 - protein, 782 aa, Homo sapiens
MSGEDGPAAGPGAAAAAARERRREQLRQWGARAGAEPGPGERRARTVRFERAAEFLAACAGGDLDEARLMLRAADPGPGAELDPAAPPPARAVLDSTNADGISALHQACIDENLEVVRFLVEQGATVNQADNEGWTPLHVAASCGYLDIARYLLSHGANIAAVNSDGDLPLDLAESDAMEGLLKAEIARRGVDVEAAKRAEEELLLHDTRCWLNGGAMPEARHPRTGASALHVAAAKGYIEVMRLLLQAGYDPELRDGDGWTPLHAAAHWGVEDACRLLAEHGGGMDSLTHAGQRPCDLADEEVLSLLEELARKQEDLRNQKEASQSRGQEPQAPSSSKHRRSSVCRLSSREKISLQDLSKERRPGGAGGPPIQDEDEGEEGPTEPPPAEPRTLNGVSSPPHPSPKSPVQLEEAPFSRRFGLLKTGSSGALGPPERRTAEGAPGAGLQRSASSSWLEGTSTQAKELRLARITPTPSPKLPEPSVLSEVTKPPPCLENSSPPSRIPEPESPAKPNVPTASTAPPADSRDRRRSYQMPVRDEESESQRKARSRLMRQSRRSTQGVTLTDLKEAEKAAGKAPESEKPAQSLDPSRRPRVPGVENSDSPAQRAEAPDGQGPGPQAAREHRKVGKEWRGPAEGEEAEPADRSQESSTLEGGPSARRQRWQRDLNPEPEPESEEPDGGFRTLYAELRRENERLREALTETTLRLAQLKVELERATQRQERFAERPALLELERFERRALERKAAELEEELKALSDLRADNQRLKDENAALIRVISKLSK

SEQ ID NO: 59914 - protein, 719 aa, Homo sapiens
MSGEDGPAAGPGAAAAAARERRREQLRQWGARAGAEPGPGERRARTVRFERAAEFLAACAGGDLDEARLMLRAADPGPGAELDPAAPPPARAVLDSTNADGISALHQACIDENLEVVRFLVEQGATVNQADNEGWTPLHVAASCGYLDIARYLLSHGANIAAVNSDGDLPLDLAESDAMEGLLKAEIARRGVDVEAAKRAEEELLLHDTRCWLNGGAMPEARHPRTGASALHVAAAKGYIEVMRLLLQAGYDPELRDGDGWTPLHAAAHWGVEDACRLLAEHGGGMDSLTHAGQRPCDLADEEVLSLLEELARKQEDLRNQKEASQSRGQEPQAPSSSKHRRSSVCRLSSREKISLQDLSKERRPGGAGGPPIQDEDEGEEGPTEPPPAEPRTLNGVSSPPHPSPKSPVQLEEAPFSRRFGLLKTGSSGALGPPERRTAEGAPGAGLQRSASSSWLEGTSTQAKELRLARITPTPSPKLPEPSVLSEVTKPPPCLENSSPPSRIPEPESPAKPNVPTASTAPPADSRDRRRSYQMPVRDEESESQRKARSRLMRQSRRSTQGVTLTDLKEAEKAGEEAEPADRSQESSTLEGGPSARRQRWQRDLNPEPEPESEEPDGGFRTLYAELRRENERLREALTETTLRLAQLKVELERATQRQERFAERPALLELERFERRALERKAAELEEELKALSDLRADNQRLKDENAALIRVISKLSK

SEQ ID NO: 59915 - protein, 707 aa, Homo sapiens
MRNGGPCQPLAAGPRAEGASVNWSVTAWGPGTQACIDENLEVVRFLVEQGATVNQADNEGWTPLHVAASCGYLDIARYLLSHGANIAAVNSDGDLPLDLAESDAMEGLLKAEIARRGVDVEAAKRAEEELLLHDTRCWLNGGAMPEARHPRTGASALHVAAAKGYIEVMRLLLQAGYDPELRDGDGWTPLHAAAHWGVEDACRLLAEHGGGMDSLTHAGQRPCDLADEEVLSLLEELARKQEDLRNQKEASQSRGQEPQAPSSSKHRRSSVCRLSSREKISLQDLSKERRPGGAGGPPIQDEDEGEEGPTEPPPAEPRTLNGVSSPPHPSPKSPVQLEEAPFSRRFGLLKTGSSGALGPPERRTAEGAPGAGLQRSASSSWLEGTSTQAKELRLARITPTPSPKLPEPSVLSEVTKPPPCLENSSPPSRIPEPESPAKPNVPTASTAPPADSRDRRRSYQMPVRDEESESQRKARSRLMRQSRRSTQGVTLTDLKEAEKAAGKAPESEKPAQSLDPSRRPRVPGVENSDSPAQREAPDGQGPGPQAAREHRKVGKEWRGPAEGEEAEPADRSQESSTLEGGPSARRQRWQRDLNPEPEPESEEPDGGFRTLYAELRRENERLREALTETTLRLAQLKVELERATQRQERFAERPALLELERFERRALERKAAELEEELKALSDLRADNQRLKDENAALIRVISKLSK

SEQ ID NO: 59916 - protein, 713 aa, Homo sapiens
MEPGTGGSRKRLGPRAGFRFWPPFFPRRSQAGSSKFPTPLGPENSGNPTLLSSAQPETRVSYWTKLLSQLLAPLPGLLQKVLIWSQLFGGMFPTRWLDFAGVYSALRALKGREKPAAPTAQKSLSSLQLDSSDPSVTSPLDWLEEGIHWQYSPPDLKLELKAKGSALDPAAQAFLLEQQLWGVELLPSSLQSRLYSNRELGSSPSGPLNIQRIDNFSVVSYLLNPSYLDCFPRLEVSYQNSDGNSEVVGFQTLTPESSCLREDHCHPQPLSAELIPASWQGCPPLSTEGLPEIHHLRMKRLEFLQQANKGQDLPTPDQDNGYHSLEEEHSLLRMDPKHCRDNPTQFVPAAGDIPGNTQESTEEKIELLTTEVPLALEEESPSEGCPSSEIPMEKEPGEGRISVVDYSYLEGDLPISARPACSNKLIDYILGGASSDLETSSDPEGEDWDEEAEDDGFDSDSSLSDSDLEQDPEGLHLWNSFCSVDPYNPQNFTATIQTAARIVPEEPSDSEKDLSGKSDLENSSQSGSLPETPEHSSGEEDDWESSADEAESLKLWNSFCNSDDPYNPLNFKAPFQTSGENEKGCRDSKTPSESIVAISECHTLLSCKVQLLGSQESECPDSVQRDVLSGGRHTHVKRKKVTFLEEVTEYYISGDEDRKGPWEEFARDGCRFQKRIQETEDAIGYCLTFEHRERMFNRLQGTCFKGLNVLKQC

SEQ ID NO: 59917 - protein, 623 aa, Homo sapiens [sequence omitted]

SEQ ID NO: 59918 - protein, 567 aa, Homo sapiens
MASHVDLLTELQLLEKVPTLERLRAAQKRRAQQLKKWAQYEQDLQHRKRKHERKRSTGGRRKKVSFEASVALLEASLRNDAEEVRYFLKNKVSPDLCNEDGLTALHQCCIDNFEEIVKLLLSHGANVNAKDNELWTPLHAAATCGHINLVKILVQYGADLLAVNSDGNMPYDLCEDEPTLDVIETCMAYQGITQEKINEMRVAPEQQMIADIHCMIAAGQDLDWIDAQGATLLHIAGANGYLRAAELLLDHGVRVDVKDWDGWEPLHAAAFWGQMQMAELLVSHGASLSARTSMDEMPIDLCEEEEFKVLLLELKHKHDVIMKSQLRHKSSLSRRTSSAGSRGKVVRRASLSDRTNLYRKEYEGEAILWQRSAAEDQRTSTYNGDIRETRTDQENKDPNPRLEKPVLLSEFPTKIPRGELDMPVENGLRAPVSAYQYALANGDVWKVHEVPDYSMAYGNPGVADATPPWSSYKEQSPQTLLELKRQRAAAKLLSHPFLSTHLGSSMARTGESSSEGKAPLIGGRTSPYSSNGTSVYYTVTSGDPPLLKFKAPIEEMEEKVHGCCRIS

SEQ ID NO: 59919 - protein, 525 aa, Homo sapiens
MASHVDLLTELQLLEKVPTLERLRAAQKRRAQQLKKWAQYEQDLQHRKRKHERKRSTGGRRKKVSFEASVALLEASLRNDAEEVRYFLKNKVSPDLCNEDGLTALHQCCIDNFEEIVKLLLSHGANVNAKDNELWTPLHAAATCGHINLVKILVQYGADLLAVNSDGNMPYDLCEDEPTLDVIETCMAYQGITQEKINEMRVAPEQQMIADIHCMIAAGQDLDWIDAQGATLMQMAELLVSHGASLSARTSMDEMPIDLCEEEEFKVLLLELKHKHDVIMKSQLRHKSSLSRRTSSAGSRGKVVRRASLSDRTNLYRKEYEGEAILWQRSAAEDQRTSTYNGDIRETRTDQENKDPNPRLEKPVLLSEFPTKIPRGELDMPVENGLRAPVSAYQYALANGDVWKVHEVPDYSMAYGNPGVADATPPWSSYKEQSPQTLLELKRQRAAAKLLSHPFLSTHLGSSMARTGESSSEGKAPLIGGRTSPYSSNGTSVYYTVTSGDPPLLKFKAPIEEMEEKVHGCCRIS

SEQ ID NO: 59920 - protein, 1122 aa, Homo sapiens
MEPSEVPSQISKDNFLEVPNLSDSLCEDEEVTFQPGFSPQPSRRGSDSSEDIYLDTPSSGTRRVSFADSFGFNLVSVKEFDCWELPSASTTFDLGTDIFHTEEYVLAPLFDLPSSKEDLMQQLQIQKAILESTESLLGSTSIKGIIRVLNVSFEKLVYVRMSLDDWQTHYDILAEYVPNSCDGETDQFSFKIVLVPPYQKDGSKVEFCIRYETSVGTFWSNNNGTNYTFICQKKEQEPEPVKPWKEVPNRQIKGCLKVKSSKEESSVTSEENNFENPKNTDTYIPTIICSHEDKEDLEASNRNVKDVNREHDEHNEKELELMINQHLIRTRSTASRDERNTFSTDPVNFPNKAEGLEKKQIHGEICTDLFQRSLSPSSSAESSVKGDFYCNEKYSSGDDCTHQPSEETTSNMGEIKPSLGDTSSDELVQLHTGSKEVLDDNANPAHGNGTVQIPCPSSDQLMAGNLNKKHEGGAKNIEVKDLGCLRRDFHSDTSACLKESTEEGSSKEDYYGNGKDDEEQRIYLGVNEKQRKNFQTILHDQERKMGNPKISVAGIGASNRDLATLLSEHTAIPTRAITADVSHSPRTNLSWEEAVLTPEHHHLTSEGSALGGITGQVCSSRTGNVLRNDYLFQVEEKSGGINSEDQDNSPQHKQSWNVLESQGKSRENKTNITEHIKGQTDCEDVWGKRDNTRSLKATTEELFTCQETVCCELSSLADHGITEKAEAGTAYIIKTTSESTPESMSAREKAIIAKLPQETARSDRPIEVKETAFDPHEGRNDDSHYTLCQRDTVGVIYDNDFEKESRLGICNVRVDEMEKEETMSMYNPRKTHDREKCGTGNITSVEESSWVITEYQKATSKLDLQLGMLPTDKTVFSENRDLRQVQELSKKTDSDAIVHSAFNSDTNRAPQNSSPFSKHHTEISVSTNEQAIAVENAVTTMASQPISTKSENICNSTREIQGIEKHPYPESKPEEVSRSSGIVTSGSRKERCIGQIFQTEEYSVEKSLGPMILINKPLENMEEARHENEGLVSSGQSLYTSGEKESDSSASTSLPVEESQAQGNESLFSKYTNSKIPYFLLFLIFLITVYHYDLMIGLTFYVLSLSWLSWEEGRQKESVKKK

SEQ ID NO: 59921 - protein, 317 aa, Homo sapiens
MSCTRMIQVLDPRPLTSSVMPVDVAMRLCLAHSPPVKSFLGPYDEFQRRHFVNKLKPLKSCLNIKHKAKSQNDWKCSHNQAKKRVVFADSKGLSLTAIHVFSDLPEEPAWDLQFDLLDLNDISSALKHHEEKNLILDFPQPSTDYLSFRSHFQKNFVCLENCSLQERTVTGTVKVKNVSFEKKVQIRITFDSWKNYTDVDCVYMKNVYGGTDSDTFSFAIDLPPVIPTEQKIEFCISYHANGQVFWDNNDGQNYRIVHVQWKPDGVQTQMAPQDCAFHQTSPKTELESTIFGSPRLASGLFPEWQSWGRMENLASYR

SEQ ID NO: 59922 - protein, 297 aa, Homo sapiens
MSCTRMIQVLDPRPLTSSVMPVDVAMRLCLAHSPPVKSFLGPYDEFQRRHFVNKLKPLKSCLNIKHKAKSQNDWKCSHNQAKKRVVFADSKGLSLTAIHVFSDLPEEPAWDLQFDLLDLNDISSALSFRSHFQKNFVCLENCSLQERTVTGTVKVKNVSFEKKVQIRITFDSWKNYTDVDCVYMKNVYGGTDSDTFSFAIDLPPVIPTEQKIEFCISYHANGQVFWDNNDGQNYRIVHVQWKPDGVQTQMAPQDCAFHQTSPKTELESTIFGSPRLASGLFPEWQSWGRMENLASYR

SEQ ID NO: 59923 - protein, 199 aa, Homo sapiens
MSSPTSPLKHHEEKNLILDFPQPSTDYLSFRSHFQKNFVCLENCSLQERTVTGTVKVKNVSFEKKVQIRITFDSWKNYTDVDCVYMKNVYGGTDSDTFSFAIDLPPVIPTEQKIEFCISYHANGQVFWDNNDGQNYRIVHVQWKPDGVQTQMAPQDCAFHQTSPKTELESTIFGSPRLASGLFPEWQSWGRMENLASYR

SEQ ID NO: 59924 - protein, 299 aa, Homo sapiens
MSRGPSSAVLPSALGSRKLGPRSLSCLSDLDGGVALEPRACRPPGSPGRAPPPTPAPSGCDPRLRPIILRRARSLPSSPERRQKAAGAPGAACRPGCSQKLRVRFADALGLELAQVKVFNAGDDPSVPLHVLSRLAINSDLCCSSQDLEFTLHCLVPDFPPPVEAADFGERLQRQLVCLERVTCSDLGISGTVRVCNVAFEKQVAVRYTFSGWRSTHEAVARWRGPAGPEGTEDVFTFGFPVPPFLLELGSRVHFAVRYQVAGAEYWDNNDHRDYSLTCRNHALHMPRGECEESWIHFI

SEQ ID NO: 59925 - protein, 360 aa, Homo sapiens
MAAERGAGQQQSQEMMEVDRRVESEESGDEEGKKHSSGIVADLSEQSLKDGEERGEEDPEEEHELPVDMETINLDRDAEDVDLNHYRIGKIEGFEVLKKVKTLCLRQNLIKCIENLEELQSLRELDLYDNQIKKIENLEALTELEILDISFNLLRNIEGVDKLTRLKKLFLVNNKISKIENLSNLHQLQMLELGSNRIRAIENIDTLTNLESLFLGKNKITKLQNLDALTNLTVLSMQSNRLTKIEGLQNLVNLRELYLSHNGIEVIEGLENNNKLTMLDIASNRIKKIENISHLTELQEFWMNDNLLESWSDLDELKGARSLETVYLERNPLQKDPQYRRKVMLALPSVRQIDATFVRF

SEQ ID NO: 59926 - protein, 317 aa, Homo sapiens
MAAERGAGQQQSQEMMEEEHELPVDMETINLDRDAEDVDLNHYRIGKIEGFEVLKKVKTLCLRQNLIKCIENLEELQSLRELDLYDNQIKKIENLEALTELEILDISFNLLRNIEGVDKLTRLKKLFLVNNKISKIENLSNLHQLQMLELGSNRIRAIENIDTLTNLESLFLGKNKITKLQNLDALTNLTVLSMQSNRLTKIEGLQNLVNLRELYLSHNGIEVIEGLENNNKLTMLDIASNRIKKIENISHLTELQEFWMNDNLLESWSDLDELKGARSLETVYLERNPLQKDPQYRRKVMLALPSVRQIDATFVRF

SEQ ID NO: 59927 - protein, 237 aa, Homo sapiens
MAAERGAGQQQSQEMMEEEHELPVDMETINLDRDAEDVDLNHYRIGKIEGFEVLKKVKTLCLRQNLIKCIENLEELQSLRELDLYDNQIKKIENLEALTELEILDISFNLLRNIEGVDKLTRLKKLFLVNNKISKIENLSNLHQLQMLELGSNRIRAIENIDTLTNLESLFLGKNKITKLQNLDALTNLTVLSMQSNRLTKIEGLQNLVNLRELYLSHNGIEVIEGLENNVQDSLTY

SEQ ID NO: 59928 - protein, 280 aa, Homo sapiens
MAAERGAGQQQSQEMMEVDRRVESEESGDEEGKKHSSGIVADLSEQSLKDGEERGEEDPEEEHELPVDMETINLDRDAEDVDLNHYRIGKIEGFEVLKKVKTLCLRQNLIKCIENLEELQSLRELDLYDNQIKKIENLEALTELEILDISFNLLRNIEGVDKLTRLKKLFLVNNKISKIENLSNLHQLQMLELGSNRIRAIENIDTLTNLESLFLGKNKITKLQNLDALTNLTVLSMQSNRLTKIEGLQNLVNLRELYLSHNGIEVIEGLENNVQDSLTY

SEQ ID NO: 59929 - protein, 360 aa, Homo sapiens; identical to SEQ ID NO: 59925

SEQ ID NO: 59930 - protein, 127 aa, Homo sapiens
MVQTAVVPVKKKRVEGPGSLGLEESGSRRMQNFAFSGGLYGGLPPTHSEAGSQPHGIHGTALIGGLPMPYPNLAPDVDLTPVVPSAVNMNPAPNPAVYNPEAVNEPKKKKYAKEAWPGKKPTPSLLI

SEQ ID NO: 59931 - protein, 351 aa, Homo sapiens
MAAAANSGSSLPLFDCPTWAGKPPPGLHLDVVKGDKLIEKLIIDEKKYYLFGRNPDLCDFTIDHQSCSRVHAALVYHKHLKRVFLIDLNSTHGTFLGHIRLEPHKPQQIPIDSTVSFGASTRAYTLREKPQTLPSAVKGDEKMGGEDDELKGLLGLPEEETELDNLTEFNTAHNKRISTLTIEEGNLDIQRPKRKRKNSRVTFSEDDEIINPEDVDPSVGRFRNMVQTAVVPVKKKRVEGPGSLGLEESGSRRMQNFAFSGGLYGGLPPTHSEAGSQPHGIHGTALIGGLPMPYPNLAPDVDLTPVVPSAVNMNPAPNPAVYNPEAVNEPKKKKYAKEAWPGKKPTPSLLI

SEQ ID NO: 59932 - protein, 209 aa, Homo sapiens
MGGEDDELKGLLGLPEEETELDNLTEFNTAHNKRISTLTIEEGNLDIQRPKRKRKNSRVTFSEDDEIINPEDVDPSVGRFRNMVQTAVVPVKKKRVEGPGSLGLEESGSRRMQNFAFSGGLYGGLPPTHSEAGSQPHGIHGTALIGGLPMPYPNLAPDVDLTPVVPSAVNMNPAPNPAVYNPEAVNEPKKKKYAKEAWPGKKPTPSLLI

SEQ ID NO: 59933 - protein, 236 aa, Homo sapiens
MGGEDDELKGLLGLPEEETELDNLTEFNTAHNKRISTLTIEEGNLDIQRPKRKRKNSRVTFSEDDEIINPEDVDPSVGRFRNMVQTAVVPVKKKRVEGPGSLGLEESGSRRMQNFAFSGGLYGGLPPTHSEAGSQPHGIHGTALIGGLPMPYPNLAPDVDLTPVVPSAVNMNPAPNPAVYNPEAVNEPKKKKYAKEAWPGCEFVSQSLIATAIWKCLLKAQSLGLGGNAPSPLYYK

SEQ ID NO: 59934 - protein, 205 aa, Homo sapiens
MGGEDDELKGLLGLPEEETELDNLTEFNTAHNKRISTLTIEEGNLDIQRPKRKRKNSRVTFSEDDEIINPEDVDPSVGRFRNMVQTAVVPVKKKRVEGPGSLGLEESGSRRMQNFAFSGGLYGGLPPTHSEAGSQPHGIHGTALIGGLPMPYPNLAPDVDLTPVVPSAVNMNPAPNPAVYNPEAVNEPKKKKYAKEAWPGKKPTP

SEQ ID NO: 59935 - protein, 199 aa, Homo sapiens
MAAAANSGSSLPLFDCPTWAGKPPPGLHLDVVKGDKLIEKLIIDEKKYYLFGRNPDLCDFTIDHQSCSRVHAALVYHKHLKRVFLIDLNSTHGTFLGHIRLEPHKPQQIPIDSTVSFGASTRAYTLREKPQTLPSAVKGDEKMGGEDDELKGLLGLPEEETELDNLTEFNTAHNHMASMGQHSSVACPCHTQTLPLMWT

SEQ ID NO: 59936 - protein, 1296 aa, Homo sapiens
MLKTESSGERTTLRSASPHRNAYRTEFQALKSTFDKPKSDGEQKTKEGEGSQQSRGRKYGSNVNRIKNLFMQMGMEPNENAAVIAKTRGKGGHSSPQRRMKPKEFLEKTDGSVVKLESSVSERISRFDTMYDGPSYSKFTETRKMFERSVHESGQNNRYSPKKEKAGGSEPQDEWGGSKSNRGSTDSLDSLSSRTEAVSPTVSQLSAVFENTDSPSAIISEKAENNEYSVTGHYPLNLPSVTVTNLDTFGHLKDSNSWPPSNKRGVDTEDAHKSNATPVPEVASKSTSLASIPGEEIQQSKEPEDSTSNQQTPDSIDKDGPEEPCAESKAMPKSEIPSPQSQLLEDAEANLVGREAAKQQRKELAGGDFTSPDASASSCGKEVPEDSNNFDGSHVYMHSDYNVYRVRSRYNSDWGETGTEQDEEEDSDENSYYQPDMEYSEIVGLPEEEEIPANRKIKFSSAPIKVFNTYSNEDYDRRNDEVDPVAASAEYELEKRVEKLELFPVELEKDEDGLGISIIGMGVGADAGLEKLGIFVKTVTEGGAAQRDGRIQVNDQIVEVDGISLVGVTQNFAATVLRNTKGNVRFVIGREKPGQVSEVAQLISQTLEQERRQRELLEQHYAQYDADDDETGEYATDEEEDEVGPVLPGSDMAIEVFELPENEDMFSPSELDTSKLSHKFKELQIKHAVTEAEIQKLKTKLQAAENEKVRWELEKTQLQQNIEENKERMLKLESYWIEAQTLCHTVNEHLKETQSQYQALEKKYNKAKKLIKDFQQKELDFIKRQEAERKKIEDLEKAHLVEVQGLQVRIRDLEAEVFRLLKQNGTQVNNNNNIFERRTSLGEVSKGDTMENLDGKQTSCQDGLSQDLNEAVPETERLDSKALKTRAQLSVKNRRQRPSRTRLYDSVSSTDGEDSLERKGLRTSSPESDSGVPPLTPVDSNVPFSSDHIAEFQEEPLDPEMGPLSSMWGDTSLFSTSKSDHDVEESPCHHQTTNKKILREKDDAKDPKSLRASSSLAVQGGKIKRKFVDLGAPLRRNSSKGKKWKEKEKEASRFSAGSRIFRGRLENWTPKPCSTAQTSTRSPCMPFSWFNDSRKGSYSFRNLPAPTSSLQPSPETLISDKKGSKNFTFNDDFSPSSTSSADLSGLGAEPKTPGLSQSLALSSDEILDDGQSPKHSQCQNRAVQEWSVQQVSHWLMSLNLEQYVSEFSAQNITGEQLLQLDGNKLKALGMTASQDRAVVKKKLKEMKMSLEKARKAQEKMEKQREKLRRKEQEQMQRKSKKTEKMTSTTAEGAGEQ

SEQ ID NO: 59937 - protein, 1098 aa, Homo sapiens
MLKTESSGERTTLRSASPHRNAYRTEFQALKSTFDKPKSDGEQKTKEGEGSQQSRGRKYGSNVNRIKNLFMQMGMEPNENAAVIAKTRGKGGHSSPQRRMKPKEFLEKTDGSVVKLESSVSERISRFDTMYDGPSYSKFTETRKMFERSVHESGQNNRYSPKKEKAGGSEPQDEWGGSKSNRGSTDSLDSLSSRTEAVSPTVSQLSAVFENTDSPSAIISEKAENNEYSVTGHYPLNLPSVTVTNLDTFGHLKDSNSWPPSNKRGVDTEDAHKSNATPVPEVASKSTSLASIPGEEIQQSKEPEDSTSNQQTPDSIDKDGPEEPCAESKAMPKSEIPSPQSQLLEDAEANLVGREAAKQQRKELAGGDFTSPDASASSCGKEVPEDSNNFDGSHVYMHSDYNVYRVRSRYNSDWGETGTEQDEEEDSDENSYYQPDMEYSEIVGLPEEEEIPANRKIKFSSAPIKVFNTYSNEDYDRRNDEVDPVAASAEYELEKRVEKLELFPVELEKDEDGLGISIIGMGVGADAGLEKLGIFVKTVTEGGAAQRDGRIQVNDQIVEVDGISLVGVTQNFAATVLRNTKGNVRFVIGREKPGQVSEVAQLISQTLEQERRQRELLEQHYAQYDADDDETGEYATDEEEDEVGPVLPGSDMAIEVFELPENEDMFSPSELDTSKLSHKFKELQIKHAVTEAEIQKLKTKLQAAENEKVRWELEKTQLQQNIEENKERMLKLESYWIEAQTLCHTVNEHLKETQSQYQALEKKYNKAKKLIKDFQQKELDFIKRQEAERKKIEDLEKAHLVEVQGLQVRIRDLEAEVFRLLKQNGTQVNNNNNIFERRTSLGEVSKGDTMENLDGKQTSCQDGLSQDLNEAVPETERLDSKALKTRAQLSVKNRRQRPSRTRLYDSVSSTDGEDSLERKNFTFNDDFSPSSTSSADLSGLGAEPKTPGLSQSLALSSDESLDMIDDEILDDGQSPKHSQCQNRAVQEWSVQQVSHWLMSLNLEQYVSEFSAQNITGEQLLQLDGNKLKALGMTASQDRAVVKKKLKEMKMSLEKARKAQEKMEKQREKLRRKEQEQMQRKSKKTEKMTSTTAEGAGEQ

SEQ ID NO: 59938 - protein, 73 aa, Homo sapiens
MLKTESSGERTTLRSASPHRNAYRTEFQALKSTFDKPKSDGEQKTKEGEGSQQSRGRKYGSNVNRIKNLFMQM

SEQ ID NO: 59939 - protein, 41 aa, Homo sapiens
MLKTESSGERTTLRSASPHRNAYRTEFQALKSTFDKPKSDG

SEQ ID NO: 59940 - protein, 1098 aa, Homo sapiens; identical to SEQ ID NO: 59937

SEQ ID NO: 59941 - protein, 1253 aa, Homo sapiens
MLKTESSGERTTLRSASPHRNAYRTEFQALKSTFDKPKSDGEQKTKEGEGSQQSRGRKYGSNVNRIKNLFMQMGMEPNENAAVIAKTRGKGGHSSPQRRMKPKEFLEKTDGSVVKLESSVSERISRFDTMYDGPSYSKFTETRKMFERSVHESGQNNRYSPKKEKAGGSEPQDEWGGSKSNRGSTDSLDSLSSRTEAVSPTVSQLSAVFENTDSPSAIISEKAENNEYSVTGHYPLNLPSVTVTNLDTFGHLKDSNSWPPSNKRGVDTEDAHKSNATPVPEVASKSTSLASIPGEEIQQSKEPEDSTSNQQTPDSIDKDGPEEPCAESKAMPKSEIPSPQSQLLEDAEANLVGREAAKQQRKELAGGDFTSPDASASSCGKEVPEDSNNFDGSHVYMHSDYNVYRVRSRYNSDWGETGTEQDEEEDSDENSYYQPDMEYSEIVGLPEEEEIPANRKIKFSSAPIKVFNTYSNEDYDRRNDEVDPVAASAEYELEKRVEKLELFPVELEKDEDGLGISIIGMGVGADAGLEKLGIFVKTVTEGGAAQRDGRIQVNDQIVEVDGISLVGVTQNFAATVLRNTKGNVRFVIGREKPGQVSEVAQLISQTLEQERRQRELLEQHYAQYDADDDETGEYATDEEEDEVGPVLPGSDMAIEVFELPENEDMFSPSELDTSKLSHKFKELQIKHAVTEAEIQKLKTKLQAAENEKVRWELEKTQLQQNIEENKERMLKLESYWIEAQTLCHTVNEHLKETQSQYQALEKKYNKAKKLIKDFQQKELDFIKRQEAERKKIEDLEKAHLVEVQGLQVRIRDLEAEVFRLLKQNGTQVNNNNNIFERRTSLGEVSKGDTMENLDGKQTSCQDGLSQDLNEAVPETERLDSKALKTRAQLSVKNRRQRPSRTRLYDSVSSTDGEDSLERKPSNSFYNHMHITKLLPPKGLRTSSPESDSGVPPLTPVDSNVPFSSDHIAEFQEEPLDPEMGPLSSMWGDTSLFSTSKSDHDVEESPCHHQTTNKKILREKDDAKDPKSLRASSSLAVQGGKIKRKFVDLGAPLRRNSSKGKKWKEKEKEASRFSAGSRIFRGRLENWTPKPCSTAQTSTRSPCMPFSWFNDSRKGSYSFRNLPAPTSSLQPSPETLISDKKGSKNFTFNDDFSPSSTSSADLSGLGAEPKTPGLSQSLALSSDEALGMTASQDRAVVKKKLKEMKMSLEKARKAQEKMEKQREKLRRKEQEQMQRKSKKTEKMTSTTAEGAGEQ

SEQ ID NO: 59942 - protein, 309 aa, Homo sapiens
MDEKVFTKELDQWIEQLNECKQLSESQVKSLCEKAKEILTKESNVQEVRCPVTVCGDVHGQFHDLMELFRIGGKSPDTNYLFMGDYVDRGYYSVETVTLLVALKVRYRERITILRGNHESRQITQVYGFYDECLRKYGNANVWKYFTDLFDYLPLTALVDGQIFCLHGGLSPSIDTLDHIRALDRLQEVPHEGPMCDLLWSDPDDRGGWGISPRGAGYTFGQDISETFNHANGLTLVSRAHQLVMEGYNWCHDRNVVTIFSAPNYCYRCGNQAAIMELDDTLKYSFLQFDPAPRRGEPHVTRRTPDYFL

SEQ ID NO: 59943 - protein, 309 aa, Homo sapiens
MDDKAFTKELDQWVEQLNECKQLNENQVRTLCEKAKEILTKESNVQEVRCPVTVCGDVHGQFHDLMELFRIGGKSPDTNYLFMGDYVDRGYYSVETVTLLVALKVRYPERITILRGNHESRQITQVYGFYDECLRKYGNANVWKYFTDLFDYLPLTALVDGQIFCLHGGLSPSIDTLDHIRALDRLQEVPHEGPMCDLLWSDPDDRGGWGISPRGAGYTFGQDISETFNHANGLTLVSRAHQLVMEGYNWCHDRNVVTIFSAPNYCYRCGNQAAIMELDDTLKYSFLQFDPAPRRGEPHVTRRTPDYFL

SEQ ID NO: 59944 - protein, 309 aa, Homo sapiens; identical to SEQ ID NO: 59943

SEQ ID NO: 59945 - protein, 486 aa, Homo sapiens
MSSSSPPAGAASAAISASEKVDGFTRKSVRKAQRQKRSQGSSQFRSQGSQAELHPLPQLKDATSNEQQELFCQKLQQCCILFDFMDSVSDLKSKEIKRATLNELVEYVSTNRGVIVESAYSDIVKMISANIFRTLPPSDNPDFDPEEDEPTLEASWPHIQLVYEFFLRFLESPDFQPSIAKRYIDQKFVQQLLELFDSEDPRERDFLKTVLHRIYGKFLGLRAFIRKQINNIFLRFIYETEHFNGVAELLEILGSIINGFALPLKAEHKQFLMKVLIPMHTAKGLALFHAQLAYCVVQFLEKDTTLTEPVIRGLLKFWPKTCSQKEVMFLGEIEEILDVIEPTQFKKIEEPLFKQISKCVSSSHFQVAERALYFWNNEYILSLIEENIDKILPIMFASLYKISKEHWNPTIVALVYNVLKTLMEMNGKLFDDLTSSYKAERQREKKKELEREELWKKLEELKLKKALEKQNSAYNMHSILSNTSAE

SEQ ID NO: 59946 - protein, 429 aa, Homo sapiens
MIMNATSNEQQELFCQKLQQCCILFDFMDSVSDLKSKEIKRATLNELVEYVSTNRGVIVESAYSDIVKMISANIFRTLPPSDNPDFDPEEDEPTLEASWPHIQLVYEFFLRFLESPDFQPSIAKRYIDQKFVQQLLELFDSEDPRERDFLKTVLHRIYGKFLGLRAFIRKQINNIFLRFIYETEHFNGVAELLEILGSIINGFALPLKAEHKQFLMKVLIPMHTAKGLALFHAQLAYCVVQFLEKDTTLTEPVIRGLLKFWPKTCSQKEVMFLGEIEEILDVIEPTQFKKIEEPLFKQISKCVSSSHFQVAERALYFWNNEYILSLIEENIDKILPIMFASLYKISKEHWNPTIVALVYNVLKTLMEMNGKLFDDLTSSYKAERQREKKKELEREELWKKLEELKLKKALEKQNSAYNMHSILSNTSAE

SEQ ID NO: 59947 - protein, 486 aa, Homo sapiens; identical to SEQ ID NO: 59945

SEQ ID NO: 59948 - protein, 446 aa, Homo sapiens
MKCFSRYLPYIFRPPNTILSSSCHTEADIISTVEFNHTGELLATGDKGGRVVIFQREQESKNQVHRRGEYNVYSTFQSHEPEFDYLKSLEIEEKINKIRWLPQQNAAYFLLSTNDKTVKLWKVSERDKRPEGYNLKDEEGRLRDPATITTLRVPVLRPMDLMVEATPRRVFANAHTYHINSISVNSDYETYMSADDLRINLWNFEITNQSFNIVDIKPANMEELTEVITAAEFHPHHCNTFVYSSSKGTIRLCDMRASALCDRHTKFFEEPEDPSNRSFFSEIISSISDVKFSHSGRYIMTRDYLTVKVWDLNMENRPIETYQVHDYLRSKLCSLYENDCIFDKFECVWNGSDSVIMTGSYNNFFRMFDRNTKRDVTLEASRENSKPRAILKPRKVCVGGKRRKDEISVDSLDFSKKILHTAWHPSENIIAVAATNNLYIFQDKVN

SEQ ID NO: 59949 - protein, 443 aa, Homo sapiens
MEEDIDTRKINNSFLRDHSYATEADIISTVEFNHTGELLATGDKGGRVVIFQREQESKNQVHRRGEYNVYSTFQSHEPEFDYLKSLEIEEKINKIRWLPQQNAAYFLLSTNDKTVKLWKVSERDKRPEGYNLKDEEGRLRDPATITTLRVPVLRPMDLMVEATPRRVFANAHTYHINSISVNSDYETYMSADDLRINLWNFEITNQSFNIVDIKPANMEELTEVITAAEFHPHHCNTFVYSSSKGTIRLCDMRASALCDRHTKFFEEPEDPSNRSFFSEIISSISDVKFSHSGRYIMTRDYLTVKVWDLNMENRPIETYQVHDYLRSKLCSLYENDCIFDKFECVWNGSDSVIMTGSYNNFFRMFDRNTKRDVTLEASRENSKPRAILKPRKVCVGGKRRKDEISVDSLDFSKKILHTAWHPSENIIAVAATNNLYIFQDKVN

SEQ ID NO: 59950 - protein, 501 aa, Homo sapiens
MVLQPSERHYRDWNHRRLGPWCSPTGSPAPLSCETGCGEGSWILVCRLLVPTQVSLLSMEEDIDTRKINNSFLRDHSYATEADIISTVEFNHTGELLATGDKGGRVVIFQREQESKNQVHRRGEYNVYSTFQSHEPEFDYLKSLEIEEKINKIRWLPQQNAAYFLLSTNDKTVKLWKVSERDKRPEGYNLKDEEGRLRDPATITTLRVPVLRPMDLMVEATPRRVFANAHTYHINSISVNSDYETYMSADDLRINLWNFEITNQSFNIVDIKPANMEELTEVITAAEFHPHHCNTFVYSSSKGTIRLCDMRASALCDRHTKFFEEPEDPSNRSFFSEIISSISDVKFSHSGRYIMTRDYLTVKVWDLNMENRPIETYQVHDYLRSKLCSLYENDCIFDKFECVWNGSDSVIMTGSYNNFFRMFDRNTKRDVTLEASRENSKPRAILKPRKVCVGGKRRKDEISVDSLDFSKKILHTAWHPSENIIAVAATNNLYIFQDKVN

SEQ ID NO: 59951 - protein, 432 aa, Homo sapiens
MNYPDENTYGNKADIISTVEFNHTGELLATGDKGGRVVIFQREQESKNQVHRRGEYNVYSTFQSHEPEFDYLKSLEIEEKINKIRWLPQQNAAYFLLSTNDKTVKLWKVSERDKRPEGYNLKDEEGRLRDPATITTLRVPVLRPMDLMVEATPRRVFANAHTYHINSISVNSDYETYMSADDLRINLWNFEITNQSFNIVDIKPANMEELTEVITAAEFHPHHCNTFVYSSSKGTIRLCDMRASALCDRHTKFFEEPEDPSNRSFFSEIISSISDVKFSHSGRYIMTRDYLTVKVWDLNMENRPIETYQVHDYLRSKLCSLYENDCIFDKFECVWNGSDSVIMTGSYNNFFRMFDRNTKRDVTLEASRENSKPRAILKPRKVCVGGKRRKDEISVDSLDFSKKILHTAWHPSENIIAVAATNNLYIFQDKVN

SEQ ID NO: 59952 - protein, 443 aa, Homo sapiens; identical to SEQ ID NO: 59949

SEQ ID NO: 59953 - protein, 443 aa, Homo sapiens; identical to SEQ ID NO: 59949

SEQ ID NO: 59954 - protein, 509 aa, Homo sapiens
MLLSLPALHLQTSEHHPFFQLPHRRLGPWCSPTGSPAPLSCETGCGEGSWILVCRLLVPTQVSLLSMEEDIDTRKINNSFLRDHSYATEADIISTVEFNHTGELLATGDKGGRVVIFQREQESKNQVHRRGEYNVYSTFQSHEPEFDYLKSLEIEEKINKIRWLPQQNAAYFLLSTNDKTVKLWKVSERDKRPEGYNLKDEEGRLRDPATITTLRVPVLRPMDLMVEATPRRVFANAHTYHINSISVNSDYETYMSADDLRINLWNFEITNQSFNIVDIKPANMEELTEVITAAEFHPHHCNTFVYSSSKGTIRLCDMRASALCDRHTKFFEEPEDPSNRSFFSEIISSISDVKFSHSGRYIMTRDYLTVKVWDLNMENRPIETYQVHDYLRSKLCSLYENDCIFDKFECVWNGSDSVIMTGSYNNFFRMFDRNTKRDVTLEASRENSKPRAILKPRKVCVGGKRRKDEISVDSLDFSKKILHTAWHPSENIIAVAATNNLYIFQDKVN

SEQ ID NO: 59955 - protein, 443 aa, Homo sapiens; identical to SEQ ID NO: 59949

SEQ ID NO: 59956 - protein, 449 aa, Homo sapiens
MIPGIGTLTQDTLWCFSQVKGTIEIGTTEADIISTVEFNHTGELLATGDKGGRVVIFQREQESKNQVHRRGEYNVYSTFQSHEPEFDYLKSLEIEEKINKIRWLPQQNAAYFLLSTNDKTVKLWKVSERDKRPEGYNLKDEEGRLRDPATITTLRVPVLRPMDLMVEATPRRVFANAHTYHINSISVNSDYETYMSADDLRINLWNFEITNQSFNIVDIKPANMEELTEVITAAEFHPHHCNTFVYSSSKGTIRLCDMRASALCDRHTKFFEEPEDPSNRSFFSEIISSISDVKFSHSGRYIMTRDYLTVKVWDLNMENRPIETYQVHDYLRSKLCSLYENDCIFDKFECVWNGSDSVIMTGSYNNFFRMFDRNTKRDVTLEASRENSKPRAILKPRKVCVGGKRRKDEISVDSLDFSKKILHTAWHPSENIIAVAATNNLYIFQDKVN

SEQ ID NO: 59957 - protein, 432 aa, Homo sapiens; identical to SEQ ID NO: 59951

SEQ ID NO: 59958 - protein, 497 aa, Homo sapiens
METKLPPASTPTSPSSPGLSPVPPPDKVDGFSRRSLRRARPRRSHSSSQFRYQSNQQELTPLPLLKDVPASELHELLSRKLAQCGVMFDFLDCVADLKGKEVKRAALNELVECVGSTRGVLIEPVYPDIIRMISVNIFRTLPPSENPEFDPEEDEPNLEPSWPHLQLVYEFFLRFLESPDFQPSVAKRYVDQKFVLMLLELFDSEDPREREYLKTILHRVYGKFLGLRAYIRKQCNHIFLRFIYEFEHFNGVAELLEILGSIINGFALPLKTEHKQFLVRVLIPLHSVKSLSVFHAQLAYCVVQFLEKDATLTEHVIRGLLKYWPKTCTQKEVMFLGEMEEILDVIEPSQFVKIQEPLFKQVARCVSSPHFQVAERALYFWNNEYILSLIEDNCHTVLPAVFGTLYQVSKEHWNQTIVSLIYNVLKTFMEMNGKLFDELTASYKLEKQQEQQKAQERQELWQGLEELRLRRLQGTQGAKEAPLQRLTPQVAASGGQS

SEQ ID NO: 59959 - protein, 368 aa, Homo sapiens
SVQSHPAPPRPRENPRGSESLPCRLTAMETKLPPASTPTSPSSPGLSPVPPPDKVDGFSRRSLRRARPRRSHSSSQFRYQSNQQELTPLPLLKDVPASELHELLSRKLAQCGVMFDFLDCVADLKGKEVKRAALNELVECVGSTRGVLIEPVYPDIIRMISVNIFRTLPPSENPEFDPEEDEPNLEPSWPHLQLVYEFFLRFLESPDFQPSVAKRYVDQKFVLMLLELFDSEDPREREYLKTILHRVYGKFLGLRAYIRKQCNHIFLRFIYEFEHFNGVAELLEILGSIINGFALPLKTEHKPGSRPDPPALCQVAVCLPCPAGILCGAVPGEGCHSDRARDPGAAQILAKNLHPEGGDVSGGDGRDS

SEQ ID NO: 59960 - protein, 193 aa, Homo sapiens
METKLPPASTPTSPSSPGLSPVPPPDKVDGFSRRSLRRARPRRSHSSSQFRYQSNQQELTPLPLLKDVPASELHELLSRKLAQCGVMFDFLDCVADLKGKEVKRAALNELVECVGSTRGVLIEPVYPDIIRMISVNIFRTLPPSENPEFDPEEDEPNLEPSWPHLQLVYEFFLRFLESPDFQPSVAKRYVDQK

SEQ ID NO: 59961 - protein, 497 aa, Homo sapiens; identical to SEQ ID NO: 59958

SEQ ID NO: 59962 - protein, 135 aa, Homo sapiens
MEELTEVITAAEFHPHQCNVFVYSSSKGTIRLCDMRSSALCDRHSKFFEEPEDPSSRSFFSEIISSISDVKFSHSGRYMMTRDPVGEGVGPQHRAGRWRPTRSTSTCAASSALSMRTTASLTSLSVAGTVRIAPS

SEQ ID NO: 59963 - protein, 422 aa, Homo sapiens
LTADIISTVEFNYSGDLLATGDKGGRVVIFQREQENKSRPHSRGEYNVYSTFQSHEPEFDYLKSLEIEEKINKIRWLPQQNAAHFLLSTNDKTIKLWKISERDKRAEGYNLKDEDGRLRDPFRITALRVPILKPMDLMVEASPRRIFANAHTYHINSISVNSDHETYLSADDLRINLWHLEITDRSFNIVDIKPANMEELTEVITAAEFHPHQCNVFVYSSSKGTIRLCDMRSSALCDRHSKFFEEPEDPSSRSFFSEIISSISDVKFSHSGRYMMTRDYLSVKVWDLNMESRPVETHQVHEYLRSKLCSLYENDCIFDKFECCWNGSDSAIMTGSYNNFFRMFDRDTRRDVTLEASRESSKPRASLKPRKVCTGGKRRKDEISVDSLDFNKKILHTAWHPVDNVIAVAATNNLYIFQDKIN

SEQ ID NO: 59964 - protein, 570 aa, Homo sapiens
MPYKLKKEKEPPKVAKCTAKPSSSGKDGGGENTEEAQPQPQPQPQPQAQSQPPSSNKRPSNSTPPPTQLSKIKYSGGPQIVKKELFIQKLRQCCVLFDFVSDPLSDLKFKEVKRAGLNEMVEYITHSRDVVTEAIYPEAVTMFSVNLFRTLPPSSNPTGAEFDPEEDEPTLEAAWPHLQLVYEFFLRFLESPDFQPNIAKKYIDQKFVLALLDLFDSEDPRERDFLKTILHRIYGKFLGLRAYIRRQINHIFYRFIYETEHHNGIAELLEILGSIINGFALPLKEEHKMFLIRVLLPLHKVKSLSVYHPQLAYCVVQFLEKESSLTEPVIVGLLKFWPKTHSPKEVMFLNELEEILDVIEPSEFSKVMEPLFRQLAKCVSSPHFQVAERALYYWNNEYIMSLISDNAARVLPIMFPALYRNSKSHWNKTIHGLIYNALKLFMEMNQKLFDDCTQQYKAEKQKGRFRMKEREEMWQKIEELARLNPQYPMFRAPPPLPPVYSMETETPTAEDIQLLKRTVETEAVQMLKDIKKEKVLLRRKSELPQDVYTIKALEAHKRAEEFLTASQEAL

SEQ ID NO: 59965 - protein, 496 aa, Homo sapiens
MPYKLKKEKELFIQKLRQCCVLFDFVSDPLSDLKFKEVKRAGLNEMVEYITHSRDVVTEAIYPEAVTMFSVNLFRTLPPSSNPTGAEFDPEEDEPTLEAAWPHLQLVYEFFLRFLESPDFQPNIAKKYIDQKFVLALLDLFDSEDPRERDFLKTILHRIYGKFLGLRAYIRRQINHIFYRFIYETEHHNGIAELLEILGSIINGFALPLKEEHKMFLIRVLLPLHKVKSLSVYHPQLAYCVVQFLEKESSLTEPVIVGLLKFWPKTHSPKEVMFLNELEEILDVIEPSEFSKVMEPLFRQLAKCVSSPHFQVAERALYYWNNEYIMSLISDNAARVLPIMFPALYRNSKSHWNKTIHGLIYNALKLFMEMNQKLFDDCTQQYKAEKQKGRFRMKEREEMWQKIEELARLNPQYPMFRAPPPLPPVYSMETETPTAEDIQLLKRTVETEAVQMLKDIKKEKVLLRRKSELPQDVYTIKALEAHKRAEEFLTASQEAL

SEQ ID NO: 59966 - protein, 504 aa, Homo sapiens
  VARIANT 1: note = MOD_RES - Any amino acid
XKKERRQSSSRFNLSKNRELQKLPALKDSPTQEREELFIQKLRQCCVLFDFVSDPLSDLKFKEVKRAGLNEMVEYITHSRDVVTEAIYPEAVTMFSVNLFRTLPPSSNPTGAEFDPEEDEPTLEAAWPHLQLVYEFFLRFLESPDFQPNIAKKYIDQKFVLALLDLFDSEDPRERDFLKTILHRIYGKFLGLRAYIRRQINHIFYRFIYETEHHNGIAELLEILGSIINGFALPLKEEHKMFLIRVLLPLHKVKSLSVYHPQVIVGLLKFWPKTHSPKEVMFLNELEEILDVIEPSEFSKVMEPLFRQLAKCVSSPHFQVAERALYYWNNEYIMSLISDNAARVLPIMFPALYRNSKSHWNKTIHGLIYNALKLFMEMNQKLFDDCTQQYKAEKQKGRFRMKEREEMWQKIEELARLNPQYPMFRAPPPLPPVYSMETETPTAEDIQLLKRTVETEAVQMLKDIKKEKVLLRRKSELPQDVYTIKALEAHKRAEEFLTASQEAL

SEQ ID NO: 59967 - protein, 602 aa, Homo sapiens
MPYKLKKEKEPPKVAKCTAKPSSSGKDGGGENTEEAQPQPQPQPQPQAQSQPPSSNKRPSNSTPPPTQLSKIKYSGGPQIVKKERRQSSSRFNLSKNRELQKLPALKDSPTQEREELFIQKLRQCCVLFDFVSDPLSDLKFKEVKRAGLNEMVEYITHSRDVVTEAIYPEAVTMFSVNLFRTLPPSSNPTGAEFDPEEDEPTLEAAWPHLQLVYEFFLRFLESPDFQPNIAKKYIDQKFVLALLDLFDSEDPRERDFLKTILHRIYGKFLGLRAYIRRQINHIFYRFIYETEHHNGIAELLEILGSIINGFALPLKEEHKMFLIRVLLPLHKVKSLSVYHPQLAYCVVQFLEKESSLTEPVIVGLLKFWPKTHSPKEVMFLNELEEILDVIEPSEFSKVMEPLFRQLAKCVSSPHFQVAERALYYWNNEYIMSLISDNAARVLPIMFPALYRNSKSHWNKTIHGLIYNALKLFMEMNQKLFDDCTQQYKAEKQKGRFRMKEREEMWQKIEELARLNPQYPMFRAPPPLPPVYSMETETPTAEDIQLLKRTVETEAVQMLKDIKKEKVLLRRKSELPQDVYTIKALEAHKRAEEFLTASQEAL

SEQ ID NO: 59968 - protein, 584 aa, Homo sapiens
MPYKLKKEKEPPKVAKCTAKPSSSGKDGGGENTEEAQPQPQPQPQPQAQSQPPSSNKRPSNSTPPPTQLSKIKYSGGPQIVKKERRQSSSRFNLSKNRELQKLPALKDSPTQEREELFIQKLRQCCVLFDFVSDPLSDLKFKEVKRAGLNEMVEYITHSRDVVTEAIYPEAVTMFSVNLFRTLPPSSNPTGAEFDPEEDEPTLEAAWPHLQLVYEFFLRFLESPDFQPNIAKKYIDQKFVLALLDLFDSEDPRERDFLKTILHRIYGKFLGLRAYIRRQINHIFYRFIYETEHHNGIAELLEILGSIINGFALPLKEEHKMFLIRVLLPLHKVKSLSVYHPQVIVGLLKFWPKTHSPKEVMFLNELEEILDVIEPSEFSKVMEPLFRQLAKCVSSPHFQVAERALYYWNNEYIMSLISDNAARVLPIMFPALYRNSKSHWNKTIHGLIYNALKLFMEMNQKLFDDCTQQYKAEKQKGRFRMKEREEMWQKIEELARLNPQYPMFRAPPPLPPVYSMETETPTAEDIQLLKRTVETEAVQMLKDIKKEKVLLRRKSELPQDVYTIKALEAHKRAEEFLTASQEAL

SEQ ID NO: 59969 - protein, 467 aa, Homo sapiens
MSSAPTTPPSVDKVDGFSRKSVRKARQKRSQSSSQFRSQGKPIELTPLPLLKDVPSSEQPELFLKKLQQCCVIFDFMDTLSDLKMKEYKRSTLNELVDYITISRGCLTEQTYPEVVRMVSCNIFRTLPPSDSNEFDPEEDEPTLEASWPHLQLVYEFFIRFLESQEFQPSIAKKYIDQKFVLQLLELFDSEDPRERDYLKTVLHRIYGKFLGLRAFIRKQINNIFLRFVYETEHFNGVAELLEILGSIINGFALPLKAEHKQFLVKVLIPLHTVRSLSLFHAQLAYCIVQFLEKDPSLTEPVIRGLMKFWPKTCSQKEVMFLGELEEILDVIEPSQFVKIQEPLFKQIAKCVSSPHFQVAERALYYWNNEYIMSLIEENSNVILPIMFSSLYRISKEHWNPAIVALVYNVLKAFMEMNSTMFDELTATYKSDRQREKKKEKEREELWKKLEDLELKRGLRRDGIIPT

SEQ ID NO: 59970 - protein, 391 aa, Homo sapiens
MDTLSDLKMKEYKRSTLNELVDYITISRGCLTEQTYPEVVRMVSCNIFRTLPPSDSNEFDPEEDEPTLEASWPHLQLVYEFFIRFLESQEFQPSIAKKYIDQKFVLQLLELFDSEDPRERDYLKTVLHRIYGKFLGLRAFIRKQINNIFLRFVYETEHFNGVAELLEILGSIINGFALPLKAEHKQFLVKVLIPLHTVRSLSLFHAQLAYCIVQFLEKDPSLTEPVIRGLMKFWPKTCSQKEVMFLGELEEILDVIEPSQFVKIQEPLFKQIAKCVSSPHFQVAERALYYWNNEYIMSLIEENSNVILPIMFSSLYRISKEHWNPAIVALVYNVLKAFMEMNSTMFDELTATYKSDRQREKKKEKEREELWKKLEDLELKRGLRRDGIIPT

SEQ ID NO: 59971 - protein, 462 aa, Homo sapiens
MSSAPTTPPSVDKVDGFSRKSVRKARQKRSQSSSQFRSQGKPIELTPLPLLKDVPSSEQPELFLKKLQQCCVIFDFMDTLSDLKMKEYKRSTLNELVDYITISRGCLTEQTYPEVVRMVSCNIFRTLPPSDSNEFDPEEDEPTLEASWPHLQLVYEFFIRFLESQEFQPSIAKKYIDQKFVLQLLELFDSEDPRERDYLKTVLHRIYGKFLGLRAFIRKQINNIFLRFVYETEHFNGVAELLEILGSIINGFALPLKAEHKQFLVKVLIPLHTVRSLSLFHAQLAYCIVQFLEKDPSLTEPVIRGLMKFWPKTCSQKEVMFLGELEEILDVIEPSQFVKIQEPLFKQIAKCVSSPHFQVAERALYYWNNEYIMSLIEENSNVILPIMFSSLYRISKEHWNPAIVALVYNVLKAFMEMNSTMFDELTATYNEKKKEKEREELWKKLEDLELKRGLRRDGIIPT

SEQ ID NO: 59972 - protein, 447 aa, Homo sapiens
MGLSFFSKHLPIQEGQPWALKTPADIISTVEFNHTGELLATGDKGGRVVIFQREPESKNAPHSQGEYDVYSTFQSHEPEFDYLKSLEIEEKINKIKWLPQQNAAHSLLSTNDKTIKLWKITERDKRPEGYNLKDEEGKLKDLSTVTSLQVPVLKPMDLMVEVSPRRIFANGHTYHINSISVNSDCETYMSADDLRINLWHLAITDRSFNIVDIKPANMEDLTEVITASEFHPHHCNLFVYSSSKGSLRLCDMRAAALCDKHSKLFEEPEDPSNRSFFSEIISSVSDVKFSHSGRYMLTRDYLTVKVWDLNMEARPIETYQVHDYLRSKLCSLYENDCIFDKFECAWNGSDSVIMTGAYNNFFRMFDRNTKRDVTLEASRESSKPRAVLKPRRVCVGGKRRRDDISVDSLDFTKKILHTAWHPAENIIAIAATNNLYIFQDKVNSDMH

SEQ ID NO: 59973 - protein, 447 aa, Homo sapiens
MGEDTDTRKINHSFLRDHSYVTEADIISTVEFNHTGELLATGDKGGRVVIFQREPESKNAPHSQGEYDVYSTFQSHEPEFDYLKSLEIEEKINKIKWLPQQNAAHSLLSTNDKTIKLWKITERDKRPEGYNLKDEEGKLKDLSTVTSLQVPVLKPMDLMVEVSPRRIFANGHTYHINSISVNSDCETYMSADDLRINLWHLAITDRSFNIVDIKPANMEDLTEVITASEFHPHHCNLFVYSSSKGSLRLCDMRAAALCDKHSKLFEEPEDPSNRSFFSEIISSVSDVKFSHSGRYMLTRDYLTVKVWDLNMEARPIETYQVHDYLRSKLCSLYENDCIFDKFECAWNGSDSVIMTGAYNNFFRMFDRNTKRDVTLEASRESSKPRAVLKPRRVCVGGKRRRDDISVDSLDFTKKILHTAWHPAENIIAIAATNNLYIFQDKVNSDMH

SEQ ID NO: 59974 - protein, 440 aa, Homo sapiens
MREADTLRPPQLMEVSADIISTVEFNHTGELLATGDKGGRVVIFQREPESKNAPHSQGEYDVYSTFQSHEPEFDYLKSLEIEEKINKIKWLPQQNAAHSLLSTNDKTIKLWKITERDKRPEGYNLKDEEGKLKDLSTVTSLQVPVLKPMDLMVEVSPRRIFANGHTYHINSISVNSDCETYMSADDLRINLWHLAITDRSFNIVDIKPANMEDLTEVITASEFHPHHCNLFVYSSSKGSLRLCDMRAAALCDKHSKLFEEPEDPSNRSFFSEIISSVSDVKFSHSGRYMLTRDYLTVKVWDLNMEARPIETYQVHDYLRSKLCSLYENDCIFDKFECAWNGSDSVIMTGAYNNFFRMFDRNTKRDVTLEASRESSKPRAVLKPRRVCVGGKRRRDDISVDSLDFTKKILHTAWHPAENIIAIAATNNLYIFQDKVNSDMH

SEQ ID NO: 59975 - protein, 440 aa, Homo sapiens; identical to SEQ ID NO: 59974

SEQ ID NO: 59976 - protein, 430 aa, Homo sapiens
MGKRDTADIISTVEFNHTGELLATGDKGGRVVIFQREPESKNAPHSQGEYDVYSTFQSHEPEFDYLKSLEIEEKINKIKWLPQQNAAHSLLSTNDKTIKLWKITERDKRPEGYNLKDEEGKLKDLSTVTSLQVPVLKPMDLMVEVSPRRIFANGHTYHINSISVNSDCETYMSADDLRINLWHLAITDRSFNIVDIKPANMEDLTEVITASEFHPHHCNLFVYSSSKGSLRLCDMRAAALCDKHSKLFEEPEDPSNRSFFSEIISSVSDVKFSHSGRYMLTRDYLTVKVWDLNMEARPIETYQVHDYLRSKLCSLYENDCIFDKFECAWNGSDSVIMTGAYNNFFRMFDRNTKRDVTLEASRESSKPRAVLKPRRVCVGGKRRRDDISVDSLDFTKKILHTAWHPAENIIAIAATNNLYIFQDKVNSDMH

SEQ ID NO: 59977 - protein, 540 aa, Homo sapiens
MPNKNKKEKESPKAGKSGKSSKEGQDTVESEQISVRKNSLVAVPSTVSAKIKVPVSQPIVKKDKRQNSSRFSASNNRELQKLPSLKDVPPADQEKLFIQKLRQCCVLFDFVSDPLSDLKWKEVKRAALSEMVEYITHNRNVITEPIYPEVVHMFAVNMFRTLPPSSNPTGAEFDPEEDEPTLEAAWPHLQLVYEFFLRFLESPDFQPNIAKKYIDQKFVLQLLELFDSEDPRERDFLKTTLHRIYGKFLGLRAYIRKQINNIFYRFIYETEHHNGIAELLEILGSIINGFALPLKEEHKIFLLKVLLPLHKVKSLSVYHPQLAYCVVQFLEKDSTLTEPVVMALLKYWPKTHSPKEVMFLNELEEILDVIEPSEFVKIMEPLFRQLAKCVSSPHFQVAERALYYWNNEYIMSLISDNAAKILPIMFPSLYRNSKTHWNKTIHGLIYNALKLFMEMNQKLFDDCTQQFKAEKLKEKLKMKEREEAWVKIENLAKANPQAQKDPKKDRPLARRKSELPQDPHTKKALEAHCRADELASQDGR

SEQ ID NO: 59978 - protein, 524 aa, Homo sapiens
MLTCNKAGSRMVVDAANSNGPFQPVVLLHIRDVPPADQEKLFIQKLRQCCVLFDFVSDPLSDLKWKEVKRAALSEMVEYITHNRNVITEPIYPEVVHMFAVNMFRTLPPSSNPTGAEFDPEEDEPTLEAAWPHLQLVYEFFLRFLESPDFQPNIAKKYIDQKFVLQLLELFDSEDPRERDFLKTTLHRIYGKFLGLRAYIRKQINNIFYRFIYETEHHNGIAELLEILGSIINGFALPLKEEHKIFLLKVLLPLHKVKSLSVYHPQLAYCVVQFLEKDSTLTEPVVMALLKYWPKTHSPKEVMFLNELEEILDVIEPSEFVKIMEPLFRQLAKCVSSPHFQVAERALYYWNNEYIMSLISDNAAKILPIMFPSLYRNSKTHWNKTIHGLIYNALKLFMEMNQKLFDDCTQQFKAEKLKEKLKMKEREEAWVKIENLAKANPQYTVYSQASTMSIPVAMETDGPLFEDVQMLRKTVKDEAHQAQKDPKKDRPLARRKSELPQDPHTKKALEAHCRADELASQDGR

SEQ ID NO: 59979 - protein, 260 aa, Homo sapiens
MFRTLPPSSNPTGAEFDPEEDEPTLEAAWPHLQLVYEFFLRFLESPDFQPNIAKKYIDQKFVLQLLELFDSEDPRERDFLKTTLHRIYGKFLGLRAYIRKQINNIFYRFIYETEHHNGIAELLEILGSIINGFALPLKEEHKIFLLKVLLPLHKVKSLSVYHPQLAYCVVQFLEKDSTLTEPVVMALLKYWPKTHSPKEVMFLNELEEILDVIEPSEFVKIMEPLFRQLAKCVSSPHFQDNTWLDIQRPEALHGDEPKAI

SEQ ID NO: 59980 - protein, 485 aa, Homo sapiens
MLTCNKAGSRMVVDAANSNGPFQPVVLLHIRDVPPADQEKLFIQKLRQCCVLFDFVSDPLSDLKWKEVKRAALSEMVEYITHNRNVITEPIYPEVVHMFAVNMFRTLPPSSNPTGAEFDPEEDEPTLEAAWPHLQLVYEFFLRFLESPDFQPNIAKKYIDQKFVLQLLELFDSEDPRERDFLKTTLHRIYGKFLGLRAYIRKQINNIFYRFIYETEHHNGIAELLEILGSIINGFALPLKEEHKIFLLKVLLPLHKVKSLSVYHPQLAYCVVQFLEKDSTLTEPVVMALLKYWPKTHSPKEVMFLNELEEILDVIEPSEFVKIMEPLFRQLAKCVSSPHFQVAERALYYWNNEYIMSLISDNAAKILPIMFPSLYRNSKTHWNKTIHGLIYNALKLFMEMNQKLFDDCTQQFKAEKLKEKLKMKEREEAWVKIENLAKANPQAQKDPKKDRPLARRKSELPQDPHTKKALEAHCRADELASQDGR

SEQ ID NO: 59981 - protein, 555 aa, Homo sapiens
MPNKNKKEKESPKAGKSGKSSKEGQDTVESEGTSPEEPSSPKVPPPLLPELLVLIFGGLQGRDVPPADQEKLFIQKLRQCCVLFDFVSDPLSDLKWKEVKRAALSEMVEYITHNRNVITEPIYPEVVHMFAVNMFRTLPPSSNPTGAEFDPEEDEPTLEAAWPHLQLVYEFFLRFLESPDFQPNIAKKYIDQKFVLQLLELFDSEDPRERDFLKTTLHRIYGKFLGLRAYIRKQINNIFYRFIYETEHHNGIAELLEILGSIINGFALPLKEEHKIFLLKVLLPLHKVKSLSVYHPQLAYCVVQFLEKDSTLTEPVVMALLKYWPKTHSPKEVMFLNELEEILDVIEPSEFVKIMEPLFRQLAKCVSSPHFQVAERALYYWNNEYIMSLISDNAAKILPIMFPSLYRNSKTHWNKTIHGLIYNALKLFMEMNQKLFDDCTQQFKAEKLKEKLKMKEREEAWVKIENLAKANPQYTVYSQASTMSIPVAMETDGPLFEDVQMLRKTVKDEAHQAQKDPKKDRPLARRKSELPQDPHTKKALEAHCRADELASQDGR

SEQ ID NO: 59982 - protein, 449 aa, Homo sapiens
MLTCNKAGSRMVVDAANSNGPFQPVVLLHIRDVPPADQEKLFIQKLRQCCVLFDFVSDPLSDLKWKEVKRAALSEMVEYITHNRNVITEPIYPEVVHMFAVNMFRTLPPSSNPTGAEFDPEEDEPTLEAAWPHLQLVYEFFLRFLESPDFQPNIAKKYIDQKFVLQLLELFDSEDPRERDFLKTTLHRIYGKFLGLRAYIRKQINNIFYRFIYETEHHNGIAELLEILGSIINGFALPLKEEHKIFLLKVLLPLHKVKSLSVYHPQLAYCVVQFLEKDSTLTEPVVMALLKYWPKTHSPKEVMFLNELEEILDVIEPSEFVKIMEPLFRQLAKCVSSPHFQVAERALYYWNNEYIMSLISDNAAKILPIMFPSLYRNSKTHWNKTIHGLIYNALKLFMEMNQKLFDDCTQQFKAEKLKEKLKMKEREEAWVKIENLAKANPQVLKKRIT

SEQ ID NO: 59983 - protein, 384 aa, Homo sapiens
MLTCNKAGSRMVVDAANSNGPFQPVVLLHIRDVPPADQEKLFIQKLRQCCVLFDFVSDPLSDLKWKEVKRAALSEMVEYITHNRNVITEPIYPEVVHMFAVNMFRTLPPSSNPTGAEFDPEEDEPTLEAAWPHLQLVYEFFLRFLESPDFQPNIAKKYIDQKFVLQLLELFDSEDPRERDFLKTTLHRIYGKFLGLRAYIRKQINNIFYRFIYETEHHNGIAELLEILGSIINGFALPLKEEHKIFLLKVLLPLHKVKSLSVYHPQLAYCVVQFLEKDSTLTEPVVMALLKYWPKTHSPKEVMFLNELEEILDVIEPSEFVKIMEPLFRQLAKCVSSPHFQVAERALYYWNNEYIMSLISDNAAKILPIMFPSLYRNSKTHWNK

SEQ ID NO: 59984 - protein, 553 aa, Homo sapiens
NKNKKEKESPKAGKSGKSSKEGQDTVESEGTSPEEPSSPKVPPPLLPELLVLIFGGLQGRDVPPADQEKLFIQKLRQCCVLFDFVSDPLSDLKWKEVKRAALSEMVEYITHNRNVITEPIYPEVVHMFAVNMFRTLPPSSNPTGAEFDPEEDEPTLEAAWPHLQLVYEFFLRFLESPDFQPNIAKKYIDQKFVLQLLELFDSEDPRERDFLKTTLHRIYGKFLGLRAYIRKQINNIFYRFIYETEHHNGIAELLEILGSIINGFALPLKEEHKIFLLKVLLPLHKVKSLSVYHPQLAYCVVQFLEKDSTLTEPVVMALLKYWPKTHSPKEVMFLNELEEILDVIEPSEFVKIMEPLFRQLAKCVSSPHFQVAERALYYWNNEYIMSLISDNAAKILPIMFPSLYRNSKTHWNKTIHGLIYNALKLFMEMNQKLFDDCTQQFKAEKLKEKLKMKEREEAWVKIENLAKANPQYTVYSQASTMSIPVAMETDGPLFEDVQMLRKTVKDEAHQAQKDPKKDRPLARRKSELPQDPHTKKALEAHCRADELASQDGR

SEQ ID NO: 59985 - protein, 358 aa, Homo sapiens
MAEGERQPPPDSSEEAPPATQNFIIPKKEIHTVPDMGKWKRSQAYADYIGFILTLNEGVKGKKLTFEYRVSEMWNEVHEEKEQAAKQSVSCDECIPLPRAGHCAPSEAIEKLVALLNTLDRWIDETPPVDQPSRFGNKAYRTWYAKLDEEAENLVATVVPTHLAAAVPEVAVYLKESVGNSTRIDYGTGHEAAFAAFLCCLCKIGVLRVDDQIAIVFKVFNRYLEVMRKLQKTYRMEPAGSQGVWGLDDFQFLPFIWGSSQLIDHPYLEPRHFVDEKAVNENHKDYMFLECILFITEMKTGPFAEHSNQLWNISAVPSWSKVNQGLIRMYKAECLEKFPVIQHFKFGSLLPIHPVTSG

SEQ ID NO: 59986 - protein, 329 aa, Homo sapiens
MAEGERQPPPDSSEEAPPATQNFIIPKKEIHTVPDMGKWKRSQVPFGTVAYADYIGFILTLNEGVKGKKLTFEYRVSEAIEKLVALLNTLDRWIDETPPVDQPSRFGNKAYRTWYAKLDEEAENLVATVVPTHLAAAVPEVAVYLKESVGNSTRIDYGTGHEAAFAAFLCCLCKIGVLRVDDQIAIVFKVFNRYLEVMRKLQKTYRMEPAGSQGVWGLDDFQFLPFIWGSSQLIDHPYLEPRHFVDEKAVNENHKDYMFLECILFITEMKTGPFAEHSNQLWNISAVPSWSKVNQGLIRMYKAECLEKFPVIQHFKFGSLLPIHPVTSG

SEQ ID NO: 59987 - protein, 281 aa, Homo sapiens
MAEGERQPPPDSSEEAPPATQNFIIPKKEIHTVPDMGKWKRSQAYADYIGFILTLNEGVKGKKLTFEYRVSEEAENLVATVVPTHLAAAVPEVAVYLKESVGNSTRIDYGTGHEAAFAAFLCCLCKIGVLRVDDQIAIVFKVFNRYLEVMRKLQKTYRMEPAGSQGVWGLDDFQFLPFIWGSSQLIDHPYLEPRHFVDEKAVNENHKDYMFLECILFITEMKTGPFAEHSNQLWNISAVPSWSKVNQGLIRMYKAECLEKFPVIQHFKFGSLLPIHPVTSG

SEQ ID NO: 59988 - protein, 294 aa, Homo sapiens
MAEGERQPPPDSSEEAPPATQNFIIPKKEIHTVPDMGKWKRSQAIEKLVALLNTLDRWIDETPPVDQPSRFGNKAYRTWYAKLDEEAENLVATVVPTHLAAAVPEVAVYLKESVGNSTRIDYGTGHEAAFAAFLCCLCKIGVLRVDDQIAIVFKVFNRYLEVMRKLQKTYRMEPAGSQGVWGLDDFQFLPFIWGSSQLIDHPYLEPRHFVDEKAVNENHKDYMFLECILFITEMKTGPFAEHSNQLWNISAVPSWSKVNQGLIRMYKAECLEKFPVIQHFKFGSLLPIHPVTSG

SEQ ID NO: 59989 - protein, 323 aa, Homo sapiens
MAEGERQPPPDSSEEAPPATQNFIIPKKEIHTVPDMGKWKRSQAYADYIGFILTLNEGVKGKKLTFEYRVSEAIEKLVALLNTLDRWIDETPPVDQPSRFGNKAYRTWYAKLDEEAENLVATVVPTHLAAAVPEVAVYLKESVGNSTRIDYGTGHEAAFAAFLCCLCKIGVLRVDDQIAIVFKVFNRYLEVMRKLQKTYRMEPAGSQGVWGLDDFQFLPFIWGSSQLIDHPYLEPRHFVDEKAVNENHKDYMFLECILFITEMKTGPFAEHSNQLWNISAVPSWSKVNQGLIRMYKAECLEKFPVIQHFKFGSLLPIHPVTSG

SEQ ID NO: 59990 - protein, 323 aa, Homo sapiens; identical to SEQ ID NO: 59989

SEQ ID NO: 59991 - protein, 263 aa, Homo sapiens
MGKWKRSQAYADYIGFILTLNEGVKGKKLTFEYRVSEAIEKLVALLNTLDRWIDETPPVDQPSRFGNKAYRTWYAKLDEEAENLVATVVPTHLAAAVPEVAVYLKESVGNSTRIDYGTGHEAAFAAFLCCLCKIGVLRVDDQIAIVFKVFNRYLEVMRKLQKTYRMEPAGSQGVWGLDDFQFLPFIWGSSQLIDHPYLEPRHFVDEKAVNENHKDYMFLECILFITEMKTGPFAEHSNQLWNISAVPSWSKVNQGLIRMYKAE

SEQ ID NO: 59992 - protein, 374 aa, Homo sapiens
MAEGERQPPPDSSEEAPPATQNFIIPKKEIHTVPDMGKWKRSQAYADYIGFILTLNEGVKGKKLTFEYRVSEMWNEVHEEKEQAAKQSVSCDECIPLPRAGHCAPSEAIEKLVALLNTLDRWIDETPPVDQPSRFGNKAYRTWYAKLDEEAENLVATVVPTHLAAAVPEVAVYLKESVGNSTRIDYGTGHEAAFAAFLCCLCKIGVLRVDDQIAIVFKVFNRYLEVMRKLQKTYRMEPAGSQGVWGLDDFQFLPFIWGSSQLIDHPYLEPRHFVDEKAVNENHKDYMFLECILFITEMKTGPFAEHSNQLWNISAVPSWSKVNQGLIRMYKAEASPSDTWGLGISHLGHGQSEKHQPPQPRKAAVQLCPDELGG

SEQ ID NO: 59993 - protein, 151 aa, Homo sapiens
MKTGPFAEHSNQLWNISAVPSWSKVNQGLIRMYKAEVSGGWPVCPSLLPHLVLGWGQSKRCGTWGSCFLLPHCFALNLRPAPLTLGASESPIWGMGSQRSTSHPSPEKLQSSSVLMSLEAEARTCCMGSGGDGGLPSPLSSGQRLLKARAV

SEQ ID NO: 59994 - protein, 933 aa, Homo sapiens
MADLSLLQEDLQEDADGSLDFVSQDEMLTPLGRLDKYAASENIFNRQMVARSLLDTLREVCDDERDCIAVLERISRLADDSEPTVRAELMEQVPHIALFCQENRPSIPYAFSKFLLPIVVRYLADQNNQVRKTSQAALLALLEQELIERFDVETKVCPVLIELTAPDSNDDVKTEAVAIMCKMAPMVGKDITERLILPRFCEMCCDCRMFHVRKVCAANFGDICSVVGQQATEEMLLPRFFQLCSDNVWGVRKACAECFMAVSCATCQEIRRTKLSALFINLISDPSRWVRQAAFQSLGPFISTFANPSSSGQYFKEESKSSEEMSVENKNRTRDQEAPEDVQVRPEDTPSDLSVSNSSVILENTMEDHAAEASGKPLGEISVPLDSSLLCTLSSESHQEAASNENDKKPGNYKSMLRPEVGTTSQDSALLDQELYNSFHFWRTPLPEIDLDIELEQNSGGKPSPEGPEEESEGPVPSSPNITMATRKELEEMIENLEPHIDDPDVKAQVEVLSAALRASSLDAHEETISIEKRSDLQDELDINELPNCKINQEDSVPLISDAVENMDSTLHYIHSDSDLSNNSSFSPDEERRTKVQDVVPQALLDQYLSMTDPSRAQTVDTEIAKHCAYSLPGVALTLGRQNWHCLRETYETLASDMQWKVRRTLAFSIHELAVILGDQLTAADLVPIFNGFLKDLDEVRIGVLKHLHDFLKLLHIDKRREYLYQLQEFLVTDNSRNWRFRAELAEQLILLLELYSPRDVYDYLRPIALNLCADKVSSVRWISYKLVSEMVKKLHAATPPTFGVDLINELVENFGRCPKWSGRQAFVFVCQTVIEDDCLPMDQFAVHLMPHLLTLANDRVPNVRVLLAKTLRQTLLEKDYFLASASCHQEAVEQTIMALQMDRDSDVKYFASIHPASTKISEDAMSTASSTY

SEQ ID NO: 59995 - protein, 307 aa, Homo sapiens
MAEISDLDRQIEQLRRCELIKESEVKALCAKAREILVEESNVQRVDSPVTVCGDIHGQFYDLKELFRVGGDVPETNYLFMGDFVDRGFYSVETFLLLLALKVRYPDRITLIRGNHESRQITQVYGFYDECLRKYGSVTVWRYCTEIFDYLSLSAIIDGKIFCVHGGLSPSIQTLDQIRTIDRKQEVPHDGPMCDLLWSDPEDTTGWGVSPRGAGYLFGSDVVAQFNAANDIDMICRAHQLVMEGYKWHFNETVLTVWSAPNYCYRCGNVAAILELDEHLQKDFIIFEAAPQETRGIPSKKPVADYFL

SEQ ID NO: 59996 - protein, 470 aa, Homo sapiens
MLQVRTYLTEPTVRAELMEQVPHIALFCQENRPSIPYAFSKFLLPIVVRYLADQNNQVRKTSQAALLALLEQELIERFDVETKVCPVLIELTAPDSNDDVKTEAVAIMCKMAPMVGKDITERLILPRFCEMCCDCRMFHVRKVCAANFGDICSVVGQQATEEMLLPRFFQLCSDNVWGVRKACAECFMAVSCATCQEIRRTKLSALFINLISDPSRWVRQAAFQSLGPFISTFANPSSSGQYFKEESKSSEEMSVENKNRTRDQEAPEDVQVRPEDTPSDLSVSNSSVILENTMEDHAAEASGKPLGEISVPLDSSLLCTLSSESHQEAASNENDKKPGNYKSMLRPEVGTTSQDSALLDQELYNSFHFWRTPLPEIDLDIELEQNSGGKPSPEGPEEESEGPVPSSPNITMATRKELEEMIENLEPHIDDPDVKAQVEVLSAALRASSLDAHEETISIKREVICKMNWI

SEQ ID NO: 59997 - protein, 950 aa, Homo sapiens
MADLSLLQEDLQEDADGFGVDDYSSESDVIIIPSALDFVSQDEMLTPLGRLDKYAASENIFNRQMVARSLLDTLREVCDDERDCIAVLERISRLADDSEPTVRAELMEQVPHIALFCQENRPSIPYAFSKFLLPIVVRYLADQNNQVRKTSQAALLALLEQELIERFDVETKVCPVLIELTAPDSNDDVKTEAVAIMCKMAPMVGKDITERLILPRFCEMCCDCRMFHVRKVCAANFGDICSVVGQQATEEMLLPRFFQLCSDNVWGVRKACAECFMAVSCATCQEIRRTKLSALFINLISDPSRWVRQAAFQSLGPFISTFANPSSSGQYFKEESKSSEEMSVENKNRTRDQEAPEDVQVRPEDTPSDLSVSNSSVILENTMEDHAAEASGKPLGEISVPLDSSLLCTLSSESHQEAASNENDKKPGNYKSMLRPEVGTTSQDSALLDQELYNSFHFWRTPLPEIDLDIELEQNSGGKPSPEGPEEESEGPVPSSPNITMATRKELEEMIENLEPHIDDPDVKAQVEVLSAALRASSLDAHEETISIEKRSDLQDELDINELPNCKINQEDSVPLISDAVENMDSTLHYIHSDSDLSNNSSFSPDEERRTKVQDVVPQALLDQYLSMTDPSRAQTVDTEIAKHCAYSLPGVALTLGRQNWHCLRETYETLASDMQWKVRRTLAFSIHELAVILGDQLTAADLVPIFNGFLKDLDEVRIGVLKHLHDFLKLLHIDKRREYLYQLQEFLVTDNSRNWRFRAELAEQLILLLELYSPRDVYDYLRPIALNLCADKVSSVRWISYKLVSEMVKKLHAATPPTFGVDLINELVENFGRCPKWSGRQAFVFVCQTVIEDDCLPMDQFAVHLMPHLLTLANDRVPNVRVLLAKTLRQTLLEKDYFLASASCHQEAVEQTIMALQMDRDSDVKYFASIHPASTKISEDAMSTASSTY

SEQ ID NO: 59998 - protein, 361 aa, Homo sapiens
MDDFRTSAPEPRGPPNPNVEYIPFDEMKERILKIVTGFNGIPFTIQRLCELLTDPRRNYTGTDKFLRGVEKNVMVVSCVYPSSEKNNSNSLNRMNGVMFPGNSPSYTERSNINGPGTPRPLNRPKVSLSAPMTTNGLPESTDSKEANLQQNEEKNHSDSSTSESEVSSVSPLKNKHPDEDAVEAEGHEVKRLRFDKEGEVRETASQTTSSEISSVMVGETEASSSSQDKDKDSRCTRQHCTEEDEEEDEEEEEESFMTSREMIPERKNQEKESDDALTVNEETSEENNQMEESDVSQAEKDLLHSEGSENEGPVSSSSSDCRETEELVGSNSSKTGEILSESSMENDDEATEVTDEPMEQD

SEQ ID NO: 59999 - protein, 417 aa, Homo sapiens
MDVERLQEALKDFEKRGKKEVCPVLDQFLCHVAKTGETMIQWSQFKGYFIFKLEKVMDDFRTSAPEPRGPPNPNVEYIPFDEMKERILKIVTGFNGIPFTIQRLCELLTDPRRNYTGTDKFLRGVEKNVMVVSCVYPSSEKNNSNSLNRMNGVMFPGNSPSYTERSNINGPGTPRPLNRPKVSLSAPMTTNGLPESTDSKEANLQQNEEKNHSDSSTSESEVSSVSPLKNKHPDEDAVEAEGHEVKRLRFDKEGEVRETASQTTSSEISSVMVGETEASSSSQDKDKDSRCTRQHCTEEDEEEDEEEEEESFMTSREMIPERKNQEKESDDALTVNEETSEENNQMEESDVSQAEKDLLHSEGSENEGPVSSSSSDCRETEELVGSNSSKTGEILSESSMENDDEATEVTDEPMEQD

SEQ ID NO: 60000 - protein, 360 aa, Homo sapiens
MDVERLQEALKDFEKRGKKEVCPVLDQFLCHVAKTGETIIPFTIQRLCELLTDPRRNYTGTDKFLRGVEKNVMVVSCVYPSSEKNNSNSLNRMNGVMFPGNSPSYTERSNINGPGTPRPLNRPKVSLSAPMTTNGLPESTDSKEANLQQNEEKNHSDSSTSESEVSSVSPLKNKHPDEDAVEAEGHEVKRLRFDKEGEVRETASQTTSSEISSVMVGETEASSSSQDKDKDSRCTRQHCTEEDEEEDEEEEEESFMTSREMIPERKNQEKESDDALTVNEETSEENNQMEESDVSQAEKDLLHSEGSENEGPVSSSSSDCRETEELVGSNSSKTGEILSESSMENDDEATEVTDEPMEQD

SEQ ID NO: 60001 - protein, 371 aa, Homo sapiens
MALGKFRAALRDYETVVKVKPHDKDAKMKYQECNKIVKQKAFERAIAGDEHKRSVVDSLDIESMTIEDEYSGPKLEDGKVTISFMKELMQWYKDQKKLHRKCAYQTEKITVCGDTHGQFYDLLNIFELNGLPSETNPYIFNGDFVDRGSFSVEVILTLFGFKLLYPDHFHLLRGNHETDNMNQIYGFEGEVKAKYTAQMYELFSEVFEWLPLAQCINGKVLIMHGGLFSEDGVTLDDIRKIERNRQPPDSGPMCDLLWSDPQPQNGRSISKRGVSCQFGPDVTKAFLEENNLDYIIRSHEVKAEGYEVAHGGRCVTVFSAPNYCDQMGNKASYIHLQGSDLRPQFHQFTAVPHPNVKPMAYANTLLQLGMM

SEQ ID NO: 60002 - protein, 499 aa, Homo sapiens
MAMAEGERTECAEPPRDEPPADGALKRAEELKTQANDYFKAKDYENAIKFYSQAIELNPSNAIYYGNRSLAYLRTECYGYALGDATRAIELDKKYIKGYYRRAASNMALGKFRAALRDYETVVKVKPHDKDAKMKYQECNKIVKQKAFERAIAGDEHKRSVVDSLDIESMTIEDEYSGPKLEDGKVTISFMKELMQWYKDQKKLHRKCAYQILVQVKEVLSKLSTLVETTLKETEKITVCGDTHGQFYDLLNIFELNGLPSETNPYIFNGDFVDRGSFSVEVILTLFGFKLLYPDHFHLLRGNHETDNMNQIYGFEGEVKAKYTAQMYELFSEVFEWLPLAQCINGKVLIMHGGLFSEDGVTLDDIRKIERNRQPPDSGPMCDLLWSDPQPQNGRSISKRGVSCQFGPDVTKAFLEENNLDYIIRSHEVKAEGYEVAHGGRCVTVFSAPNYCDQMGNKASYIHLQGSDLRPQFHQFTAVPHPNVKPMAYANTLLQLGMM

SEQ ID NO: 60003 - protein, 486 aa, Homo sapiens
MAMAEGERTECAEPPRDEPPADGALKRAEELKTQANDYFKAKDYENAIKFYSQAIELNPSNAIYYGYALGDATRAIELDKKYIKGYYRRAASNMALGKFRAALRDYETVVKVKPHDKDAKMKYQECNKIVKQKAFERAIAGDEHKRSVVDSLDIESMTIEDEYSGPKLEDGKVTISFMKELMQWYKDQKKLHRKCAYQILVQVKEVLSKLSTLVETTLKETEKITVCGDTHGQFYDLLNIFELNGLPSETNPYIFNGDFVDRGSFSVEVILTLFGFKLLYPDHFHLLRGNHETDNMNQIYGFEGEVKAKYTAQMYELFSEVFEWLPLAQCINGKVLIMHGGLFSEDGVTLDDIRKIERNRQPPDSGPMCDLLWSDPQPQNGRSISKRGVSCQFGPDVTKAFLEENNLDYIIRSHEVKAEGYEVAHGGRCVTVFSAPNYCDQMGNKASYIHLQGSDLRPQFHQFTAVPHPNVKPMAYANTLLQLGMM

SEQ ID NO: 60004 - protein, 485 aa, Homo sapiens
  VARIANT 1: note = MOD_RES - Any amino acid
XMAEGERTECAEPPRDEPPADGALKRAEELKTQANDYFKAKDYENAIKFYSQAIELNPSNAIYYGNRSLAYLRTECYGYALGDATRAIELDKKYIKGYYRRAASNMALGKFRAALRDYETVVKVKPHDKDAKMKYQECNKIVKQKAFERAIAGDEHKRSVVDSLDIESMTIEDEYSGPKLEDGKVTISFMKELMQWYKDQKKLHRKCAYQILVQVKEVLSKLSTLVETTLKETEKITVCGDTHGQFYDLLNIFELNGLPSETNPYIFNGDFVDRGSFSVEVILTLFGFKLLYPDHFHLLRGNHETDNMNQIYGFEGEVKAKYTAQMYELFSEVFEWLPLAQCINGKVLIMHGGLFSEDGVTLDDIRKIERNRQPPDSGPMCDLLWSDPQPQNGRSISKRGVSCQFGPDVTKAFLEENNLDYIIRSHEVKAEGYEVAHGGRCVTVFSAPNYCDQMGNKASYIHLQGSDLRPQFHQFTAVGRPSSGS

SEQ ID NO: 60005 - protein, 158 aa, Homo sapiens
MLTVAALIDEQILCVHGGLSPDIKTLDQIRTIERNQEIPHKGAFCDLVWSDPEDVDTWAISPRGAGWLFGAKVTNEFVHINNLKLICRAHQLVHEGYKFMFDEKLVTVWSAPNYCYRCGNIASIMVFKDVNTREPKLFRAVPDSERVIPPRTTTPYFL

SEQ ID NO: 60006 - protein, 305 aa, Homo sapiens
MAPLDLDKYVEIARLCKYLPENDLKRLCDYVCDLLLEESNVQPVSTPVTVCGDIHGQFYDLCELFRTGGQVPDTNYIFMGDFVDRGYYSLETFTYLLALKAKWPDRITLLRGNHESRQITQVYGFYDECQTKYGNANAWRYCTKVFDMLTVAALIDEQILCVHGGLSPDIKTLDQIRTIERNQEIPHKGAFCDLVWSDPEDVDTWAISPRGAGWLFGAKVTNEFVHINNLKLICRAHQLVHEGYKFMFDEKLVTVWSAPNYCYRCGNIASIMVFKDVNTREPKLFRAVPDSERVIPPRTTTPYFL

SEQ ID NO: 60007 - protein, 283 aa, Homo sapiens
MAPLDLDKYVEIARLCKYLPENDLKRLCDYVCDLLLEESNVQPVSTPVTVCGDIHGQGDFVDRGYYSLETFTYLLALKAKWPDRITLLRGNHESRQITQVYGFYDECQTKYGNANAWRYCTKVFDMLTVAALIDEQILCVHGGLSPDIKTLDQIRTIERNQEIPHKGAFCDLVWSDPEDVDTWAISPRGAGWLFGAKVTNEFVHINNLKLICRAHQLVHEGYKFMFDEKLVTVWSAPNYCYRCGNIASIMVFKDVNTREPKLFRAVPDSERVIPPRTTTPYFL

SEQ ID NO: 60008 - protein, 342 aa, Homo sapiens
MAPLDLDKYVEIARLCKYLPENDLKVSPICGLAPSGCGAPAGRPFLSPGPPPVFHFLRFLKERLCDYVCDLLLEESNVQPVSTPVTVCGDIHGQFYDLCELFRTGGQVPDTNYIFMGDFVDRGYYSLETFTYLLALKAKWPDRITLLRGNHESRQITQVYGFYDECQTKYGNANAWRYCTKVFDMLTVAALIDEQILCVHGGLSPDIKTLDQIRTIERNQEIPHKGAFCDLVWSDPEDVDTWAISPRGAGWLFGAKVTNEFVHINNLKLICRAHQLVHEGYKFMFDEKLVTVWSAPNYCYRCGNIASIMVFKDVNTREPKLFRAVPDSERVIPPRTTTPYFL

SEQ ID NO: 60009 - protein, 125 aa, Homo sapiens
MFLLPRLQLLGQMRLCDYVCDLLLEESNVQPVSTPVTVCGDIHGQFYDLCELFRTGGQVPDTNYIFMGDFVDRGYYSLETFTYLLALKAKWPDRITLLRGNHESRQITQVYGFYDECQTKYGNAN

SEQ ID NO: 60010 - protein, 386 aa, Homo sapiens
MSALEKSMHLGRLPSRPPLPGSGGSQSGAKMRMGPGRKRDFSPVPWSQYFESMEDVEVENETGKDTFRVYKSGSEGPVLLLLHGGGHSALSWAVFTAAIISRVQCRIVALDLRSHGETKVKNPEDLSAETMAKDVGNVVEAMYGDLPPPIMLIGHSMGGAIAVHTASSNLVPSLLGLCMIDVVEGTAMDALNSMQNFLRGRPKTFKSLENAIEWSVKSGQIRNLESARVSMVGQVKQCEGITSPEGSKSIVEGIIEEEEEDEEGSESISKRKKEDDMETKKDHPYTWRIELAKTEKYWDGWFRGLSNLFLSCPIPKLLLLAGVDRLDKDLTIGQMQGKFQMQVLPQCGHAVHEDAPDKVAEAVATFLIRHRFAEPIGGFQCVFPGC

SEQ ID NO: 60011 - protein, 199 aa, Homo sapiens
MDALNSMQNFLRGRPKTFKSLENAIEWSVKSGQIRNLESARVSMVGQVKQCEGITSPEGSKSIVEGIIEEEEEDEEGSESISKRKKEDDMETKKDHPYTWRIELAKTEKYWDGWFRGLSNLFLSCPIPKLLLLAGVDRLDKDLTIGQMQGKFQMQVLPQCGHAVHEDAPDKVAEAVATFLIRHRFAEPIGGFQCVFPGC

SEQ ID NO: 60012 - protein, 400 aa, Homo sapiens
MSALEKSMHLGRLPSRPPLPGSGGSQSGAKMRMGPGRKRDFSPVPWSQYFESMEDVEVENETGKDTFRVYKSGSEGPVLLLLHGGGHSALSWAVFTAAIISRVQCRIVALDLRSHGETKVKNPEDLSAETMAKDVGNVVEAMYGDLPPPIMLIGHSMGGAIAVHTASSNLVPSLLGLCMIDVVEGTAMDALNSMQNFLRGRPKTFKSLENAIEWSVKSGQIRNLESARVSMVGQVKQCEGITSPEGSKSIVEGIIEEEEEDEEGSESISKRKKEDDMEGLPSETQNLLLFLQTKKDHPYTWRIELAKTEKYWDGWFRGLSNLFLSCPIPKLLLLAGVDRLDKDLTIGQMQGKFQMQVLPQCGHAVHEDAPDKVAEAVATFLIRHRFAEPIGGFQCVFPGC

SEQ ID NO: 60013 - protein, 591 aa, Homo sapiens
MGCSSSSTKTRRSDTSLRAALIIQNWYRGYKARLKARQHYALTIFQSIEYADEQGQMQLSTFFSFMLENYTHIHKEELELRNQSLESEQDMRDRWDYVDSIDVPDSYNGPRLQFPLTCTDIDLLLEAFKEQQILHAHYVLEVLFETKKVLKQMPNFTHIQTSPSKEVTICGDLHGKLDDLFLIFYKNGLPSERNPYVFNGDFVDRGKNSIEILMILCVSFLVYPNDLHLNRGNHEDFMMNLRYGFTKEILHKYKLHGKRILQILEEFYAWLPIGTIVDNEILVIHGGISETTDLNLLHRVERNKMKSVLIPPTETNRDHDTDSKHNKVGVTFNAHGRIKTNGSPTEHLTEHEWEQVVTIFSASNYYEEGSNRGAYIKLCSGTTPRFFQYQVTKATCFQPLRQRVDTMENSAIKILRERVISRKSDLTRAFQLQDHRKSGKLSVSQWAFCMENILGLNLPWRSLSSNLVNIDQNGNVEYMSSFQNIRIEKPVQEAHSTLVETLYRYRSDLEIIFNAIDTDHSGLISVEEFRAMWKLFSSHYNVHIDDSQVNKLANIMDLNKDGSIDFNEFLKAFYVVHRYEDLMKPDVTNLG

SEQ ID NO: 60014 - protein, 600 aa, Homo sapiens
MGCSSSSTKTRRSDTSLRAALIIQNWYRGYKARLKARQHYALTIFQSIEYADEQGQMQLSTFFSFMLENYTHIHKEELEILHAHYVLEVLFETKKVLKQMPNFTHIQTSPSKEVTICGDLHGKLDDLFLIFYKNGLPSERNPYVFNGDFVDRGKNSIEILMILCVSFLVYPNDLHLNRGNHEDFMMNLRYGFTKEILHKYKLHGKRILQILEEFYAWLPIGTIVDNEILVIHGGISETTDLNLLHRVERNKMKSVLIPPTETNRDHDTDSKHNKVGVTFNAHGRIKTNGSPTEHLTEHEWEQIIDILWSDPRGKNGCFPNTCRGGGCYFGPDVTSKILNKYQLKMLIRSHECKPEGYEICHDGKVVTIFSASNYYEEGSNRGAYIKLCSGTTPRFFQYQVTKATCFQPLRQRVDTMENSAIKILRERVISRKSDLTRAFQLQDHRKSGKLSVSQWAFCMENILGLNLPWRSLSSNLVNIDQNGNVEYMSSFQNIRIEKPVQEAHSTLVETLYRYRSDLEIIFNAIDTDHSGLISVEEFRAMWKLFSSHYNVHIDDSQVNKLANIMDLNKDGSIDFNEFLKAFYVVHRYEDLMKPDVTNLG

SEQ ID NO: 60015 - protein, 653 aa, Homo sapiens
MGCSSSSTKTRRSDTSLRAALIIQNWYRGYKARLKARQHYALTIFQSIEYADEQGQMQLSTFFSFMLENYTHIHKEELELRNQSLESEQDMRDRWDYVDSIDVPDSYNGPRLQFPLTCTDIDLLLEAFKEQQILHAHYVLEVLFETKKVLKQMPNFTHIQTSPSKEVTICGDLHGKLDDLFLIFYKNGLPSERNPYVFNGDFVDRGKNSIEILMILCVSFLVYPNDLHLNRGNHEDFMMNLRYGFTKEILHKYKLHGKRILQILEEFYAWLPIGTIVDNEILVIHGGISETTDLNLLHRVERNKMKSVLIPPTETNRDHDTDSKHNKVGVTFNAHGRIKTNGSPTEHLTEHEWEQIIDILWSDPRGKNGCFPNTCRGGGCYFGPDVTSKILNKYQLKMLIRSHECKPEGYEICHDGKVVTIFSASNYYEEGSNRGAYIKLCSGTTPRFFQYQVTKATCFQPLRQRVDTMENSAIKILRERVISRKSDLTRAFQLQDHRKSGKLSVSQWAFCMENILGLNLPWRSLSSNLVNIDQNGNVEYMSSFQNIRIEKPVQEAHSTLVETLYRYRSDLEIIFNAIDTDHSGLISVEEFRAMWKLFSSHYNVHIDDSQVNKLANIMDLNKDGSIDFNEFLKAFYVVHRYEDLMKPDVTNLG

SEQ ID NO: 60016 - protein, 376 aa, Homo sapiens
MGCSSSSTKTRRSDTSLRAALIIQNWYRGYKARLKARQHYALTIFQSIEYADEQGQMQLSTFFSFMLENYTHIHKEELELRNQSLESEQDMRDRWDYVDSIDVPDSYNGPRLQFPLTCTDIDLLLEAFKEQQILHAHYVLEVLFETKKVLKQMPNFTHIQTSPSKEVTICGDLHGKLDDLFLIFYKNGLPSERNPYVFNGDFVDRGKNSIEILMILCVSFLVYPNDLHLNRGNHEDFMMNLRYGFTKEILHKYKLHGKRILQILEEFYAWLPIGTIVDNEILVIHGGISETTDLNLLHRVERNKMKSVLIPPTETNRDHDTDSKHNKVGVTFNAHGRIKTNGSPTEHLTEHEWEQSGYYGKQRHQDIKRESDFTKK

SEQ ID NO: 60017 - protein, 588 aa, Homo sapiens
MLENYTHIHKEELELRNQSLESEQDMRDRWDYVDSIDVPDSYNGPRLQFPLTCTDIDLLLEAFKEQQILHAHYVLEVLFETKKVLKQMPNFTHIQTSPSKEVTICGDLHGKLDDLFLIFYKNGLPSERNPYVFNGDFVDRGKNSIEILMILCVSFLVYPNDLHLNRGNHEDFMMNLRYGFTKEILHKYKLHGKRILQILEEFYAWLPIGTIVDNEILVIHGGISETTDLNLLHRVERNKMKSVLIPPTETNRDHDTDSKHNKVGVTFNAHGRIKTNGSPTEHLTEHEWEQIIDILWSDPRGKNGCFPNTCRGGGCYFGPDVTSKILNKYQLKMLIRSHECKPEGYEICHDGKVVTIFSASNYYEEGSNRGAYIKLCSGTTPRFFQYQVTKATCFQPLRQRVDTMENSAIKILRERVISRKSDLTRAFQLQDHRKSGKLSVSQWAFCMENILGLNLPWRSLSSNLVNIDQNGNVEYMSSFQNIRIEKPVQEAHSTLVETLYRYRSDLEIIFNAIDTDHSGLISVEEFRAMWKLFSSHYNVHIDDSQVNKLANIMDLNKDGSIDFNEFLKAFYVVHRYEDLMKPDVTNLG

SEQ ID NO: 60018 - protein, 753 aa, Homo sapiens
MGSGTSTQHHFAFQNAERAFKAAALIQRWYRRYVARLEMRRRCTWSIFQSIEYAGQQDQVKLHDFFSYLMDHFIPSSHNDRDFLTRIFTEDRFAQDSEMKKCSDYESIEVPDSYTGPRLSFPLLPDHATALVEAFRLKQQLHARYVLNLLYETKKHLVQLPNINRVSTCYSEEITVCGDLHGQLDDLIFIFYKNGLPSPERSYVFNGDFVDRGKDSVEILMILFAFMLVYPKEFHLNRGNHEDHMVNLRYGFTKEVMNKYKVHGKEILRTLQDVFCWLPLATLIDEKVLILHGGVSDITDLELLDKIERSKIVSTMRCKTRQKSEKQMEEKRRANQKSSAQGPIPWFLPESRSLPSSPLRLGSYKAQKTSRSSSIPCSGSLDGRELSRQVRSSVELELERCRQQAGLLVTGEKEEPSRSASEADSEAGELRKPTQEEWRQVVDILWSDPMAQEGCKANTIRGGGCYFGPDVTQQLLQKYNMQFLIRSHECKPEGYEFCHNRKVLTIFSASNYYEVGSNRGAYVKLGPALTPHIVQYQANKVTHTLTMRQRISRVEESALRALREKLFAHSSDLLSEFKKHDADKVGLITLSDWAAAVESVLHLGLPWRMLRPQLVNSSADNMLEYKSWLKNLAKEQLSRENIQSSLLETLYRNRSNLETIFRIIDSDHSGFISLDEFRQTWKLFSSHMNIDITDDCICDLARSIDFNKDGHIDINEFLEAFRLVEKSCPEGDASECPQATNAKDSGCSSPGAH

SEQ ID NO: 60019 - protein, 598 aa, Homo sapiens
MGSGTSTQHHFAFQNAERAFKAAALIQRWYRRYVARLEMRRRCTWSIFQSIEYAGQQDQVKLHDFFSYLMDHFIPSSHNDRDFLTRIFTEDRFAQDSEMKKCSDYESIEVPDSYTGPRLSFPLLPDHATALVEAFRLKQQLHARYVLNLLYETKKHLVQLPNINRVSTCYSEEITVCGDLHGQLDDLIFIFYKNGLPSPERSYVFNGDFVDRGKDSVEILMILFAFMLVYPKEFHLNRGNHEDHMVNLRYGFTKEVMNKYKVHGKEILRTLQDVFCWLPLATLIDEKVLILHGGVSDITDLELLDKIERSKIVSTMRCKTRQKSEKQMEEKRRANQKSSAQGPIPWFLPESRSLPSSPLRLGSYKAQKTSRSSSIPCSGSLDGRELSRQVRSSVELELERCRQQAGLLVTGEKEEPSRSASEADSEAGELRKPTQEEWRQVVDILWSDPMAQEGCKANTIRGGGCYFGPDVTQQLLQKYNMQFLIRSHECKPEGYEFCHNRKVLTIFSASNYYEVGSNRGAYVKLGPALTPHIVQYQANKVTHTLTMRQRISRVEESALRALREKLFAHSSDLLSEFKKHDADKVGLASSQLCYYQQK

SEQ ID NO: 60020 - protein, 479 aa, Homo sapiens
MGAFLDKPKTEKHNAHGAGNGLRYGLSSMQGWRVEMEDAHTAVVGIPHGLEDWSFFAVYDGHAGSRVANYCSTHLLEHITTNEDFRAAGKSGSALELSVENVKNGIRTGFLKIDEYMRNFSDLRNGMDRSGSTAVGVMISPKHIYFINCGDSRAVLYRNGQVCFSTQDHKPCNPREKERIQNAGGSVMIQRVNGSLAVSRALGDYDYKCVDGKGPTEQLVSPEPEVYEILRAEEDEFIILACDGIWDVMSNEELCEYVKSRLEVSDDLENVCNWVVDTCLHKGSRDNMSIVLVCFSNAPKVSDEAVKKDSELDKHLESRVEEIMEKSGEEGMPDLAHVMRILSAENIPNLPPGGGLAGKRNVIEAVYSRLNPHRESDGASDEAEESGSQGKLVEALRQMRINHRGNYRQLLEEMLTSYRLAKVEGEESPAEPAATATSSNSDAGNPVTMQESHTESESGLAELDSSNEDAGTKMSGEKI

SEQ ID NO: 60021 - protein, 192 aa, Homo sapiens
MSIVLVCFSNAPKVSDEAVKKDSELDKHLESRVEEIMEKSGEEGMPDLAHVMRILSAENIPNLPPGGGLAGKRNVIEAVYSRLNPHRESDGASDEAEESGSQGKLVEALRQMRINHRGNYRQLLEEMLTSYRLAKVEGEESPAEPAATATSSNSDAGNPVTMQESHTESESGLAELDSSNEDAGTKMSGEKI

SEQ ID NO: 60022 - protein, 387 aa, Homo sapiens
MGAFLDKPKTEKHNAHGAGNGLRYGLSSMQGWRVEMEDAHTAVVGIPHGLEDWSFFAVYDGHAGSRVANYCSTHLLEHITTNEDFRAAGKSGSALELSVENVKNGIRTGFLKIDEYMRNFSDLRNGMDRSGSTAVGVMISPKHIYFINCGDSRAVLYRNGQVCFSTQDHKPCNPREKERIQNAGGSVMIQRVNGSLAVSRALGDYDYKCVDGKGPTEQLVSPEPEVYEILRAEEDEFIILACDGIWDVMSNEELCEYVKSRLEVSDDLENVCNWVVDTCLHKGSRDNMSIVLVCFSNAPKVSDEAVKKDSELDKHLESRVEEIMEKSGEEGMPDLAHVMRILSAENIPNLPPGGGLAGKRNVIEAVYSRLNPHRESDGGAGDLEDPW

SEQ ID NO: 60023 - protein, 380 aa, Homo sapiens
MGAFLDKPKTEKHNAHGAGNGLRYGLSSMQGWRVEMEDAHTAVVGIPHGLEDWSFFAVYDGHAGSRVANYCSTHLLEHITTNEDFRAAGKSGSALELSVENVKNGIRTGFLKIDEYMRNFSDLRNGMDRSGSTAVGVMISPKHIYFINCGDSRAVLYRNGQVCFSTQDHKPCNPREKERIQNAGGSVMIQRVNGSLAVSRALGDYDYKCVDGKGPTEQLVSPEPEVYEILRAEEDEFIILACDGIWDVMSNEELCEYVKSRLEVSDDLENVCNWVVDTCLHKGSRDNMSIVLVCFSNAPKVSDEAVKKDSELDKHLESRVEEIMEKSGEEGMPDLAHVMRILSAENIPNLPPGGGLAGKRNVIEAVYSRLNPHRESDGQK

SEQ ID NO: 60024 - protein, 327 aa, Homo sapiens
MGAFLDKPKTEKHNAHGAGNGLRYGLSSMQGWRVEMEDAHTAVVGIPHGLEDWSFFAVYDGHAGSRVANYCSTHLLEHITTNEDFRAAGKSGSALELSVENVKNGIRTGFLKIDEYMRNFSDLRNGMDRSGSTAVGVMISPKHIYFINCGDSRAVLYRNGQVCFSTQDHKPCNPREKERIQNAGGSVMIQRVNGSLAVSRALGDYDYKCVDGKGPTEQLVSPEPEVYEILRAEEDEFIILACDGIWDVMSNEELCEYVKSRLEVSDDLENVCNWVVDTCLHKGSRDNMSIVLVCFSNAPKVSDEAVKKDSELDKHLESRVEGKTNAF

SEQ ID NO: 60025 - protein, 378 aa, Homo sapiens
MGAFLDKPKTEKHNAHGAGNGLRYGLSSMQGWRVEMEDAHTAVVGIPHGLEDWSFFAVYDGHAGSRVANYCSTHLLEHITTNEDFRAAGKSGSALELSVENVKNGIRTGFLKIDEYMRNFSDLRNGMDRSGSTAVGVMISPKHIYFINCGDSRAVLYRNGQVCFSTQDHKPCNPREKERIQNAGGSVMIQRVNGSLAVSRALGDYDYKCVDGKGPTEQLVSPEPEVYEILRAEEDEFIILACDGIWDVMSNEELCEYVKSRLEVSDDLENVCNWVVDTCLHKGSRDNMSIVLVCFSNAPKVSDEAVKKDSELDKHLESRVEEIMEKSGEEGMPDLAHVMRILSAENIPNLPPGGGLAGKRNVIEAVYSRLNPHRESDG

SEQ ID NO: 60026 - protein, 505 aa, Homo sapiens
MLNRVRSAVAHLVSSGGAPPPRPKSPDLPNAASAPPAAAPEAPRSPPAKAGSGSATPAKAVEARASFSRPTFLQLSPGGLRRADDHAGRAVQSPPDTGRRLPWSTGYAEVINAGKSRHNEDQACCEVVYVEGRRSVTGVPREPSRGQGLCFYYWGLFDGHAGGGAAEMASRLLHRHIREQLKDLVEILQDPSPPPLCLPTTPGTPDSSDPSHLLGPQSCWSSQKEVSHESLVVGAVENAFQLMDEQMARERRGHQVEGGCCALVVIYLLGKVYVANAGDSRAIIVRNGEIIPMSREFTPETERQRLQLLGFLKPELLGSEFTHLEFPRRVLPKELGQRMLYRDQNMTGWAYKKIELEDLRFPLVCGEGKKARVMATIGVTRGLGDHSLKVCSSTLPIKPFLSCFPEVRVYDLTQYEHCPDDVLVLGTDGLWDVTTDCEVAATVDRVLSAYEPNDHSRYTALAQALVLGARGTPRDRGWRLPNNKLGSGDDISVFVIPLGGPGSYS

SEQ ID NO: 60027 - protein, 299 aa, Homo sapiens
MASRLLHRHIREQLKDLKEVSHESLVVGAVENAFQLMDEQMARERRGHQVEGGCCALVVIYLLGKVYVANAGDSRAIIVRNGEIIPMSREFTPETERQRLQLLGFLKPELLGSEFTHLEFPRRVLPKELGQRMLYRDQNMTGWAYKKIELEDLRFPLVCGEGKKARVMATIGVTRGLGDHSLKVCSSTLPIKPFLSCFPEVRVYDLTQYEHCPDDVLVLGTDGLWDVTTDCEVAATVDRVLSAYEPNDHSRYTALAQALVLGARGTPRDRGWRLPNNKLGSGDDISVFVIPLGGPGSYS

SEQ ID NO: 60028 - protein, 372 aa, Homo sapiens
MSTAALITLVRSGGNQVRRRVLLSSRLLQDDRRVTPTCHSSTSEPRCSRFDPDGSGSPATWDNFGIWDNRIDEPILLPPSIKYGKPIPKISLENVGCASQIGKRKENEDRFDFAQLTDEVLYFAVYDGHGGPAAADFCHTHMEKCIMDLLPKEKNLETLLTLAFLEIDKAFSSHARLSADATLLTSGTTATVALLRDGIELVVASVGDSRAILCRKGKPMKLTIDHTPERKDEKERIKKCGGFVAWNSLGQPHVNGRLAMTRSIGDLDLKTSGVIAEPETKRIKLHHADDSFLVLTTDGINFMVNSQEICDFVNQCHDPNEAAHAVTEQAIQYGTEDNSTAVVVPFGAWGKYKNSEINFSFSRSFASSGRWA

SEQ ID NO: 60029 - protein, 233 aa, Homo sapiens
MSTAALITLVRSGGNQVRRRVLLSSRLLQDDRRVTPTCHSSTSEPRCSRFDPDGSGSPATWDNFGIWDNRIDEPILLPPSIKYGKPIPKISLENVGCASQIGKRKENEDRFDFAQLTDEVLYFAVYDGHGGPAAADFCHTHMEKCIMDLLPKEKNLETLLTLAFLEIDKAFSSHARLSADENCAWSAALDLEPVDTICGASVEREICLILSQVKESSGSYPGLREGSHISLSH

SEQ ID NO: 60030 - protein, 233 aa, Homo sapiens; identical to SEQ ID NO: 60029

SEQ ID NO: 60031 - protein, 194 aa, Homo sapiens
MIEDTMTLLSLLGRIMRYFLLRPETLFLLCISLALWSYFFHTDEVKTIVKSSRDAVKMVKGKVAEIMQNDRLGGLDVLEAEFSKTWEFKNHNVAVYSIQGRRDHMEDRFEVLTDLANKTHPSIFGIFDGHGGETAAEYVKSRLPEALKQHLQDYEKDKENSVLSYQTILEQQILSIDREMLEKLTVSYDEAVTF

SEQ ID NO: 60032 - protein, 360 aa, Homo sapiens
MIEDTMTLLSLLGRIMRYFLLRPETLFLLCISLALWSYFFHTDEVKTIVKSSRDAVKMVKGKVAEIMQNDRLGGLDVLEAEFSKTWEFKNHNVAVYSIQGRRDHMEDRFEVLTDLANKTHPSIFGIFDGHGGETAAEYVKSRLPEALKQHLQDYEKDKENSVLSYQTILEQQILSIDREMLEKLTVSYDEAGTTCLIALLSDKDLTVANVGDSRGVLCDKDGNAIPLSHDHKPYQLKERKRIKRAGGFISFNGSWRVQGILAMSRSLGDYPLKNLNVVIPDPDILTFDLDKLQPEFMILASDGLWDAFSNEEAVRFIKERLDEPHFGAKSIVLQSFYRGCPDNITVMVVKFRNSSKTEEQ

SEQ ID NO: 60033 - protein, 270 aa, Homo sapiens
MHLNGRCICPSDPQFVEEKGIRAEDLVIGALESAFQECDEVIGRELEASGQMGGCTALVAVSLQGKLYMANAGDSRAILVRRDEIRPLSFEFTPETERQRIQQLAFVYPELLAGEFTRLEFPRRLKGDDLGQKVLFRDHHMSGWSYKRVEKSDLKYPLIHGQGRQARLLGTLAVSRGLGDHQLRVLDTNIQLKPFLLSVPQVTVLDVDQLELQEDDVVVMATDGLWDVLSNEQVAWLVRSFLPGNQEDPHRYCSCWGPAWAWVGASSKPK

SEQ ID NO: 60034 - protein, 298 aa, Homo sapiens
MHLNGRCICPSDPQFVEEKGIRAEDLVIGALESAFQECDEVIGRELEASGQMGGCTALVAVSLQGKLYMANAGDSRAILVRRDEIRPLSFEFTPETERQRIQQLAFVYPELLAGEFTRLEFPRRLKGDDLGQKVLFRDHHMSGWSYKRVEKSDLKYPLIHGQGRQARLLGTLAVSRGLGDHQLRVLDTNIQLKPFLLSVPQVTVLDVDQLELQEDDVVVMATDGLWDVLSNEQVAWLVRSFLPGNQEDPHRFSKLAQMLIHSTQGKEDSLTEEGQVSYDDVSVFVIPLHSQGQESSDH

SEQ ID NO: 60035 - protein, 247 aa, Homo sapiens
MGGCTALVAVSLQGKLYMANAGDSRAILVRRDEIRPLSFEFTPETERQRIQQLAFVYPELLAGEFTRLEFPRRLKGDDLGQKVLFRDHHMSGWSYKRVEKSDLKYPLIHGQGRQARLLGTLAVSRGLGDHQLRVLDTNIQLKPFLLSVPQVTVLDVDQLELQEDDVVVMATDGLWDVLSNEQVAWLVRSFLPGNQEDPHRFSKLAQMLIHSTQGKEDSLTEEGQVSYDDVSVFVIPLHSQGQESSDH

SEQ ID NO: 60036 - protein, 459 aa, Homo sapiens
MSAGWFRRRFLPGEPLPAPRPPGPHASPVPYRRPRFLRGSSSSPGAADASRRPDSRPVRSPARGRTLPWNAGYAEIINAEKSEFNEDQAACGKLCIRRCEFGAEEEWLTLCPEEFLTGHYWALFDGHGGPAAAILAANTLHSCLRRQLEAVVEGLVATQPPMHLNGRCICPSDPQFVEEKGIRAEDLVIGALESAFQECDEVIGRELEASGQMGGCTALVAVSLQGKLYMANAGDSRAILVRRDEIRPLSFEFTPETERQRIQQLAFVYPELLAGEFTRLEFPRRLKGDDLGQKVLFRDHHMSGWSYKRVEKSDLKYPLIHGQGRQARLLGTLAVSRGLGDHQLRVLDTNIQLKPFLLSVPQVTVLDVDQLELQEDDVVVMATDGLWDVLSNEQVAWLVRSFLPGNQEDPHRFSKLAQMLIHSTQGKEDSLTEEGQVSYDDVSVFVIPLHSQGQESSDH

SEQ ID NO: 60037 - protein, 606 aa, Homo sapiens
MRRSEVLAEESIVCLQKALNHLREIWELIGIPEDQRLQRTEVVKKHIKELLDMMIAEEESLKERLIKSISVCQKELNTLCSELHVEPFQEEGETTILQLEKDLRTQVELMRKQKKERKQELKLLQEQDQELCEILCMPHYDIDSASVPSLEELNQFRQHVTTLRETKASRREEFVSIKRQIILCMEALDHTPDTSFERDVVCEDEDAFCLSLENIATLQKLLRQLEMQKSQNEAVCEGLRTQIRELWDRLQIPEEEREAVATIMSGSKAKVRKALQLEVDRLEELKMQNMKKVIEAIRVELVQYWDQCFYSQEQRQAFAPFCAEDYTESLLQLHDAEIVRLKNYYEVHKELFEGVQKWEETWRLFLEFERKASDPNRFTNRGGNLLKEEKQRAKLQKMLPKLEEELKARIELWEQEHSKAFMVNGQKFMEYVAEQWEMHRLEKERAKQERQLKNKKQTETEMLYGSAPRTPSKRRGLAPNTPGKARKLNTTTMSNATANSSIRPIFGGTVYHSPVSRLPPSGSKPVAASTCSGKKTPRTGRHGANKENLELNGSILSGGYPGSAPLQRNFSINSVASTYSEFARELSKASKSDATSGILNSTNIQS

SEQ ID NO: 60038 - protein, 566 aa, Homo sapiens
MRRSEVLAEESIVCLQKALNHLREIWELIGIPEDQRLQRTEVVKKHIKELLDMMIAEEESLKERLIKSISVCQKELNTLCSELHVEPFQEEGETTILQLEKDLRTQVELMRKQKKERKQELKLLQEQDQELCEILCMPHYDIDSASVPSLEELNQFRQHVTTLRETKASRREEFVSIKRQIILCMEALDHTPDTSFERDVVCEDEDAFCLSLENIATLQKLLRQLEMQKSQNEAVCEGLRTQIRELWDRLQIPEEEREAVATIMSGSKAKVRKALQLEVDRLEELKMQNMKKVIEAIRVELVQYWDQCFYSQEQRQAFAPFCAEDYTESLLQLHDAEIVRLKNYYEVHKELFEGVQKWEETWRLFLEFERKASDPNRFTNRGGNLLKEEKQRAKLQKMLPKLEEELKARIELWEQEHSKAFMVNGQKFMEYVAEQWEMHRLEKERAKQERQLKNKKQTETEMLYGSAPRTPSKRRGLAPNTPGKARKLNTTTMSNATANSSIRPIFGGTVYHSPVSRLPPSGSKPVAASTCSGKKTPRTGRHGANKENLELNGSILSARTFKGFQI

SEQ ID NO: 60039 - protein, 620 aa, Homo sapiens
MRRSEVLAEESIVCLQKALNHLREIWELIGIPEDQRLQRTEVVKKHIKELLDMMIAEEESLKERLIKSISVCQKELNTLCSELHVEPFQEEGETTILQLEKDLRTQVELMRKQKKERKQELKLLQEQDQELCEILCMPHYDIDSASVPSLEELNQFRQHVTTLRETKASRREEFVSIKRQIILCMEALDHTPDTSFERDVVCEDEDAFCLSLENIATLQKLLRQLEMQKSQNEAVCEGLRTQIRELWDRLQIPEEEREAVATIMSGSKAKVRKALQLEVDRLEELKMQNMKKVIEAIRVELVQYWDQCFYSQEQRQAFAPFCAEDYTESLLQLHDAEIVRLKNYYEVHKELFEGVQKWEETWRLFLEFERKASDPNRFTNRGGNLLKEEKQRAKLQKMLPKLEEELKARIELWEQEHSKAFMVNGQKFMEYVAEQWEMHRLEKERAKQERQLKNKKQTETEMLYGSAPRTPSKRRGLAPNTPGKARKLNTTTMSNATANSSIRPIFGGTVYHSPVSRLPPSGSKPVAASTCSGKKTPRTGRHGANKENLELNGSILSGGYPGSAPLQRNFSINSVASTYSEFAKDPSLSDSSTVGLQRELSKASKSDATSGILNSTNIQS

SEQ ID NO: 60040 - protein, 525 aa, Homo sapiens
MRRSEVLAEESIVCLQKALNHLREIWELIGIPEDQRLQRTEVVKKHIKEEGETTILQLEKDLRTQVELMRKQKKERKQELKLLQEQDQELCEILCMPHYDIDSASVPSLEELNQFRQHVTTLRETKASRREEFVSIKRQIILCMEALDHTPDTSFERDVVCEDEDAFCLSLENIATLQKLLRQLEMQKSQNEAVCEGLRTQIRELWDRLQIPEEEREAVATIMSGSKAKVRKALQLEVDRLEELKMQNMKKVIEAIRVELVQYWDQCFYSQEQRQAFAPFCAEDYTESLLQLHDAEIVRLKNYYEVHKELFEGVQKWEETWRLFLEFERKASDPNRFTNRGGNLLKEEKQRAKLQKMLPKLEEELKARIELWEQEHSKAFMVNGQKFMEYVAEQWEMHRLEKERAKQERQLKNKKQTETEMLYGSAPRTPSKRRGLAPNTPGKARKLNTTTMSNATANSSIRPIFGGTVYHSPVSRLPPSGSKPVAASTCSGKKTPRTGRHGANKENLELNGSILSARTFKGFQI

SEQ ID NO: 60041 - protein, 231 aa, Homo sapiens
MRVLGGRCGALLACLLLVLPVSEANFCLYFRNDFIYNRACISVLVGLSGCNFFYSICFLSKQQASQVLVRKRRANSLLEETKQGNLERECIEELCNKEEAREVFENDPETDYFYPKYLVCLRSFQTGLFTAARQSTNAYPDLRSCVNAIPDQCSPLPCNEDGYMSCKDGKASFTCTCKPGWQGEKCEFDINECKDPSNINGGCSQICDNTPGSYHCSCKNGFVMLSNKKDC

SEQ ID NO: 60042 - protein, 676 aa, Homo sapiens
MRVLGGRCGALLACLLLVLPVSEANFLSKQQASQVLVRKRRANSLLEETKQGNLERECIEELCNKEEAREVFENDPETDYFYPKYLVCLRSFQTGLFTAARQSTNAYPDLRSCVNAIPDQCSPLPCNEDGYMSCKDGKASFTCTCKPGWQGEKCEFDINECKDPSNINGGCSQICDNTPGSYHCSCKNGFVMLSNKKDCKDVDECSLKPSICGTAVCKNIPGDFECECPEGYRYNLKSKSCEDIDECSENMCAQLCVNYPGGYTCYCDGKKGFKLAQDQKSCEVVSVCLPLNLDTKYELLYLAEQFAGVVLYLKFRLPEISRFSAEFDFRTYDSEGVILYAESIDHSAWLLIALRGGKIEVQLKNEHTSKITTGGDVINNGLWNMVSVEELEHSISIKIAKEAVMDINKPGPLFKPENGLLETKVYFAGFPRKVESELIKPINPRLDGCIRSWNLMKQGASGIKEIIQEKQNKHCLVTVEKGSYYPGSGIAQFHIDYNNVSSAEGWHVNVTLNIRPSTGTGVMLALVSGNNTVPFAVSLVDSTSEKSQDILLSVENTVIYRIQALSLCSDQQSHLEFRVNRNNLELSTPLKIETISHEDLQRQLAVLDKAMKAKVATYLGGLPDVPFSATPVNAFYNGCMEVNINGVQLDLDEAISKHNDIRAHSCPSVWKKTKNS

SEQ ID NO: 60043 - protein, 424 aa, Homo sapiens
MGCGTSKVLPEPPKDVQLDLVKKVEPFSGTKSDVYKHFITEVDSVGPVKAGFPAASQYAHPCPGPPTAGHTEPPSEPPRRARVAKYRAKFDPRVTAKYDIKALIGRGSFSRVVRVEHRATRQPYAIKMIETKYREGREVCESELRVLRRVRHANIIQLVEVFETQERVYMVMELATGGELFDRIIAKGSFTERDATRVLQMVLDGVRYLHALGITHRDLKPENLLYYHPGTDSKIIITDFGLASARKKGDDCLMKTTCGTPEYIAPEVLVRKPYTNSVDMWALGVIAYILLSGTMPFEDDNRTRLYRQILRGKYSYSGEPWPSVSNLAKDFIDRLLTVDPGARMTALQALRHPWVVSMAASSSMKNLHRSISQNLLKRASSRCQSTKSAQSTRSSRSTRSNKSRRVRERELRELNLRYQQQYNG

SEQ ID NO: 60044 - protein, 650 aa, Homo sapiens
MACREFEMGRKKCERYWPLYGEDPITFAPFKISCEDEQARTDYFIRTLLLEFQNESRRLYQFHYVNWPDHDVPSSFDSILDMISLMRKYQEHEDVPICIHCSAGCGRTGAICAIDYTWNLLKAGKIPEEFNVFNLIQEMRTQRHSAVQTKEQYELVHRAIAQLFEKQLQLYEIHGAQKIADGVNEINTENMVSSIEPEKQDSPPPKPPRTRSCLVEGDAKEEILQPPEPHPVPPILTPSPPSAFPTVTTVWQDNDRYHPKPVLHMVSSEQHSADLNRNYSKSTELPGKNESTIEQIDKKLERNLSFEIKKVPLQEGPKSFDGNTLLNRGHAIKIKSASPCIADKISKPQELSSDLNVGDTSQNSCVDCSVTQSNKVSVTPPEESQNSDTPPRPDRLPLDEKGHVTWSFHGPENAIPIPDLSEGNSSDINYQTRKTVSLTPSPTTQVETPDLVDHDNTSPLFRTPLSFTNPLHSDDSDSDERNSDGAVTQNKTNISTASATVSAATSTESISTRKVLPMSIARHNIAGTTHSGAEKDVDVSEDSPPPLPERTPESFVLASEHNTPVRSEWSELQSQERSEQKKSEGLITSENEKCDHPAGGIHYEMCIECPPTFSDKREQISENPTEATDIGFGNRCGKPKGPRDPPSEWT

SEQ ID NO: 60045 - protein, 353 aa, Homo sapiens
MSRSLDSARSFLERLEARGGREGAVLAGEFSKRCERYWAQEQEPLQTGLFCITLIKEKWLNEDIMLRTLKVTFQKESRSVYQLQYMSWPDRGVPSSPDHMLAMVEEARRLQGSGPEPLCVHCSAGCGRTGVLCTVDYVRQLLLTQMIPPDFSLFDVVLKMRKQRPAAVQTEEQYRFLYHTVAQMFCSTLQNASPHYQNIKENCAPLYDDALFLRTPQALLAIPRPPGGVLRSISVPGSPGHAMADTYAVVQKRGAPAGAGSGTQTGTGTGTGARSAEEAPLYSKVTPRAQRPGAHAEDARGTLPGRVPADQSPAGSGAYEDVAGGAQTGGLGFNLRIGRPKGPRDPPAEWTRV

SEQ ID NO: 60046 - protein, 410 aa, Homo sapiens
MPTTIEREFEELDTQRRWQPLYLEIRNESHDYPHRVAKFPENRNRNRYRDVSPYDHSRVKLQNAENDYINASLVDIEEAQRSYILTQGPLPNTCCHFWLMVWQQKTKAVVMLNRIVEKESVKCAQYWPTDDQEMLFKETGFSVKLLSEDVKSYYTVHLLQLENINYIENLWITLYLKLLMLDVKRSLKSGETRTISHFHYTTWPDFGVPESPASFLNFLFKVRESGSLNPDHGPAVIHCSAGIGRSGTFSLVDTCLVLMEKGDDINIKQVLLNMRKYRMGLIQTPDQLRFSYMAIIEGAKCIKGDSSIQKRWKELSKEDLSPAFDHSPNKIMTEKYNGNRIGLEEEKLTGDRCTGLSSKMQDTMEENSESALRKRIREDRKATTAQKVQQMKQRLNENERKRKRPRLTDT

SEQ ID NO: 60047 - protein, 752 aa, Homo sapiens
MDQREILQKFLDEAQSKKITKEEFANEFLKLKRQSTKYKADKTYPTTVAEKPKNIKKNRYKDILPYDYSRVELSLITSDEDSSYINANFIKGVYGPKAYIATQGPLSTTLLDFWRMIWEYSVLIIVMACMEYEMGKKKCERYWAEPGEMQLEFGPFSVSCEAEKRKSDYIIRTLKVKFNSETRTIYQFHYKNWPDHDVPSSIDPILELIWDVRCYQEDDSVPICIHCSAGCGRTGVICAIDYTWMLLKDGSQAKHCIPEKNHTLQADSYSPNLPKSTTKAAKMMNQQRTKMEIKESSSFDFRTSEISAKEELVLHPAKSSTSFDFLELNYSFDKNADTTMKWQTKAFPIVGEPLQKHQSLDLGSLLFEGCSNSKPVNAAGRYFNSKVPITRTKSTPFELIQQRETKEVDSKENFSYLESQPHDSCFVEMQAQKVMHVSSAELNYSLPYDSKHQIRNASNVKHHDSSALGVYSYIPLVENPYFSSWPPSGTSSKMSLDLPEKQDGTVFPSSLLPTSSTSLFSYYNSHDSLSLNSPTNISSLLNQESAVLATAPRIDDEIPPPLPVWTPESFIVVEEAGEFSPNVPKSLSSAVKVKIGTSLEWGGTSEPKKFDDSVILRPSKSVKLRSPKSELHQDRSSPPPPLPERTLESFFLADEDCMQAQSIETYSTSYPDTMENSTSSKQTLKTPGKSFTRSKSLKILRNMKKSICNSCPPNKPAESVQSNNSSSFLNFGFANRFSKPKGPRNPPPTWNI

SEQ ID NO: 60048 - protein, 1907 aa, Homo sapiens
MLSHGAGLALWITLSLLQTGLAEPERCNFTLAESKASSHSVSIQWRILGSPCNFSLIYSSDTLGAALCPTFRIDNTTYGCNLQDLQAGTIYNFRIISLDEERTVVLQTDPLPPARFGVSKEKTTSTSLHVWWTPSSGKVTSYEVQLFDENNQKIQGVQIQESTSWNEYTFFNLTAGSKYNIAITAVSGGKRSFSVYTNGSTVPSPVKDIGISTKANSLLISWSHGSGNVERYRLMLMDKGILVHGGVVDKHATSYAFHGLTPGYLYNLTVMTEAAGLQNYRWKLVRTAPMEVSNLKVTNDGSLTSLKVKWQRPPGNVDSYNITLSHKGTIKESRVLAPWITETHFKELVPGRLYQVTVSCVSGELSAQKMAVGRTFPDKVANLEANNNGRMRSLVVSWSPPAGDWEQYRILLFNDSVVLLNITVGKEETQYVMDDTGLVPGRQYEVEVIVESGNLKNSERCQGRTVPLAVLQLRVKHANETSLSIMWQTPVAEWEKYIISLADRDLLLIHKSLSKDAKEFTFTDLVPGRKYMATVTSISGDLKNSSSVKGRTVPAQVTDLHVANQGMTSSLFTNWTQAQGDVEFYQVLLIHENVVIKNESISSETSRYSFHSLKSGSLYSVVVTTVSGGISSRQVVVEGRTVPSSVSGVTVNNSGRNDYLSVSWLLAPGDVDNYEVTLSHDGKVVQSLVIAKSVRECSFSSLTPGRLYTVTITTRSGKYENHSFSQERTVPDKVQGVSVSNSARSDYLRVSWVHATGDFDHYEVTIKNKNNFIQTKSIPKSENECVFVQLVPGRLYSVTVTTKSGQYEANEQGNGRTIPEPVKDLTLRNRSTEDLHVTWSGANGDVDQYEIQLLFNDMKVFPPFHLVNTATEYRFTSLTPGRQYKILVLTISGDVQQSAFIEGFTVPSAVKNIHISPNGATDSLTVNWTPGGGDVDSYTVSAFRHSQKVDSQTIPKHVFEHTFHRLEAGEQYQIMIASVSGSLKNQINVVGRTVPAAVTDLRITENSTRHLSFRWTASEGELSWYNIFLYNPDGNLQERAQVDPLVQSFSFQNLLQGRMYKMVIVTHSGELSNESFIFGRTVPASVSHLRGSNRNTTDSLWFNWSPASGDFDFYELILYNPNGTKKENWKDKDLTEWRFQGLVPGRKYVLWVVTHSGDLSNKVTAESRTAPSPPSLMSFADIANTSLAITWKGPPDWTDYNDFELQWLPRDALTVFNPYNNRKSEGRIVYGLRPGRSYQFNVKTVSGDSWKTYSKPIFGSVRTKPDKIQNLHCRPQNSTAIACSWIPPDSDFDGYSIECRKMDTQEVEFSRKLEKEKSLLNIMMLVPHKRYLVSIKVQSAGMTSEVVEDSTITMIDRPPPPPPHIRVNEKDVLISKSSINFTVNCSWFSDTNGAVKYFTVVVREADGSDELKPEQQHPLPSYLEYRHNASIRVYQTNYFASKCAENPNSNSKSFNIKLGAEMESLGGKCDPTQQKFCDGPLKPHTAYRISIRAFTQLFDEDLKEFTKPLYSDTFFSLPITTESEPLFGAIEGVSAGLFLIGMLVAVVALLICRQKVSHGRERPSARLSIRRDRPLSVHLNLGQKGNRKTSCPIKINQFEGHFMKLQADSNYLLSKEYEELKDVGRNQSCDIALLPENRGKNRYNNILPYDATRVKLSNVDDDPCSDYINASYIPGNNFRREYIVTQGPLPGTKDDFWKMVWEQNVHNIVMVTQCVEKGRVKCDHYWPADQDSLYYGDLILQMLSESVLPEWTIREFKICGEEQLDAHRLIRHFHYTVWPDHGVPETTQSLIQFVRTVRDYINRSPGAGPTVVHCSAGVGRTGTFIALDRILQQLDSKDSVDIYGAVHDLRLHRVHMVQTECQYVYLHQCVRDVLRARKLRSEQENPLFPIYENVNPEYHRDPVYSRH

SEQ ID NO: 60049 - protein, 1505 aa, Homo sapiens
MVHVARLLLLLLTFFLRTDAETPPRFTRTPVDQTGVSGGVASFICQATGDPRPKIVWNKKGKKVSNQRFEVIEFDDGSGSVLRIQPLRTPRDEAIYECVASNNVGEISVSTRLTVLREDQIPRGFPTIDMGPQLKVVERTRTATMLCAASGNPDPEITWFKDFLPVDTSNNNGRIKQLRSESIGALQIEQSEESDQGKYECVATNSAGTRYSAPANLYVRVRRVPPRFSIPPTNHEIMPGGSVNITCVAVGSPMPYVKWMLGAEDLTPEDDMPIGRNVLELNDVRQSANYTCVAMSTLGVIEAIAQITVKALPKPPGTPVVTESTATSITLTWDSGNPEPVSYYIIQHKPKNSEELYKEIDGVATTRYSVAGLSPYSDYEFRVVAVNNIGRGPPSEPVLTQTSEQAPSSAPRDVQARMLSSTTILVQWKEPEEPNGQIQGYRVYYTMDPTQHVNNWMKHNVADSQITTIGNLVPQKTYSVKVLAFTSIGDGPLSSDIQVITQTGVPGQPLNFKAEPESETSILLSWTPPRSDTIANYELVYKDGEHGEEQRITIEPGTSYRLQGLKPNSLYYFRLAARSPQGLGASTAEISARTMQSMFAKNFHVKAVMKTSVLLSWEIPENYNSAMPFKILYDDGKMVEEVDGRATQKLIVNLKPEKSYSFVLTNRGNSAGGLQHRVTAKTAPDVLRTKPAFIGKTNLDGMITVQLPEVPANENIKGYYIIIVPLKKSRGKFIKPWESPDEMELDELLKEISRKRRSIRYGREVELKPYIAAHFDVLPTEFTLGDDKHYGGFTNKQLQSGQEYVFFVLAVMEHAESKMYATSPYSDPVVSMDLDPQPITDEEEGLIWVVGPVLAVVFIICIVIAILLYKRKRAESDSRKSSIPNNKEIPSHHPTDPVELRRLNFQTPGSDDSGYPGNLHSSSMASHPPIPILELADHIERLKANDNLKFSQEYESIDPGQQFTWEHSNLEVNKPKNRYANVIAYDHSRVLLSAIEGIPGSDYVNANYIDGYRKQNAYIATQGSLPETFGDFWRMIWEQRSATVVMMTKLEERSRVKCDQYWPSRGTETHGLVQVTLLDTVELATYCVRTFALYKNGSSEKREVRQFQFTAWPDHGVPEHPTPFLAFLRRVKTCNPPDAGPMVVHCSAGVGRTGCFIVIDAMLERIKHEKTVDIYGHVTLMRAQRNYMVQTEDQYIFIHDALLEAVTCGNTEVPARNLYAYIQKLTQIETGENVTGMELEFKRLASSKAHTSRFISANLPCNKFKNRLVNIMPYESTRVCLQPIRGVEGSDYINASFIDGYRQQKAYIATQGPLAETTEDFWRMLWEHNSTIVVMLTKLREMGREKCHQYWPAERSARYQYFVVDPMAEYNMPQYILREFKVTDARDGQSRTVRQFQFTDWPEQGVPKSGEGFIDFIGQVHKTKEQFGQDGPISVHCSAGVGRTGVFITLSIVLERMRYEGVVDIFQTVKMLRTQRPAMVQTEDQYQFSYRAALEYLGSFDHYAT

SEQ ID NO: 60050 - protein, 1465 aa, Homo sapiens
MRGLGTCLATLAGLLLTAAGETFSGGCLFDEPYSTCGYSQSEGDDFNWEQVNTLTKPTSDPWMPSGSFMLVNASGRPEGQRAHLLLPQLKENDTHCIDFHYFVSSKSNSPPGLLNVYVKVNNGPLGNPIWNISGDPTRTWNRAELAISTFWPNFYQVIFEVITSGHQGYLAIDEVKVLGHPCTRTPHFLRIQNVEVNAGQFATFQCSAIGRTVAGDRLWLQGIDVRDAPLKEIKVTSSRRFIASFNVVNTTKRDAGKYRCMIRTEGGVGISNYAELVVKEPPVPIAPPQLASVGATYLWIQLNANSINGDGPIVAREVEYCTASGSWNDRQPVDSTSYKIGHLDPDTEYEISVLLTRPGEGGTGSPGPALRTRTKCADPMRGPRKLEVVEVKSRQITIRWEPFGYNVTRCHSYNLTVHYCYQVGGQEQVREEVSWDTENSHPQHTITNLSPYTNVSVKLILMNPEGRKESQELIVQTDEDLPGAVPTESIQGSTFEEKIFLQWREPTQTYGVITLYEITYKAVSSFDPEIDLSNQSGRVSKLGNETHFLFFGLYPGTTYSFTIRASTAKGFGPPATNQFTTKISAPSMPAYELETPLNQTDNTVTVMLKPAHSRGAPVSVYQIVVEEERPRRTKKTTEILKCYPVPIHFQNASLLNSQYYFAAEFPADSLQAAQPFTIGDNKTYNGYWNTPLLPYKSYRIYFQAASRANGETKIDCVQVATKGAATPKPVPEPEKQTDHTVKIAGVIAGILLFVIIFLGVVLVMKKRKLAKKRKETMSSTRQEMTVMVNSMDKSYAEQGTNCDEAFSFMDTHNLNGRSVSSPSSFTMKTNTLSTSVPNSYYPDPFVPTAILVPINDETHTMASDTSSLVQSHTYKKREPADVPYQTGQLHPAIRVADLLQHITQMKCAEGYGFKEEYESFFEGQSAPWDSAKKDENRMKNRYGNIIAYDHSRVRLQTIEGDTNSDYINGNYIDGYHRPNHYIATQGPMQETIYDFWRMVWHENTASIIMVTNLVEVGRVKCCKYWPDDTEIYKDIKVTLIETELLAEYVIRTFAVEKRGVHEIREIRQFHFTGWPDHGVPYHATGLLGFVRQVKSKSPPSAGPLVVHCSAGAGRTGCFIVIDIMLDMAEREGVVDIYNCVRELRSRRVNMVQTEEQYVFIHDAILEACLCGDTSVPASQVRSLYYDMNKLDPQTNSSQIKEEFRTLNMVTPTLRVEDCSIALLPRNHEKNRCMDILPPDRCLPFLITIDGESSNYINAALMDSYKQPSAFIVTQHPLPNTVKDFWRLVLDYHCTSVVMLNDVDPAQLCPQYWPENGVHRHGPIQVEFVSADLEEDIISRIFRIYNAARPQDGYRMVQQFQFLGWPMYRDTPVSKRSFLKLIRQVDKWQEEYNGGEGRTVVHCLNGGGRSGTFCAISIVCEMLRHQRTVDVFHAVKTLRNNKPNMVDLLDQYKFCYEVALEYLNSG

SEQ ID NO: 60051 - protein, 1440 aa, Homo sapiens
MARAQALVLALTFQLCAPETETPAAGCTFEEASDPAVPCEYSQAQYDDFQWEQVRIHPGTRAPADLPHGSYLMVNTSQHAPGQRAHVIFQSLSENDTHCVQFSYFLYSRDGHSPGTLGVYVRVNGGPLGSAVWNMTGSHGRQWHQAELAVSTFWPNEYQVLFEALISPDRRGYMGLDDILLLSYPCAKAPHFSRLGDVEVNAGQNASFQCMAAGRAAEAERFLLQRQSGALVPAAGVRHISHRRFLATFPLAAVSRAEQDLYRCVSQAPRGAGVSNFAELIVKEPPTPIAPPQLLRAGPTYLIIQLNTNSIIGDGPIVRKEIEYRMARGPWAEVHAVSLQTYKLWHLDPDTEYEISVLLTRPGDGGTGRPGPPLISRTKCAEPMRAPKGLAFAEIQARQLTLQWEPLGYNVTRCHTYTVSLCYHYTLGSSHNQTIRECVKTEQGVSRYTIKNLLPYRNVHVRLVLTNPEGRKEGKEVTFQTDEDVPSGIAAESLTFTPLEDMIFLKWEEPQEPNGLITQYEISYQSIESSDPAVNVPGPRRTISKLRNETYHVFSNLHPGTTYLFSVRARTGKGFGQAALTEITTNISAPSFDYADMPSPLGESENTITVLLRPAQGRGAPISVYQVIVEEERARRLRREPGGQDCFPVPLTFEAALARGLVHYFGAELAASSLPEAMPFTVGDNQTYRGFWNPPLEPRKAYLIYFQAASHLKGETRLNCIRIARKAACKESKRPLEVSQRSEEMGLILGICAGGLAVLILLLGAIIVIIRKGKPVNMTKATVNYRQEKTHMMSAVDRSFTDQSTLQEDERLGLSFMDTHGYSTRGDQRSGGVTEASSLLGGSPRRPCGRKGSPYHTGQLHPAVRVADLLQHINQMKTAEGYGFKQEYESFFEGWDATKKKDKVKGSRQEPMPAYDRHRVKLHPMLGDPNADYINANYIDIRINREGYHRSNHFIATQGPKPEMVYDFWRMVWQEHCSSIVMITKLVEVGRVKCSRYWPEDSDTYGDIKIMLVKTETLAEYVVRTFALERRGYSARHEVRQFHFTAWPEHGVPYHATGLLAFIRRVKASTPPDAGPIVIHCSAGTGRTGCYIVLDVMLDMAECEGVVDIYNCVKTLCSRRVNMIQTEEQYIFIHDAILEACLCGETTIPVSEFKATYKEMIRIDPQSNSSQLREEFQTLNSVTPPLDVEECSIALLPRNRDKNRSMDVLPPDRCLPFLISTDGDSNNYINAALTDSYTRSAAFIVTLHPLQSTTPDFWRLVYDYGCTSIVMLNQLNQSNSAWPCLQYWPEPGRQQYGLMEVEFMSGTADEDLVARVFRVQNISREGHLLVRHFQFLRWSAYRDTPDSKKAFLHLLAEVDKWQAESGDGRTIVHCLNGGGRSGTFCACATVLEMIRCHNLVDVFFAAKTLRNYKPNMVETMDQYHFCYDVALEYLEGLESR

SEQ ID NO: 60052 - protein, 1448 aa, Homo sapiens
MRILKRFLACIQLLCVCRLDWANGYYRQQRKLVEEIGWSYTGALNQKNWGKKYPTCNSPKQSPINIDEDLTQVNVNLKKLKFQGWDKTSLENTFIHNTGKTVEINLTNDYRVSGGVSEMVFKASKITFHWGKCNMSSDGSEHSLEGQKFPLEMQIYCFDADRFSSFEEAVKGKGKLRALSILFEVGTEENLDFKAIIDGVESVSRFGKQAALDPFILLNLLPNSTDKYYIYNGSLTSPPCTDTVDWIVFKDTVSISESQLAVFCEVLTMQQSGYVMLMDYLQNNFREQQYKFSRQVFSSYTGKEEIHEAVCSSEPENVQADPENYTSLLVTWERPRVVYDTMIEKFAVLYQQLDGEDQTKHEFLTDGYQDLGAILNNLLPNMSYVLQIVAICTNGLYGKYSDQLIVDMPTDNPELDLFPELIGTEEIIKEEEEGKDIEEGAIVNPGRDSATNQIRKKEPQISTTTHYNRIGTKYNEAKTNRSPTRGSEFSGKGDVPNTSLNSTSQPVTKLATEKDISLTSQTVTELPPHTVEGTSASLNDGSKTVLRSPHMNLSGTAESLNTVSITEYEEESLLTSFKLDTGAEDSSGSSPATSAIPFISENISQGYIFSSENPETITYDVLIPESARNASEDSTSSGSEESLKDPSMEGNVWFPSSTDITAQPDVGSGRESFLQTNYTEIRVDESEKTTKSFSAGPVMSQGPSVTDLEMPHYSTFAYFPTEVTPHAFTPSSRQQDLVSTVNVVYSQTTQPVYNEASNSSHESRIGLAEGLESEKKAVIPLVIVSALTFICLVVLVGILIYWRKCFQTAHFYLEDSTSPRVISTPPTPIFPISDDVGAIPIKHFPKHVADLHASSGFTEEFEEVQSCTVDLGITADSSNHPDNKHKNRYINIVAYDHSRVKLAQLAEKDGKLTDYINANYVDGYNRPKAYIAAQGPLKSTAEDFWRMIWEHNVEVIVMITNLVEKGRRKCDQYWPADGSEEYGNFLVTQKSVQVLAYYTVRNFTLRNTKIKKGSQKGRPSGRVVTQYHYTQWPDMGVPEYSLPVLTFVRKAAYAKRHAVGPVVVHCSAGVGRTGTYIVLDSMLQQIQHEGTVNIFGFLKHIRSQRNYLVQTEEQYVFIHDTLVEAILSKETEVLDSHIHAYVNALLIPGPAGKTKLEKQFQLLSQSNIQQSDYSAALKQCNREKNRTSSIIPVERSRVGISSLSGEGTDYINASYIMGYYQSNEFIITQHPLLHTIKDFWRMIWDHNAQLVVMIPDGQNMAEDEFVYWPNKDEPINCESFKVTLMAEEHKCLSNEEKLIIQDFILEATQDDYVLEVRHFQCPKWPNPDSPISKTFELISVIKEEAANRDGPMIVHDEHGGVTAGTFCALTTLMHQLEKENSVDVYQVAKMINLMRPGVFADIEQYQFLYKVILSLVSTRQEENPSTSLDSNGAALPDGNIAESLESLV

SEQ ID NO: 60053 - protein, 167 aa, Homo sapiens
MNRPAPVEISYENMRFLITHNPTNATLNKFTEELKKYGVTTLVRVCDATYDKAPVEKEGIHVLDWPFDDGAPPPNQIVDDWLNLLKTKFREEPGCCVAVHCVAGLGRAPVLVALALIECGMKYEDAVQFIRQKRRGAFNSKQLLYLEKYRPKMRLRFRDTNGHCCVQ

SEQ ID NO: 60054 - protein, 82 aa, Homo sapiens
MNRPAPVEISYENMRFLITHNPTNATLNKFTEELKKYGVTTLVRVCDATYDKAPVEKEGIHVLKKKGSVQFQTAALFGEIPT

SEQ ID NO: 60055 - protein, 136 aa, Homo sapiens
MNRPAPVEISYENMRFLITHNPTNATLNKFTEDWPFDDGAPPPNQIVDDWLNLLKTKFREEPGCCVAVHCVAGLGRAPVLVALALIECGMKYEDAVQFIRQKRRGAFNSKQLLYLEKYRPKMRLRFRDTNGHCCVQ

SEQ ID NO: 60056 - protein, 63 aa, Homo sapiens
MNRPAPVEISYENMRFLITHNPTNATLNKFTEELKKYGVTTLVRVCDATYDKAPVEKEGIHVL

SEQ ID NO: 60057 - protein, 22 aa, Homo sapiens
MNRPAPVEISYENMRFLITHNP

SEQ ID NO: 60058 - protein, 173 aa, Homo sapiens
MARMNRPAPVEVSYKHMRFLITHNPTNATLSTFIEDLKKYGATTVVRVCEVTYDKTPLEKDGITVVDWPFDDGAPPPGKVVEDWLSLVKAKFCEAPGSCVAVHCVAGLGRAPVLVALALIESGMKYEDAIQFIRQKRRGAINSKQLTYLEKYRPKQRLRFKDPHTHKTRCCVM

SEQ ID NO: 60059 - protein, 148 aa, Homo sapiens
MARMNRPAPVEVSYKHMRFLITHNPTNATLSTFIEDLKKYGATTVVRVCEVTYDKTPLEKDGITVVDWPFDDGAPPPGKVVEDWLSLVKAKFCEAPGSCVAVHCVAGLGRKRRGAINSKQLTYLEKYRPKQRLRFKDPHTHKTRCCVM

SEQ ID NO: 60060 - protein, 148 aa, Homo sapiens; identical to SEQ ID NO: 60059

SEQ ID NO: 60061 - protein, 173 aa, Homo sapiens; identical to SEQ ID NO: 60058

SEQ ID NO: 60062 - protein, 70 aa, Homo sapiens
MARMNRPAPVEVSYKHMRFLITHNPTNATLSTFIEDLKKYGATTVVRVCEVTYDKTPLEKDGITVVDWPF

SEQ ID NO: 60063 - protein, 780 aa, Homo sapiens
MEQVEILRKFIQRVQAMKSPDHNGEDNFARDFMRLRRLSTKYRTEKIYPTATGEKEENVKKNRYKDILPFDHSRVKLTLKTPSQDSDYINANFIKGVYGPKAYVATQGPLANTVIDFWRMIWEYNVVIIVMACREFEMGRKKCERYWPLYGEDPITFAPFKISCEDEQARTDYFIRTLLLEFQNESRRLYQFHYVNWPDHDVPSSFDSILDMISLMRKYQEHEDVPICIHCSAGCGRTGAICAIDYTWNLLKAGKIPEEFNVFNLIQEMRTQRHSAVQTKEQYELVHRAIAQLFEKQLQLYEIHGAQKIADGVNEINTENMVSSIEPEKQDSPPPKPPRTRSCLVEGDAKEEILQPPEPHPVPPILTPSPPSAFPTVTTVWQDNDRYHPKPVLHMVSSEQHSADLNRNYSKSTELPGKNESTIEQIDKKLERNLSFEIKKVPLQEGPKSFDGNTLLNRGHAIKIKSASPCIADKISKPQELSSDLNVGDTSQNSCVDCSVTQSNKVSVTPPEESQNSDTPPRPDRLPLDEKGHVTWSFHGPENAIPIPDLSEGNSSDINYQTRKTVSLTPSPTTQVETPDLVDHDNTSPLFRTPLSFTNPLHSDDSDSDERNSDGAVTQNKTNISTASATVSAATSTESISTRKVLPMSIARHNIAGTTHSGAEKDVDVSEDSPPPLPERTPESFVLASEHNTPVRSEWSELQSQERSEQKKSEGLITSENEKCDHPAGGIHYEMCIECPPTFSDKREQISENPTEATDIGFGNRCGKPKGPRDPPSEWT

SEQ ID NO: 60064 - protein, 661 aa, Homo sapiens
MIWEYNVVIIVMACREFEMGRKKCERYWPLYGEDPITFAPFKISCEDEQARTDYFIRTLLLEFQNESRRLYQFHYVNWPDHDVPSSFDSILDMISLMRKYQEHEDVPICIHCSAGCGRTGAICAIDYTWNLLKAGKIPEEFNVFNLIQEMRTQRHSAVQTKEQYELVHRAIAQLFEKQLQLYEIHGAQKIADGVNEINTENMVSSIEPEKQDSPPPKPPRTRSCLVEGDAKEEILQPPEPHPVPPILTPSPPSAFPTVTTVWQDNDRYHPKPVLHMVSSEQHSADLNRNYSKSTELPGKNESTIEQIDKKLERNLSFEIKKVPLQEGPKSFDGNTLLNRGHAIKIKSASPCIADKISKPQELSSDLNVGDTSQNSCVDCSVTQSNKVSVTPPEESQNSDTPPRPDRLPLDEKGHVTWSFHGPENAIPIPDLSEGNSSDINYQTRKTVSLTPSPTTQVETPDLVDHDNTSPLFRTPLSFTNPLHSDDSDSDERNSDGAVTQNKTNISTASATVSAATSTESISTRKVLPMSIARHNIAGTTHSGAEKDVDVSEDSPPPLPERTPESFVLASEHNTPVRSEWSELQSQERSEQKKSEGLITSENEKCDHPAGGIHYEMCIECPPTFSDKREQISENPTEATDIGFGNRCGKPKGPRDPPSEWT

SEQ ID NO: 60065 - protein, 543 aa, Homo sapiens
MIWEYNVVIIVMACREFEMGRKKCERYWPLYGEDPITFAPFKISCEDEQARTDYFIRTLLLEFQNESRRLYQFHYVNWPDHDVPSSFDSILDMISLMRKYQEHEDVPICIHCSAGCGRTGAICAIDYTWNLLKAGKIPEEFNVFNLIQEMRTQRHSAVQTKEQYELVHRAIAQLFEKQLQLYEIHGAQKIADGVNEINTENMVSSIEPEKQDSPPPKPPRTRSCLVEGDAKEEILQPPEPHPVPPILTPSPPSAFPTVTTVWQDNDRYHPKPVLHMVSSEQHSADLNRNYSKSTELPGKNESTIEQIDKKLERNLSFEIKKVPLQEGPKSFDGNTLLNRGHAIKIKSASPCIADKISKPQELSSDLNVGDTSQNSCVDCSVTQSNKVSVTPPEESQNSDTPPRPDRLPLDEKGHVTWSFHGPENAIPIPDLSEGNSSDINYQTRKTVSLTPSPTTQVETPDLVDHDNTSPLFRTPLSFTNPLHSDDSDSDERNSDGAVTQNKTNISTASATVSAATSTESISTRKVLPMSIARHNSRNNTFRC

SEQ ID NO: 60066 - protein, 2294 aa, Homo sapiens
MHVSLAEALEVRGGPLQEEEIWAVLNQSAESLQELFRKVSLADPAALGFIISPWSLLLLPSGSVSFTDENISNQDLRAFTAPEVLQNQSLTSLSDVEKIHIYSLGMTLYWGADYEVPQSQPIKLGDHLNSILLGMCEDVIYARVSVRTVLDACSAHIRNSNCAPSFSYVKHLVKLVLGNLSGTDQLSCNSEQKPDRSQAIRDRLRGKGLPTGRSSTSDVLDIQKPPLSHQTFLNKGLSKSMGFLSIKDTQDENYFKDILSDNSGREDSENTFSPYQFKTSGPEKKPIPGIDVLSKKKIWASSMDLLCTADRDFSSGETATYRRCHPEAVTVRTSTTPRKKEARYSDGSIALDIFGPQKMDPIYHTRELPTSSAISSALDRIRERQKKLQVLREAMNVEEPVRRYKTYHGDVFSTSSESPSIISSESDFRQVRRSEASKRFESSSGLPGVDETLSQGQSQRPSRQYETPFEGNLINQEIMLKRQEEELMQLQAKMALRQSRLSLYPGDTIKASMLDITRDPLREIALETAMTQRKLRNFFGPEFVKMTIEPFISLDLPRSILTKKGKNEDNRRKVNIMLLNGQRLELTCDTKTICKDVFDMVVAHIGLVEHHLFALATLKDNEYFFVDPDLKLTKVAPEGWKEEPKKKTKATVNFTLFFRIKFFMDDVSLIQHTLTCHQYYLQLRKDILEERMHCDDETSLLLASLALQAEYGDYQPEVHGVSYFRMEHYLPARVMEKLDLSYIKEELPKLHNTYVGASEKETELEFLKVCQRLTEYGVHFHRVHPEKKSQTGILLGVCSKGVLVFEVHNGVRTLVLRFPWRETKKISFSKKKITLQNTSDGIKHGFQTDNSKICQYLLHLCSYQHKFQLQMRARQSNQDAQDIDVLHKRWSIVSSPEREITLVNLKKDAKYGLGFQIIGGEKMGRLDLGIFISSVAPGGPADLDGCLKPGDRLISVNSVSLEGVSHHAAIEILQNAPEDVTLVISQPKEKISKVPSTPVHLTNEMKNYMKKSSYMQDSAIDSSSKDHHWSRGTLRHISENSFGPSGGLREGSLSSQDSRTESASLSQSQVNGFFASHLGDQTWQESQHGSPSPSVISKATEKETFTDSNQSKTKKPGISDVTDYSDRGDSDMDEATYSSSQDHQTPKQESSSSVNTSNKMNFKTFSSSPPKPGDIFEVELAKNDNSLGISVTGGVNTSVRHGGIYVKAVIPQGAAESDGRIHKGDRVLAVNGVSLEGATHKQAVETLRNTGQVVHLLLEKGQSPTSKEHVPVTPQCTLSDQNAQGQGPEKVKKTTQVKDYSFVTEENTFEVKLFKNSSGLGFSFSREDNLIPEQINASIVRVKKLFPGQPAAESGKIDVGDVILKVNGASLKGLSQQEVISALRGTAPEVFLLLCRPPPGVLPEIDTALLTPLQSPAQVLPNSSKDSSQPSCVEQSTSSDENEMSDKSKKQCKSPSRRDSYSDSSGSGEDDLVTAPANISNSTWSSALHQTLSNMVSQAQSHHEAPKSQEDTICTMFYYPQKIPNKPEFEDSNPSPLPPDMAPGQSYQPQSESASSSSMDKYHIHHISEPTRQENWTPLKNDLENHLEDFELEVELLITLIKSEKGSLGFTVTKGNQRIGCYVHDVIQDPAKSDGRLKPGDRLIKVNDTDVTNMTHTDAVNLLRAASKTVRLVIGRVLELPRIPMLPHLLPDITLTCNKEELGFSLCGGHDSLYQVVYISDINPRSVAAIEGNLQLLDVIHYVNGVSTQGMTLEEVNRALDMSLPSLVLKATRNDLPVVPSSKRSAVSAPKSTKGNGSYSVGSCSQPALTPNDSFSTVAGEEINEISYPKGKCSTYQIKGSPNLTLPKESYIQEDDIYDDSQEAEVIQSLLDVVDEEAQNLLNENNAAGYSCGPGTLKMNGKLSEERTEDTDCDGSPLPEYFTEATKMNGCEEYCEEKVKSESLIQKPQEKKTDDDEITWGNDELPIERTNHEDSDKDHSFLTNDELAVLPVVKVLPSGKYTGANLKSVIRVLRGLLDQGIPSKELENLQELKPLDQCLIGQTKENRRKNRYKNILPYDATRVPLGDEGGYINASFIKIPVGKEEFVYIACQGPLPTTVGDFWQMIWEQKSTVIAMMTQEVEGEKIKCQRYWPNILGKTTMVSNRLRLALVRMQQLKGFVVRAMTLEDIQTREVRHISHLNFTAWPDHDTPSQPDDLLTFISYMRHIHRSGPIITHCSAGIGRSGTLICIDVVLGLISQDLDFDISDLVRCMRLQRHGMVQTEDQYIFCYQVILYVLTRLQAEEEQKQQPQLLK

SEQ ID NO: 60067 - protein, 2434 aa, Homo sapiens
QFLFTKVSLADPAALGFIISPWSLLLLPSGSVSFTDENISNQDLRAFTAPEVLQNQSLTSLSDVEKIHIYSLGMTLYWGADYEVPQSQPIKLGDHLNSILLGMCEDVIYARVSVRTVLDACSAHIRNSNCAPSFSYVKHLVKLVLGNLSGTDQLSCNSEQKPDRSQAIRDRLRGKGLPTGRSSTSDVLDIQKPPLSHQTFLNKGLSKSMGFLSIKDTQDENYFKDILSDNSGREDSENTFSPYQFKTSGPEKKPIPGIDVLSKKKIWASSMDLLCTADRDFSSGETATYRRCHPEAVTVRTSTTPRKKEARYSDGSIALDIFGPQKMDPIYHTRELPTSSAISSALDRIRERQKKLQVLREAMNVEEPVRRYKTYHGDVFSTSSESPSIISSESDFRQVRRSEASKRFESSSGLPGVDETLSQGQSQRPSRQYETPFEGNLINQEIMLKRQEEELMQLQAKMALRQSRLSLYPGDTIKASMLDITRDPLREIALETAMTQRKLRNFFGPEFVKMTIEPFISLDLPRSILTKKGKNEDNRRKVNIMLLNGQRLELTCDTKTICKDVFDMVVAHIGLVEHHLFALATLKDNEYFFVDPDLKLTKVAPEGWKEEPKKKTKATVNFTLFFRIKFFMDDVSLIQHTLTCHQYYLQLRKDILEERMHCDDETSLLLASLALQAEYGDYQPEVHGVSYFRMEHYLPARVMEKLDLSYIKEELPKLHNTYVGASEKETELEFLKVCQRLTEYGVHFHRVHPEKKSQTGILLGVCSKGVLVFEVHNGVRTLVLRFPWRETKKISFSKKKITLQNTSDGIKHGFQTDNSKICQYLLHLCSYQHKFQLQMRARQSNQDAQDIERASFRSLNLQAESVRGFNMGRAISTGSLASSTLNKLAVRPLSVQAEILKRLSCSELSLYQPLQNSSKEKNDKASWEEKPREMSKSYHDLSQASLYPHRKNVIVNMEPPPQTVAELVGKPSHQMSRSDAESLAGVTKLNNSKSVASLNRSPERRKHESDSSSIEDPGQAYVLDVLHKRWSIVSSPEREITLVNLKKDAKYGLGFQIIGGEKMGRLDLGIFISSVAPGGPADLDGCLKPGDRLISVNSVSLEGVSHHAAIEILQNAPEDVTLVISQPKEKISKVPSTPVHLTNEMKNYMKKSSYMQDSAIDSSSKDHHWSRGTLRHISENSFGPSGGLREGSLSSQDSRTESASLSQSQVNGFFASHLGDQTWQESQHGSPSPSVISKATEKETFTDSNQSKTKKPGISDVTDYSDRGDSDMDEATYSSSQDHQTPKQESSSSVNTSNKMNFKTFSSSPPKPGDIFEVELAKNDNSLGISVTGGVNTSVRHGGIYVKAVIPQGAAESDGRIHKGDRVLAVNGVSLEGATHKQAVETLRNTGQVVHLLLEKGQSPTSKEHVPVTPQCTLSDQNAQGQGPEKVKKTTQVKDYSFVTEENTFEVKLFKNSSGLGFSFSREDNLIPEQINASIVRVKKLFPGQPAAESGKIDVGDVILKVNGASLKGLSQQEVISALRGTAPEVFLLLCRPPPGVLPEIDTALLTPLQSPAQVLPNSSKDSSQPSCVEQSTSSDENEMSDKSKKQCKSPSRRDSYSDSSGSGEDDLVTAPANISNSTWSSALHQTLSNMVSQAQSHHEAPKSQEDTICTMFYYPQKIPNKPEFEDSNPSPLPPDMAPGQSYQPQSESASSSSMDKYHIHHISEPTRQENWTPLKNDLENHLEDFELEVELLITLIKSEKGSLGFTVTKGNQRIGCYVHDVIQDPAKSDGRLKPGDRLIKVNDTDVTNMTHTDAVNLLRAASKTVRLVIGRVLELPRIPMLPHLLPDITLTCNKEELGFSLCGGHDSLYQVVYISDINPRSVAAIEGNLQLLDVIHYVNGVSTQGMTLEEVNRALDMSLPSLVLKATRNDLPVVPSSKRSAVSAPKSTKGNGSYSVGSCSQPALTPNDSFSTVAGEEINEISYPKGKCSTYQIKGSPNLTLPKESYIQEDDIYDDSQEAEVIQSLLDVVDEEAQNLLNENNAAGYSCGPGTLKMNGKLSEERTEDTDCDGSPLPEYFTEATKMNGCEEYCEEKVKSESLIQKPQEKKTDDDEITWGNDELPIERTNHEDSDKDHSFLTNDELAVLPVVKVLPSGKYTGANLKSVIRVLRGLLDQGIPSKELENLQELKPLDQCLIGQTKENRRKNRYKNILPYDATRVPLGDEGGYINASFIKIPVGKEEFVYIACQGPLPTTVGDFWQMIWEQKSTVIAMMTQEVEGEKIKCQRYWPNILGKTTMVSNRLRLALVRMQQLKGFVVRAMTLEDIQTREVRHISHLNFTAWPDHDTPSQPDDLLTFISYMRHIHRSGPIITHCSAGIGRSGTLICIDVVLGLISQDLDFDISDLVRCMRLQRHGMVQTEDQYIFCYQVILYVLTRLQAEEEQKQQPQLLK

SEQ ID NO: 60068 - protein, 2485 aa, Homo sapiens
MHVSLAEALEVRGGPLQEEEIWAVLNQSAESLQELFRKVSLADPAALGFIISPWSLLLLPSGSVSFTDENISNQDLRAFTAPEVLQNQSLTSLSDVEKIHIYSLGMTLYWGADYEVPQSQPIKLGDHLNSILLGMCEDVIYARVSVRTVLDACSAHIRNSNCAPSFSYVKHLVKLVLGNLSGTDQLSCNSEQKPDRSQAIRDRLRGKGLPTGRSSTSDVLDIQKPPLSHQTFLNKGLSKSMGFLSIKDTQDENYFKDILSDNSGREDSENTFSPYQFKTSGPEKKPIPGIDVLSKKKIWASSMDLLCTADRDFSSGETATYRRCHPEAVTVRTSTTPRKKEARYSDGSIALDIFGPQKMDPIYHTRELPTSSAISSALDRIRERQKKLQVLREAMNVEEPVRRYKTYHGDVFSTSSESPSIISSESDFRQVRRSEASKRFESSSGLPGVDETLSQGQSQRPSRQYETPFEGNLINQEIMLKRQEEELMQLQAKMALRQSRLSLYPGDTIKASMLDITRDPLREIALETAMTQRKLRNFFGPEFVKMTIEPFISLDLPRSILTKKGKNEDNRRKVNIMLLNGQRLELTCDTKTICKDVFDMVVAHIGLVEHHLFALATLKDNEYFFVDPDLKLTKVAPEGWKEEPKKKTKATVNFTLFFRIKFFMDDVSLIQHTLTCHQYYLQLRKDILEERMHCDDETSLLLASLALQAEYGDYQPEVHGVSYFRMEHYLPARVMEKLDLSYIKEELPKLHNTYVGASEKETELEFLKVCQRLTEYGVHFHRVHPEKKSQTGILLGVCSKGVLVFEVHNGVRTLVLRFPWRETKKISFSKKKITLQNTSDGIKHGFQTDNSKICQYLLHLCSYQHKFQLQMRARQSNQDAQDIERASFRSLNLQAESVRGFNMGRAISTGSLASSTLNKLAVRPLSVQAEILKRLSCSELSLYQPLQNSSKEKNDKASWEEKPREMSKSYHDLSQASLYPHRKNVIVNMEPPPQTVAELVGKPSHQMSRSDAESLAGVTKLNNSKSVASLNRSPERRKHESDSSSIEDPGQAYVLGMTMHSSGNSSSQVPLKENDVLHKRWSIVSSPEREITLVNLKKDAKYGLGFQIIGGEKMGRLDLGIFISSVAPGGPADLDGCLKPGDRLISVNSVSLEGVSHHAAIEILQNAPEDVTLVISQPKEKISKVPSTPVHLTNEMKNYMKKSSYMQDSAIDSSSKDHHWSRGTLRHISENSFGPSGGLREGSLSSQDSRTESASLSQSQVNGFFASHLGDQTWQESQHGSPSPSVISKATEKETFTDSNQSKTKKPGISDVTDYSDRGDSDMDEATYSSSQDHQTPKQESSSSVNTSNKMNFKTFSSSPPKPGDIFEVELAKNDNSLGISVTGGVNTSVRHGGIYVKAVIPQGAAESDGRIHKGDRVLAVNGVSLEGATHKQAVETLRNTGQVVHLLLEKGQSPTSKEHVPVTPQCTLSDQNAQGQGPEKVKKTTQVKDYSFVTEENTFEVKLFKNSSGLGFSFSREDNLIPEQINASIVRVKKLFPGQPAAESGKIDVGDVILKVNGASLKGLSQQEVISALRGTAPEVFLLLCRPPPGVLPEIDTALLTPLQSPAQVLPNSSKDSSQPSCVEQSTSSDENEMSDKSKKQCKSPSRRDSYSDSSGSGEDDLVTAPANISNSTWSSALHQTLSNMVSQAQSHHEAPKSQEDTICTMFYYPQKIPNKPEFEDSNPSPLPPDMAPGQSYQPQSESASSSSMDKYHIHHISEPTRQENWTPLKNDLENHLEDFELEVELLITLIKSEKGSLGFTVTKGNQRIGCYVHDVIQDPAKSDGRLKPGDRLIKVNDTDVTNMTHTDAVNLLRAASKTVRLVIGRVLELPRIPMLPHLLPDITLTCNKEELGFSLCGGHDSLYQVVYISDINPRSVAAIEGNLQLLDVIHYVNGVSTQGMTLEEVNRALDMSLPSLVLKATRNDLPVVPSSKRSAVSAPKSTKGNGSYSVGSCSQPALTPNDSFSTVAGEEINEISYPKGKCSTYQIKGSPNLTLPKESYIQEDDIYDDSQEAEVIQSLLDVVDEEAQNLLNENNAAGYSCGPGTLKMNGKLSEERTEDTDCDGSPLPEYFTEATKMNGCEEYCEEKVKSESLIQKPQEKKTDDDEITWGNDELPIERTNHEDSDKDHSFLTNDELAVLPVVKVLPSGKYTGANLKSVIRVLRGLLDQGIPSKELENLQELKPLDQCLIGQTKENRRKNRYKNILPYDATRVPLGDEGGYINASFIKIPVGKEEFVYIACQGPLPTTVGDFWQMIWEQKSTVIAMMTQEVEGEKIKCQRYWPNILGKTTMVSNRLRLALVRMQQLKGFVVRAMTLEDIQTREVRHISHLNFTAWPDHDTPSQPDDLLTFISYMRHIHRSGPIITHCSAGIGRSGTLICIDVVLGLISQDLDFDISDLVRCMRLQRHGMVQTEDQYIFCYQVILYVLTRLQAEEEQKQQPQLLK

SEQ ID NO: 60069 - protein, 2466 aa, Homo sapiens
MHVSLAEALEVRGGPLQEEEIWAVLNQSAESLQELFRKVSLADPAALGFIISPWSLLLLPSGSVSFTDENISNQDLRAFTAPEVLQNQSLTSLSDVEKIHIYSLGMTLYWGADYEVPQSQPIKLGDHLNSILLGMCEDVIYARVSVRTVLDACSAHIRNSNCAPSFSYVKHLVKLVLGNLSGTDQLSCNSEQKPDRSQAIRDRLRGKGLPTGRSSTSDVLDIQKPPLSHQTFLNKGLSKSMGFLSIKDTQDENYFKDILSDNSGREDSENTFSPYQFKTSGPEKKPIPGIDVLSKKKIWASSMDLLCTADRDFSSGETATYRRCHPEAVTVRTSTTPRKKEARYSDGSIALDIFGPQKMDPIYHTRELPTSSAISSALDRIRERQKKLQVLREAMNVEEPVRRYKTYHGDVFSTSSESPSIISSESDFRQVRRSEASKRFESSSGLPGVDETLSQGQSQRPSRQYETPFEGNLINQEIMLKRQEEELMQLQAKMALRQSRLSLYPGDTIKASMLDITRDPLREIALETAMTQRKLRNFFGPEFVKMTIEPFISLDLPRSILTKKGKNEDNRRKVNIMLLNGQRLELTCDTKTICKDVFDMVVAHIGLVEHHLFALATLKDNEYFFVDPDLKLTKVAPEGWKEEPKKKTKATVNFTLFFRIKFFMDDVSLIQHTLTCHQYYLQLRKDILEERMHCDDETSLLLASLALQAEYGDYQPEVHGVSYFRMEHYLPARVMEKLDLSYIKEELPKLHNTYVGASEKETELEFLKVCQRLTEYGVHFHRVHPEKKSQTGILLGVCSKGVLVFEVHNGVRTLVLRFPWRETKKISFSKKKITLQNTSDGIKHGFQTDNSKICQYLLHLCSYQHKFQLQMRARQSNQDAQDIERASFRSLNLQAESVRGFNMGRAISTGSLASSTLNKLAVRPLSVQAEILKRLSCSELSLYQPLQNSSKEKNDKASWEEKPREMSKSYHDLSQASLYPHRKNVIVNMEPPPQTVAELVGKPSHQMSRSDAESLAGVTKLNNSKSVASLNRSPERRKHESDSSSIEDPGQAYVLDVLHKRWSIVSSPEREITLVNLKKDAKYGLGFQIIGGEKMGRLDLGIFISSVAPGGPADLDGCLKPGDRLISVNSVSLEGVSHHAAIEILQNAPEDVTLVISQPKEKISKVPSTPVHLTNEMKNYMKKSSYMQDSAIDSSSKDHHWSRGTLRHISENSFGPSGGLREGSLSSQDSRTESASLSQSQVNGFFASHLGDQTWQESQHGSPSPSVISKATEKETFTDSNQSKTKKPGISDVTDYSDRGDSDMDEATYSSSQDHQTPKQESSSSVNTSNKMNFKTFSSSPPKPGDIFEVELAKNDNSLGISVTGGVNTSVRHGGIYVKAVIPQGAAESDGRIHKGDRVLAVNGVSLEGATHKQAVETLRNTGQVVHLLLEKGQSPTSKEHVPVTPQCTLSDQNAQGQGPEKVKKTTQVKDYSFVTEENTFEVKLFKNSSGLGFSFSREDNLIPEQINASIVRVKKLFPGQPAAESGKIDVGDVILKVNGASLKGLSQQEVISALRGTAPEVFLLLCRPPPGVLPEIDTALLTPLQSPAQVLPNSSKDSSQPSCVEQSTSSDENEMSDKSKKQCKSPSRRDSYSDSSGSGEDDLVTAPANISNSTWSSALHQTLSNMVSQAQSHHEAPKSQEDTICTMFYYPQKIPNKPEFEDSNPSPLPPDMAPGQSYQPQSESASSSSMDKYHIHHISEPTRQENWTPLKNDLENHLEDFELEVELLITLIKSEKGSLGFTVTKGNQRIGCYVHDVIQDPAKSDGRLKPGDRLIKVNDTDVTNMTHTDAVNLLRAASKTVRLVIGRVLELPRIPMLPHLLPDITLTCNKEELGFSLCGGHDSLYQVVYISDINPRSVAAIEGNLQLLDVIHYVNGVSTQGMTLEEVNRALDMSLPSLVLKATRNDLPVVPSSKRSAVSAPKSTKGNGSYSVGSCSQPALTPNDSFSTVAGEEINEISYPKGKCSTYQIKGSPNLTLPKESYIQEDDIYDDSQEAEVIQSLLDVVDEEAQNLLNENNAAGYSCGPGTLKMNGKLSEERTEDTDCDGSPLPEYFTEATKMNGCEEYCEEKVKSESLIQKPQEKKTDDDEITWGNDELPIERTNHEDSDKDHSFLTNDELAVLPVVKVLPSGKYTGANLKSVIRVLRGLLDQGIPSKELENLQELKPLDQCLIGQTKENRRKNRYKNILPYDATRVPLGDEGGYINASFIKIPVGKEEFVYIACQGPLPTTVGDFWQMIWEQKSTVIAMMTQEVEGEKIKCQRYWPNILGKTTMVSNRLRLALVRMQQLKGFVVRAMTLEDIQTREVRHISHLNFTAWPDHDTPSQPDDLLTFISYMRHIHRSGPIITHCSAGIGRSGTLICIDVVLGLISQDLDFDISDLVRCMRLQRHGMVQTEDQYIFCYQVILYVLTRLQAEEEQKQQPQLLK

SEQ ID NO: 60070 - protein, 2490 aa, Homo sapiens
MHVSLAEALEVRGGPLQEEEIWAVLNQSAESLQELFRKVSLADPAALGFIISPWSLLLLPSGSVSFTDENISNQDLRAFTAPEVLQNQSLTSLSDVEKIHIYSLGMTLYWGADYEVPQSQPIKLGDHLNSILLGMCEDVIYARVSVRTVLDACSAHIRNSNCAPSFSYVKHLVKLVLGNLSGTDQLSCNSEQKPDRSQAIRDRLRGKGLPTGRSSTSDVLDIQKPPLSHQTFLNKGLSKSMGFLSIKDTQDENYFKDILSDNSGREDSENTFSPYQFKTSGPEKKPIPGIDVLSKKKIWASSMDLLCTADRDFSSGETATYRRCHPEAVTVRTSTTPRKKEARYSDGSIALDIFGPQKMDPIYHTRELPTSSAISSALDRIRERQKKLQVLREAMNVEEPVRRYKTYHGDVFSTSSESPSIISSESDFRQVRRSEASKRFESSSGLPGVDETLSQGQSQRPSRQYETPFEGNLINQEIMLKRQEEELMQLQAKMALRQSRLSLYPGDTIKASMLDITRDPLREIALETAMTQRKLRNFFGPEFVKMTIEPFISLDLPRSILTKKGKNEDNRRKVNIMLLNGQRLELTCDTKTICKDVFDMVVAHIGLVEHHLFALATLKDNEYFFVDPDLKLTKVAPEGWKEEPKKKTKATVNFTLFFRIKFFMDDVSLIQHTLTCHQYYLQLRKDILEERMHCDDETSLLLASLALQAEYGDYQPEVHGVSYFRMEHYLPARVMEKLDLSYIKEELPKLHNTYVGASEKETELEFLKVCQRLTEYGVHFHRVHPEKKSQTGILLGVCSKGVLVFEVHNGVRTLVLRFPWRETKKISFSKKKITLQNTSDGIKHGFQTDNSKICQYLLHLCSYQHKFQLQMRARQSNQDAQDIERASFRSLNLQAESVRGFNMGRAISTGSLASSTLNKLAVRPLSVQAEILKRLSCSELSLYQPLQNSSKEKNDKASWEEKPREMSKSYHDLSQASLYPHRKNVIVNMEPPPQTVAELVGKPSHQMSRSDAESLAGVTKLNNSKSVASLNRSPERRKHESDSSSIEDPGQAYVLGMTMHSSGNSSSQVPLKENDVLHKRWSIVSSPEREITLVNLKKDAKYGLGFQIIGGEKMGRLDLGIFISSVAPGGPADLDGCLKPGDRLISVNSVSLEGVSHHAAIEILQNAPEDVTLVISQPKEKISKVPSTPVHLTNEMKNYMKKSSYMQDSAIDSSSKDHHWSRGTLRHISENSFGPSGGLREGSLSSQDSRTESASLSQSQVNGFFASHLGDQTWQESQHGSPSPSVISKATEKETFTDSNQSKTKKPGISDVTDYSDRGDSDMDEATYSSSQDHQTPKQESSSSVNTSNKMNFKTFSSSPPKPGDIFEVELAKNDNSLGISVTVLFDKGGVNTSVRHGGIYVKAVIPQGAAESDGRIHKGDRVLAVNGVSLEGATHKQAVETLRNTGQVVHLLLEKGQSPTSKEHVPVTPQCTLSDQNAQGQGPEKVKKTTQVKDYSFVTEENTFEVKLFKNSSGLGFSFSREDNLIPEQINASIVRVKKLFPGQPAAESGKIDVGDVILKVNGASLKGLSQQEVISALRGTAPEVFLLLCRPPPGVLPEIDTALLTPLQSPAQVLPNSSKDSSQPSCVEQSTSSDENEMSDKSKKQCKSPSRRDSYSDSSGSGEDDLVTAPANISNSTWSSALHQTLSNMVSQAQSHHEAPKSQEDTICTMFYYPQKIPNKPEFEDSNPSPLPPDMAPGQSYQPQSESASSSSMDKYHIHHISEPTRQENWTPLKNDLENHLEDFELEVELLITLIKSEKGSLGFTVTKGNQRIGCYVHDVIQDPAKSDGRLKPGDRLIKVNDTDVTNMTHTDAVNLLRAASKTVRLVIGRVLELPRIPMLPHLLPDITLTCNKEELGFSLCGGHDSLYQVVYISDINPRSVAAIEGNLQLLDVIHYVNGVSTQGMTLEEVNRALDMSLPSLVLKATRNDLPVVPSSKRSAVSAPKSTKGNGSYSVGSCSQPALTPNDSFSTVAGEEINEISYPKGKCSTYQIKGSPNLTLPKESYIQEDDIYDDSQEAEVIQSLLDVVDEEAQNLLNENNAAGYSCGPGTLKMNGKLSEERTEDTDCDGSPLPEYFTEATKMNGCEEYCEEKVKSESLIQKPQEKKTDDDEITWGNDELPIERTNHEDSDKDHSFLTNDELAVLPVVKVLPSGKYTGANLKSVIRVLRGLLDQGIPSKELENLQELKPLDQCLIGQTKENRRKNRYKNILPYDATRVPLGDEGGYINASFIKIPVGKEEFVYIACQGPLPTTVGDFWQMIWEQKSTVIAMMTQEVEGEKIKCQRYWPNILGKTTMVSNRLRLALVRMQQLKGFVVRAMTLEDIQTREVRHISHLNFTAWPDHDTPSQPDDLLTFISYMRHIHRSGPIITHCSAGIGRSGTLICIDVVLGLISQDLDFDISDLVRCMRLQRHGMVQTEDQYIFCYQVILYVLTRLQAEEEQKQQPQLLK

SEQ ID NO: 60071 - protein, 139 aa, Homo sapiens
MHVSLAEALEVRGGPLQEEEIWAVLNQSAESLQELFRKVSLADPAALGFIISPWSLLLLPSGSVSFTDENISNQDLRAFTAPEVLQNQSLTSLSDVEKIHIYSLGMTLYWGADYEVPQSQPIKLGDHLNSILLGMCEDV

SEQ ID NO: 60072 - protein, 2490 aa, Homo sapiens; identical to SEQ ID NO: 60070

SEQ ID NO: 60073 - protein, 1187 aa, Homo sapiens
MPFGLKLRRTRRYNVLSKNCFVTRIRLLDSNVIECTLSVESTGQECLEAVAQRLELRETHYFGLWFLSKSQQARWVELEKPLKKHLDKFANEPLLFFGVMFYVPNVSWLQQEATRYQYYLQVKKDVLEGRLRCTLDQVIRLAGLAVQADFGDYNQFDSQDFLREYVLFPMDLALEEAVLEELTQKVAQEHKAHSGILPAEAELMYINEVERLDGFGQEIFPVKDNHGNCVHLGIFFMGIFVRNRIGRQAVIYRWNDMGNITHNKSTILVELINKEETALFHTDDIENAKYISRLFATRHKFYKQNKICTEQSNSPPPIRRQPTWSRSSLPRQQPYILPPVHVQCGEHYSETHTSQDSIFHGNEEALYCNSHNSLDLNYLNGTVTNGSVCSVHSVNSLNCSQSFIQASPVSSNLSIPGSDIMRADYIPSHRHSAIIVPSYRPTPDYETVMRQMKRGILHTDSQSQSLRNLNIINTHAYNQPEDLVYSQPEMRERHPYTVPYGPQGVYSNKLVSPSDQRNPKNNVVPSKPGASAISHTVSTPELANMQLQGSHNYSTAHMLKNYLFRPPPPYPRPRPATSTPDLASHRHKYVSGSSPDLVTRKVQLSVKTFQEDSSPVVHQSLQEVSEPLTATKHHGTVNKRHSLEVMNSMVRGMEAMTLKSLHLPMARRNTLREQGPPEEGSGSHEVPQLPQYHHKKTFSDATMLIHSSESEEEEEEAPESVPQIPMLREKMEYSAQLQAALARIPNKPPPEYPGPRKSVSNGALRQDQASLPPAMARARVLRHGPAKAISMSRTDPPAVNGASLGPSISEPDLTSVKERVKKEPVKERPVSEMFSLEDSIIEREMMIRNLEKQKMAGLEAQKRPLMLAALNGLSVARVSGREENRVDATRVPMDERFRTLKKKLEEGMVFTEYEQIPKKKANGIFSTAALPENAERSRIREVVPYEENRVELIPTKENNTGYINASHIKVVVGGAEWHYIATQGPLPHTCHDFWQMVWEQGVNVIAMVTAEEEGGRTKSHRYWPKLGSKHSSATYGKFKVTTKFRTDSVCYATTGLKVKHLLSGQERTVWHLQYTDWPDHGCPEDVQGFLSYLEEIQSVRRHTNSMLEGTKNRHPPIVVHCSAGVGRTGVLILSELMIYCLEHNEKVEVPMMLRLLREQRMFMIQTIAQYKFVYQVLIQFLQNSRLI

SEQ ID NO: 60074 - protein, 211 aa, Homo sapiens
MPFGLKLRRTRRYNVLSKNCFVTRIRLLDSNVIECTLSVESTGQECLEAVAQRLELRETHYFGLWFLSKSQQARWVELEKPLKKHLDKFANEPLLFFGVMFYVPNVSWLQQEATRYQYYLQVKKDVLEGRLRCTLDQVIRLAGLAVQADFGDYNQFDSQDFLREYVLFPMDLALEEAVLEELTQKVAQEHKAHRTIMETVYTLAFSLWGFS

SEQ ID NO: 60075 - protein, 460 aa, Homo sapiens
MSRSLDSARSFLERLEARGGREGAVLAGEFSDIQACSAAWKADGVCSTVAGSRPENVRKNRYKDVLPYDQTRVILSLLQEEGHSDYINGNFIRGVDGSLAYIATQGPLPHTLLDFWRLVWEFGVKVILMACREIENGRKRCERYWAQEQEPLQTGLFCITLIKEKWLNEDIMLRTLKVTFQKESRSVYQLQYMSWPDRGVPSSPDHMLAMVEEARRLQGSGPEPLCVHCSAGCGRTGVLCTVDYVRQLLLTQMIPPDFSLFDVVLKMRKQRPAAVQTEEQYRFLYHTVAQMFCSTLQNASPHYQNIKENCAPLYDDALFLRTPQALLAIPRPPGGVLRSISVPGSPGHAMADTYAVVQKRGAPAGAGSGTQTGTGTGTGARSAEEAPLYSKVTPRAQRPGAHAEDARGTLPGRVPADQSPAGSGAYEDVAGGAQTGGLGFNLRIGRPKGPRDPPAEWTRV

SEQ ID NO: 60076 - protein, 415 aa, Homo sapiens
MPTTIEREFEELDTQRRWQPLYLEIRNESHDYPHRVAKFPENRNRNRYRDVSPYDHSRVKLQNAENDYINASLVDIEEAQRSYILTQGPLPNTCCHFWLMVWQQKTKAVVMLNRIVEKESVKCAQYWPTDDQEMLFKETGFSVKLLSEDVKSYYTVHLLQLENINSGETRTISHFHYTTWPDFGVPESPASFLNFLFKVRESGSLNPDHGPAVIHCSAGIGRSGTFSLVDTCLVLMEKGDDINIKQVLLNMRKYRMGLIQTPDQLRFSYMAIIEGAKCIKGDSSIQKRWKELSKEDLSPAFDHSPNKIMTEKYNGNRIGLEEEKLTGDRCTGLSSKMQDTMEENSESALRKRIREDRKATTAQKVQQMKQRLNENERKRKRWLYWQPILTKMGFMSVILVGAFVGWTLFFQQNAL

SEQ ID NO: 60077 - protein, 387 aa, Homo sapiens
MPTTIEREFEELDTQRRWQPLYLEIRNESHDYPHRVAKFPENRNRNRYRDVSPYDHSRVKLQNAENDYINASLVDIEEAQRSYILTQGPLPNTCCHFWLMVWQQKTKAVVMLNRIVEKESVKCAQYWPTDDQEMLFKETGFSVKLLSEDVKSYYTVHLLQLENINSGETRTISHFHYTTWPDFGVPESPASFLNFLFKVRESGSLNPDHGPAVIHCSAGIGRSGTFSLVDTCLVLMEKGDDINIKQVLLNMRKYRMGLIQTPDQLRFSYMAIIEGAKCIKGDSSIQKRWKELSKEDLSPAFDHSPNKIMTEKYNGNRIGLEEEKLTGDRCTGLSSKMQDTMEENSESALRKRIREDRKATTAQKVQQMKQRLNENERKRKRPRLTDT

SEQ ID NO: 60078 - protein, 392 aa, Homo sapiens
CQQEFRMYGKDGKGTNWMDQGDMECRMQEIDDHSRVKLQNAENDYINASLVDIEEAQRSYILTQGPLPNTCCHFWLMVWQQKTKAVVMLNRIVEKESVKCAQYWPTDDQEMLFKETGFSVKLLSEDVKSYYTVHLLQLENINSGETRTISHFHYTTWPDFGVPESPASFLNFLFKVRESGSLNPDHGPAVIHCSAGIGRSGTFSLVDTCLVLMEKGDDINIKQVLLNMRKYRMGLIQTPDQLRFSYMAIIEGAKCIKGDSSIQKRWKELSKEDLSPAFDHSPNKIMTEKYNGNRIGLEEEKLTGDRCTGLSSKMQDTMEENSESALRKRIREDRKATTAQKVQQMKQRLNENERKRKRWLYWQPILTKMGFMSVILVGAFVGWTLFFQQNAL

SEQ ID NO: 60079 - protein, 353 aa, Homo sapiens
MPTTIEREFEELDTQRRWQPLYLEIRNESHDYPHRVAKFPENRNRNRYRDVSPYDHSRVKLQNAENDYINASLVDIEEAQRSYILTQGPLPNTCCHFWLMVWQQKTKAVVMLNRIVEKESVKCAQYWPTDDQEMLFKETGFSVKLLSEDVKSYYTVHLLQLENINSGETRTISHFHYTTWPDFGVPESPASFLNFLFKVRESGSLNPDHGPAVIHCSAGIGRSGTFSLVDTCLVLMEKGDDINIKQVLLNMRKYRMGLIQTPDQLRFSYMAIIEGAKCIKGDSSIQKRWKELSKEDLSPAFDHSPNKIMTEKYNGNRIGLEEEKLTGDRCTGLSSKMQDTMEENSERPRLTDT

SEQ ID NO: 60080 - protein, 807 aa, Homo sapiens
MDQREILQKFLDEAQSKKITKEEFANEFLKLKRQSTKYKADKTYPTTVAEKPKNIKKNRYKDILPYDYSRVELSLITSDEDSSYINANFIKGVYGPKAYIATQGPLSTTLLDFWRMIWEYSVLIIVMACMEYEMGKKKCERYWAEPGEMQLEFGPFSVSCEAEKRKSDYIIRTLKVKFNSETRTIYQFHYKNWPDHDVPSSIDPILELIWDVRCYQEDDSVPICIHCSAGCGRTGVICAIDYTWMLLKDGIIPENFSVFSLIREMRTQRPSLVQTQEQYELVYNAVLELFKRQMDVIRDKHSGTESQAKHCIPEKNHTLQADSYSPNLPKSTTKAAKMMNQQRTKMEIKESSSFDFRTSEISAKEELVLHPAKSSTSFDFLELNYSFDKNADTTMKWQTKAFPIVGEPLQKHQSLDLGSLLFEGCSNSKPVNAAGRYFNSKVPITRTKSTPFELIQQRETKEVDSKENFSYLESQPHDSCFVEMQAQKVMHVSSAELNYSLPYDSKHQIRNASNVKHHDSSALGVYSYIPLVENPYFSSWPPSGTSSKMSLDLPEKQDGTVFPSSLLPTSSTSLFSYYNSHDSLSLNSPTNISSLLNQESAVLATAPRIDDEIPPPLPVWTPESFIVVEEAGEFSPNVPKSLSSAVKVKIGTSLEWGGTSEPKKFDDSVILRPSKSVKLRSPKSELHQDRSSPPPPLPERTLESFFLADEDCMQAQSIETYSTSYPDTMENSTSSKQTLKTPGKSFTRSKSLKILRNMKKSICNSCPPNKPAESVQSNNSSSFLNFGFANRFSKPKGPRNPPPTWNI

SEQ ID NO: 60081 - protein, 563 aa, Homo sapiens [sequence omitted]

SEQ ID NO: 60082 - protein, 1636 aa, Homo sapiens
MEAVPRMPMIWLDLKEAGDFHFQPAVKKFVLKNYGENPEAYNEELKKLELLRQNAVRVPRDFEGCSVLRKYLGQLHYLQSRVPMGSGQEAAVPVTWTEIFSGKSVAHEDIKYEQACILYNLGALHSMLGAMDKRVSEEGMKVSCTHFQCAAGAFAYLREHFPQAYSVDMSRQILTLNVNLMLGQAQECLLEKSMLDNRKSFLVARISAQVVDYYKEACRALENPDTASLLGRIQKDWKKLVQMKIYYFAAVAHLHMGKQAEEQQKFGERVAYFQSALDKLNEAIKLAKGQPDTVQDALRFTMDVIGGKYNSAKKDNDFIYHEAVPALDTLQPVKGAPLVKPLPVNPTDPAVTGPDIFAKLVPMAAHEASSLYSEEKAKLLREMMAKIEDKNEVLDQFMDSMQLDPETVDNLDAYSHIPPQLMEKCAALSVRPDTVRNLVQSMQVLSGVFTDVEASLKDIRDLLEEDELLEQKFQEAVGQAGAISITSKAELAEVRREWAKYMEVHEKASFTNSELHRAMNLHVGNLRLLSGPLDQVRAALPTPALSPEDKAVLQNLKRILAKVQEMRDQRVSLEQQLRELIQKDDITASLVTTDHSEMKKLFEEQLKKYDQLKVYLEQNLAAQDRVLCALTEANVQYAAVRRVLSDLDQKWNSTLQTLVASYEAYEDLMKKSQEGRDFYADLESKVAALLERTQSTCQAREAARQQLLDRELKKKPPPRPTAPKPLLPRREESEAVEAGDPPEELRSLPPDMVAGPRLPDTFLGSATPLHFPPSPFPSSTGPGPHYLSGPLPPGTYSGPTQLIQPRAPGPHAMPVAPGPALYPAPAYTPELGLVPRSSPQHGVVSSPYVGVGPAPPVAGLPSAPPPQFSGPELAMAVRPATTTVDSIQAPIPSHTAPRPNPTPAPPPPCFPVPPPQPLPTPYTYPAGAKQPIPAQHHFSSGIPAGFPAPRIGPQPQPHPQPHPSQAFGPQPPQQPLPLQHPHLFPPQAPGLLPPQSPYPYAPQPGVLGQPPPPLHTQLYPGPAQDPLPAHSGALPFPSPGPPQPPHPPLAYGPAPSTRPMGPQAAPLTIRGPSSAGQSTPSPHLVPSPAPSPGPGPVPPRPPAAEPPPCLRRGAAAADLLSSSPESQHGGTQSPGGGQPLLQPTKVDAAEGRRPQALRLIERDPYEHPERLRQLQQELEAFRGQLGDVGALDTVWRELQDAQEHDARGRSIAIARCYSLKNRHQDVMPYDSNRVVLRSGKDDYINASCVEGLSPYCPPLVATQAPLPGTAADFWLMVHEQKVSVIVMLVSEAEMEKQKVARYFPTERGQPMVHGALSLALSSVRSTETHVERVLSLQFRDQSLKRSLVHLHFPTWPELGLPDSPSNLLRFIQEVHAHYLHQRPLHTPIIVHCSSGVGRTGAFALLYAAVQEVEAGNGIPELPQLVRRMRQQRKHMLQEKLHLRFCYEAVVRHVEQVLQRHGVPPPCKPLASASISQKNHLPQDSQDLVLGGDVPISSIQATIAKLSIRPPGGLESPVASLPGPAEPPGLPPASLPESTPIPSSSPPPLSSPLPEAPQPKEEPPVPEAPSSGPPSSSLELLASLTPEAFSLDSSLRGKQRMSKHNFLQAHNGQGLRATRPSDDPLSLLDPLWTLNKT

SEQ ID NO: 60083 - protein, 912 aa, Homo sapiens
MEAVPRMPMIWLDLKEAGDFHFQPAVKKNAVRVPRDFEGCSVLRKYLGQLHYLQSRVPMGSGQEAAVPVTWTEIFSGKSVAHEDIKYEQACILYNLGALHSMLGAMDKRVSEECAAGAFAYLREHFPQAYSVDMSRQILTLNVNLMLGQAQECLLEKSMLDNRKSFLVARISAQVVDYYKEACRALENPDTASLLGRIQKDWKKLVQMKIYYFAAVAHLHMGKQAEEQQKFGERVAYFQSALDKLNEAIKLAKGQPDTVQDALRFTMDVIGGKYNSAKKDNDFIYHEAVPALDTLQPVKGAPLVKPLPVNPTDPAVTGPDIFAKLVPMAAHEASSLYSEEKAKLLREMMAKIEDKNEVLDQFMDSMQLDPETVDNLDAYSHIPPQLMEKCAALSVRPDTVRNLVQSMQVLSGVFTDVEASLKDIRDLLEEDELLEQKFQEAVGQAGAISITSKAELAEVRREWAKYMEVHEKASFTNSELHRAMNLHVGNLRLLSGPLDQVRAALPTPALSPEDKAVLQNLKRILAKVQEMRDQRVSLEQQLRELIQKDDITASLVTTDHSEMKKLFEEQLKKYDQLKVYLEQNLAAQDRVLCALTEANVQYAAVRRVLSDLDQKWNSTLQTLVASYEAYEDLMKKSQEGRDFYADLESKVAALLERTQSTCQAREAARQQLLDRELKKKPPPRPTAPKPLLPRREESEAVEAGDPPEELRSLPPDMVAGPRLPDTFLGSATPLHFPPSPFPSSTGPGPHYLSGPLPPGTYSGPTQLIQPRAPGPHAMPVAPGPALYPAPSSAPSFTSVWASAPTAAPSTPASTSLPTPGPRTPTPTIPLPLCPSAWGPGAAATPPTHPALPRSRSRPSASPLRGSAFPQPWAPSASPSPTGIWSCPFYQTHGPPGSPSYHSRALVCWPVHP

SEQ ID NO: 60084 - protein, 565 aa, Homo sapiens
MNYEGARSERENHAADDSEGGALDMCCSERLPGLPQPIVMEALDEAEGLQDSQREMPPPPPPSPPSDPAQKPPPRGAGSHSLTVRSSLCLFAASQFLLACGVLWFSGYGHIWSQNATNLVSSLLTLLKQLEPTAWLDSGTWGVPSLLLVFLSVGLVLVTTLVWHLLRTPPEPPTPLPPEDRRQSVSRQPSFTYSEWMEEKIEDDFLDLDPVPETPVFDCVMDIKPEADPTSLTVKSMGLQERRGSNVSLTLDMCTPGCNEEGFGYLMSPREESAREYLLSASRVLQAEELHEKALDPFLLQAEFFEIPMNFVDPKEYDIPGLVRKNRYKTILPNPHSRVCLTSPDPDDPLSSYINANYIRGYGGEEKVYIATQGPIVSTVADFWRMVWQEHTPIIVMITNIEEMNEKCTEYWPEEQVAYDGVEITVQKVIHTEDYRLRLISLKSGTEERGLKHYWFTSWPDQKTPDRAPPLLHLVREVEEAAQQEGPHCAPIIVHCSAGIGRTGCFIATSICCQQLRQEGVVDILKTTCQLRQDRGGMIQTCEQYQFVHHVMSLYEKQLSHQSPE

SEQ ID NO: 60085 - protein, 533 aa, Homo sapiens
MNYEGARSERENHAADDSEGGALDMCCSERLPGLPQPIVMEALDEAEGLQDSQREMPPPPPPSPPSDPAQKPPPRGAGSHSLTVRSSLCLFAASQFLLEPTAWLDSGTWGVPSLLLVFLSVGLVLVTTLVWHLLRTPPEPPTPLPPEDRRQSVSRQPSFTYSEWMEEKIEDDFLDLDPVPETPVFDCVMDIKPEADPTSLTVKSMGLQERRGSNVSLTLDMCTPGCNEEGFGYLMSPREESAREYLLSASRVLQAEELHEKALDPFLLQAEFFEIPMNFVDPKEYDIPGLVRKNRYKTILPNPHSRVCLTSPDPDDPLSSYINANYIRGYGGEEKVYIATQGPIVSTVADFWRMVWQEHTPIIVMITNIEEMNEKCTEYWPEEQVAYDGVEITVQKVIHTEDYRLRLISLKSGTEERGLKHYWFTSWPDQKTPDRAPPLLHLVREVEEAAQQEGPHCAPIIVHCSAGIGRTGCFIATSICCQQLRQEGVVDILKTTCQLRQDRGGMIQTCEQYQFVHHVMSLYEKQLSHQSPE

SEQ ID NO: 60086 - protein, 565 aa, Homo sapiens; identical to SEQ ID NO: 60084

SEQ ID NO: 60087 - protein, 595 aa, Homo sapiens
MVRWFHRDLSGLDAETLLKGRGVHGSFLARPSRKNQGDFSLSVRVGDQVTHIRIQNSGDFYDLYGGEKFATLTELVEYYTQQQGVLQDRDGTIIHLKYPLNCSDPTSERWYHGHMSGGQAETLLQAKGEPWTFLVRESLSQPGDFVLSVLSDQPKAGPGSPLRVTHIKVMCEGGRYTVGGLETFDSLTDLVEHFKKTGIEEASGAFVYLRQPYYATRVNAADIENRVLELNKKQESEDTAKAGFWEEFESLQKQEVKNLHQRLEGQRPENKGKNRYKNILPFDHSRVILQGRDSNIPGSDYINANYIKNQLLGPDENAKTYIASQGCLEATVNDFWQMAWQENSRVIVMTTREVEKGRNKCVPYWPEVGMQRAYGPYSVTNCGEHDTTEYKLRTLQVSPLDNGDLIREIWHYQYLSWPDHGVPSEPGGVLSFLDQINQRQESLPHAGPIIVHCSAGIGRTGTIIVIDMLMENISTKGLDCDIDIQKTIQMVRAQRSGMVQTEAQYKFIYVAIAQFIETTKKKLEVLQSQKGQESEYGNITYPPAMKNAHAKASRTSSKHKEDVYENLHTKNKREEKVKKQRSADKEKSKGSLKRK

SEQ ID NO: 60088 - protein, 597 aa, Homo sapiens
MLSRGWFHRDLSGLDAETLLKGRGVHGSFLARPSRKNQGDFSLSVRVGDQVTHIRIQNSGDFYDLYGGEKFATLTELVEYYTQQQGVLQDRDGTIIHLKYPLNCSDPTSERWYHGHMSGGQAETLLQAKGEPWTFLVRESLSQPGDFVLSVLSDQPKAGPGSPLRVTHIKVMCEGGRYTVGGLETFDSLTDLVEHFKKTGIEEASGAFVYLRQPYYATRVNAADIENRVLELNKKQESEDTAKAGFWEEFESLQKQEVKNLHQRLEGQRPENKGKNRYKNILPFDHSRVILQGRDSNIPGSDYINANYIKNQLLGPDENAKTYIASQGCLEATVNDFWQMAWQENSRVIVMTTREVEKGRNKCVPYWPEVGMQRAYGPYSVTNCGEHDTTEYKLRTLQVSPLDNGDLIREIWHYQYLSWPDHGVPSEPGGVLSFLDQINQRQESLPHAGPIIVHCSAGIGRTGTIIVIDMLMENISTKGLDCDIDIQKTIQMVRAQRSGMVQTEAQYKFIYVAIAQFIETTKKKLEVLQSQKGQESEYGNITYPPAMKNAHAKASRTSSKHKEDVYENLHTKNKREEKVKKQRSADKEKSKGSLKRK

SEQ ID NO: 60089 - protein, 556 aa, Homo sapiens
MLSRGVGDQVTHIRIQNSGDFYDLYGGEKFATLTELVEYYTQQQGVLQDRDGTIIHLKYPLNCSDPTSERWYHGHMSGGQAETLLQAKGEPWTFLVRESLSQPGDFVLSVLSDQPKAGPGSPLRVTHIKVMCEGGRYTVGGLETFDSLTDLVEHFKKTGIEEASGAFVYLRQPYYATRVNAADIENRVLELNKKQESEDTAKAGFWEEFESLQKQEVKNLHQRLEGQRPENKGKNRYKNILPFDHSRVILQGRDSNIPGSDYINANYIKNQLLGPDENAKTYIASQGCLEATVNDFWQMAWQENSRVIVMTTREVEKGRNKCVPYWPEVGMQRAYGPYSVTNCGEHDTTEYKLRTLQVSPLDNGDLIREIWHYQYLSWPDHGVPSEPGGVLSFLDQINQRQESLPHAGPIIVHCSAGIGRTGTIIVIDMLMENISTKGLDCDIDIQKTIQMVRAQRSGMVQTEAQYKFIYVAIAQFIETTKKKLEVLQSQKGQESEYGNITYPPAMKNAHAKASRTSSKHKEDVYENLHTKNKREEKVKKQRSADKEKSKGSLKRK

SEQ ID NO: 60090 - protein, 624 aa, Homo sapiens
MVRWFHRDLSGLDAETLLKGRGVHGSFLARPSRKNQGDFSLSVRVGDQVTHIRIQNSGDFYDLYGGEKFATLTELVEYYTQQQGVLQDRDGTIIHLKYPLNCSDPTSERWYHGHMSGGQAETLLQAKGEPWTFLVRESLSQPGDFVLSVLSDQPKAGPGSPLRVTHIKVMCEGGRYTVGGLETFDSLTDLVEHFKKTGIEEASGAFVYLRQPYYATRVNAADIENRVLELNKKQESEDTAKAGFWEEFESLQKQEVKNLHQRLEGQRPENKGKNRYKNILPFDHSRVILQGRDSNIPGSDYINANYIKNQLLGPDENAKTYIASQGCLEATVNDFWQMAWQENSRVIVMTTREVEKGRNKCVPYWPEVGMQRAYGPYSVTNCGEHDTTEYKLRTLQVSPLDNGDLIREIWHYQYLSWPDHGVPSEPGGVLSFLDQINQRQESLPHAGPIIVHCSAGIGRTGTIIVIDMLMENISTKGLDCDIDIQKTIQMVRAQRSGMVQTEAQYKFIYVAIAQFIETTKKKLEVLQSQKGQESEYGNITYPPAMKNAHAKASRTSSKSLESSAGTVAASPVRRGGQRGLPVPGPPVLSPDLHQLPVLAPLHPAADTRRMCMRTCTLRTRGRRK

SEQ ID NO: 60091 - protein, 360 aa, Homo sapiens
MVQAHGGRSRAQPLTLSLGAAMTQPPPEKTPAKKHVRLQERRGSNVALMLDVRSLGAVEPICSVNTPREVTLHFLRTAGHPLTRWALQRQPPSPKQLEEEFLKIPSNFVSPEDLDIPGHASKDRYKTILPNPQSRVCLGRAQSQEDGDYINANYIRGYDGKEKVYIATQGPMPNTVSDFWEMVWQEEVSLIVMLTQLREGKEKCVHYWPTEEETYGPFQIRIQDMKECPEYTVRQLTIQYQEERRSVKHILFSAWPDHQTPESAGPLLRLVAEVEESPETAAHPGPIVVHCSAGIGRTGCFIATRIGCQQLKARGEVDILGIVCQLRLDRGGMIQTAEQYQFLHHTLALYAGQLPEEPSP

SEQ ID NO: 60092 - protein, 465 aa, Homo sapiens
MVGKAWPLTHSQGTGPWAPEGHRREAADPWWQRQQAQEGRMQLGCAWVAARRGGGRKLASWSLLSPQRQTDRQTDSWQEAAWGPQLLQQTSWLSEPPLGPAPHLSMVQAHGGRSRAQPLTLSLGAAMTQPPPEKTPAKKHVRLQERRGSNVALMLDVRSLGAVEPICSVNTPREVTLHFLRTAGHPLTRWALQRQPPSPKQLEEEFLKIPSNFVSPEDLDIPGHASKDRYKTILPNPQSRVCLGRAQSQEDGDYINANYIRGYDGKEKVYIATQGPMPNTVSDFWEMVWQEEVSLIVMLTQLREGKEKCVHYWPTEEETYGPFQIRIQDMKECPEYTVRQLTIQYQEERRSVKHILFSAWPDHQTPESAGPLLRLVAEVEESPETAAHPGPIVVHCSAGIGRTGCFIATRIGCQQLKARGEVDILGIVCQLRLDRGGMIQTAEQYQFLHHTLALYAGQLPEEPSP

SEQ ID NO: 60093 - protein, 399 aa, Homo sapiens
MGASFWPIRQAREQQRRALSFRQTSWLSEPPLGPAPHLSMVQAHGGRSRAQPLTLSLGAAMTQPPPEKTPAKKHVRLQERRGSNVALMLDVRSLGAVEPICSVNTPREVTLHFLRTAGHPLTRWALQRQPPSPKQLEEEFLKIPSNFVSPEDLDIPGHASKDRYKTILPNPQSRVCLGRAQSQEDGDYINANYIRGYDGKEKVYIATQGPMPNTVSDFWEMVWQEEVSLIVMLTQLREGKEKCVHYWPTEEETYGPFQIRIQDMKECPEYTVRQLTIQYQEERRSVKHILFSAWPDHQTPESAGPLLRLVAEVEESPETAAHPGPIVVHCSAGIGRTGCFIATRIGCQQLKARGEVDILGIVCQLRLDRGGMIQTAEQYQFLHHTLALYAGQLPEEPSP

SEQ ID NO: 60094 - protein, 154 aa, Homo sapiens
MVQAHGGRSRAQPLTLSLGAAMTQPPPEKTPAKKHVRLQERRGSNVALMLDVRSLGAVEPICSVNTPREVTLHFLRTAGHPLTRWALQRQPPSPKQLEEEFLKIPSNFVSPEDLDIPGHASKDRYKTILPNPQSRVCLGRAQSQEDGDYINANY

SEQ ID NO: 60095 - protein, 441 aa, Homo sapiens
KRRRAASMNRLGCWPARSLPRSGRGSGQRSLGLGGHPSGPRHPGTPAAKRTWESPGVRARDCPLSTSWLSEPPLGPAPHLSMVQAHGGRSRAQPLTLSLGAAMTQPPPEKTPAKKHVRLQERRGSNVALMLDVRSLGAVEPICSVNTPREVTLHFLRTAGHPLTRWALQRQPPSPKQLEEEFLKIPSNFVSPEDLDIPGHASKDRYKTILPNPQSRVCLGRAQSQEDGDYINANYIRGYDGKEKVYIATQGPMPNTVSDFWEMVWQEEVSLIVMLTQLREGKEKCVHYWPTEEETYGPFQIRIQDMKECPEYTVRQLTIQYQEERRSVKHILFSAWPDHQTPESAGPLLRLVAEVEESPETAAHPGPIVVHCSAGIGRTGCFIATRIGCQQLKARGEVDILGIVCQLRLDRGGMIQTAEQYQFLHHTLALYAGQLPEEPSP

SEQ ID NO: 60096 - protein, 140 aa, Homo sapiens
MVQAHGGRSRAQPLTLSLGAAMTQPPPEKTPAKKHVRLQERRGSNVALMLDVRSLGAVEPICSVNTPREVTLHFLRTAGHPLTRWALQRQPPSPKQLEEEFLKIPSNFVSPEDLDIPGHASKDRYKTILPNPQSRVCLGR

SEQ ID NO: 60097 - protein, 360 aa, Homo sapiens; identical to SEQ ID NO: 60091

SEQ ID NO: 60098 - protein, 189 aa, Homo sapiens
MPNTVSDFWEMVWQEEVSLIVMLTQLREGKEKCVHYWPTEEETYGPFQIRIQDMKECPEYTVRQLTIQYQEERRSVKHILFSAWPDHQTPESAGPLLRLVAEVEESPETAAHPGPIVVHCSAGIGRTGCFIATRIGCQQLKARGEVDILGIVCQLRLDRGGMIQTAEQYQFLHHTLALYAGQLPEEPSP

SEQ ID NO: 60099 - protein, 136 aa, Homo sapiens
MKECPEYTVRQLTIQYQEERRSVKHILFSAWPDHQTPESAGPLLRLVAEVEESPETAAHPGPIVVHCSAGIGRTGCFIATRIGCQQLKARGEVDILGIVCQLRLDRGGMIQTAEQYQFLHHTLALYAGQLPEEPSP

SEQ ID NO: 60100 - protein, 793 aa, Homo sapiens
MDSWFILVLLGSGLICVSANNATTVAPSVGITRLINSSTAEPVKEEAKTSNPTSSLTSLSVAPTFSPNITLGPTYLTTVNSSDSDNGTTRTASTNSIGITISPNGTWLPDNQFTDARTEPWEGNSSTAATTPETFPPSDETPIIAVMVALSSLLVIVFIIIVLYMLRFKKYKQAGSHSNSFRLSNGRTEDVEPQSVPLLARSPSTNRKYPPLPVDKLEEEINRRMADDNKLFREEFNALPACPIQATCEAASKEENKEKNRYVNILPYDHSRVHLTPVEGVPDSDYINASFINGYQEKNKFIAAQGPKEETVNDFWRMIWEQNTATIVMVTNLKERKECKCAQYWPDQGCWTYGNIRVSVEDVTVLVDYTVRKFCIQQVGDMTNRKPQRLITQFHFTSWPDFGVPFTPIGMLKFLKKVKACNPQYAGAIVVHCSAGVGRTGTFVVIDAMLDMMHTERKVDVYGFVSRIRAQRCQMVQTDMQYVFIYQALLEHYLYGDTELEVTSLETHLQKIYNKIPGTSNNGLEEEFKKLTSIKIQNDKMRTGNLPANMKKNRVLQIIPYEFNRVIIPVKRGEENTDYVNASFIDGYRQKDSYIASQGPLLHTIEDFWRMIWEWKSCSIVMLTELEERGQEKCAQYWPSDGLVSYGDITVELKKEEECESYTVRDLLVTNTRENKSRQIRQFHFHGWPEVGIPSDGKGMISIIAAVQKQQQQSGNHPITVHCSAGAGRTGTFCALSTVLERVKAEGILDVFQTVKSLRLQRPHMVQTLEQYEFCYKVVQEYIDAFSDYANFK

SEQ ID NO: 60101 - protein, 793 aa, Homo sapiens; identical to SEQ ID NO: 60100

SEQ ID NO: 60102 - protein, 793 aa, Homo sapiens; identical to SEQ ID NO: 60100

SEQ ID NO: 60103 - protein, 658 aa, Homo sapiens
MVALSSLLVIVFIIIVLYMLRRFRKAELMSRNTEKYKQAGSHSNSFRLSNGRTEDVEPQSVPLLARSPSTNRKYPPLPVDKLEEEINRRMADDNKLFREEFNALPACPIQATCEAASKEENKEKNRYVNILPYDHSRVHLTPVEGVPDSDYINASFINGYQEKNKFIAAQGPKEETVNDFWRMIWEQNTATIVMVTNLKERKECKCAQYWPDQGCWTYGNIRVSVEDVTVLVDYTVRKFCIQQVGDMTNRKPQRLITQFHFTSWPDFGVPFTPIGMLKFLKKVKACNPQYAGAIVVHCSAGVGRTGTFVVIDAMLDMMHTERKVDVYGFVSRIRAQRCQMVQTDMQYVFIYQALLEHYLYGDTELEVTSLETHLQKIYNKIPGTSNNGLEEEFKKLTSIKIQNDKMRTGNLPANMKKNRVLQIIPYEFNRVIIPVKRGEENTDYVNASFIDGYRQKDSYIASQGPLLHTIEDFWRMIWEWKSCSIVMLTELEERGQEKCAQYWPSDGLVSYGDITVELKKEEECESYTVRDLLVTNTRENKSRQIRQFHFHGWPEVGIPSDGKGMISIIAAVQKQQQQSGNHPITVHCSAGAGRTGTFCALSTVLERVKAEGILDVFQTVKSLRLQRPHMVQTLEQYEFCYKVVQEYIDAFSDYANFK

SEQ ID NO: 60104 - protein, 802 aa, Homo sapiens
MDSWFILVLLGSGLICVSANNATTVAPSVGITRLINSSTAEPVKEEAKTSNPTSSLTSLSVAPTFSPNITLGPTYLTTVNSSDSDNGTTRTASTNSIGITISPNGTWLPDNQFTDARTEPWEGNSSTAATTPETFPPSGNSDSKDRRDETPIIAVMVALSSLLVIVFIIIVLYMLRFKKYKQAGSHSNSFRLSNGRTEDVEPQSVPLLARSPSTNRKYPPLPVDKLEEEINRRMADDNKLFREEFNALPACPIQATCEAASKEENKEKNRYVNILPYDHSRVHLTPVEGVPDSDYINASFINGYQEKNKFIAAQGPKEETVNDFWRMIWEQNTATIVMVTNLKERKECKCAQYWPDQGCWTYGNIRVSVEDVTVLVDYTVRKFCIQQVGDMTNRKPQRLITQFHFTSWPDFGVPFTPIGMLKFLKKVKACNPQYAGAIVVHCSAGVGRTGTFVVIDAMLDMMHTERKVDVYGFVSRIRAQRCQMVQTDMQYVFIYQALLEHYLYGDTELEVTSLETHLQKIYNKIPGTSNNGLEEEFKKLTSIKIQNDKMRTGNLPANMKKNRVLQIIPYEFNRVIIPVKRGEENTDYVNASFIDGYRQKDSYIASQGPLLHTIEDFWRMIWEWKSCSIVMLTELEERGQEKCAQYWPSDGLVSYGDITVELKKEEECESYTVRDLLVTNTRENKSRQIRQFHFHGWPEVGIPSDGKGMISIIAAVQKQQQQSGNHPITVHCSAGAGRTGTFCALSTVLERVKAEGILDVFQTVKSLRLQRPHMVQTLEQYEFCYKVVQEYIDAFSDYANFK

SEQ ID NO: 60105 - protein, 802 aa, Homo sapiens; identical to SEQ ID NO: 60104

SEQ ID NO: 60106 - protein, 200 aa, Homo sapiens
MDSWFILVLLGSGLICVSANNATTVAPSVGITRLINSSTAEPVKEEAKTSNPTSSLTSLSVAPTFSPNITLGPTYLTTVNSSDSDNGTTRTASTNSIGITISPNGTWLPDNQFTDARTEPWEGNSSTAATTPETFPPSGNSDSKDRRDETPIIAVMVALSSLLVIVFIIIVLYMLRFKKYKQAGSHSNSFRLSNGRTEDV

SEQ ID NO: 60107 - protein, 813 aa, Homo sapiens
MDDAVQITKISMDSWFILVLLGSGLICVSANNATTVAPSVGITRLINSSTAEPVKEEAKTSNPTSSLTSLSVAPTFSPNITLGPTYLTTVNSSDSDNGTTRTASTNSIGITISPNGTWLPDNQFTDARTEPWEGNSSTAATTPETFPPSGNSDSKDRRDETPIIAVMVALSSLLVIVFIIIVLYMLRFKKYKQAGSHSNSFRLSNGRTEDVEPQSVPLLARSPSTNRKYPPLPVDKLEEEINRRMADDNKLFREEFNALPACPIQATCEAASKEENKEKNRYVNILPYDHSRVHLTPVEGVPDSDYINASFINGYQEKNKFIAAQGPKEETVNDFWRMIWEQNTATIVMVTNLKERKECKCAQYWPDQGCWTYGNIRVSVEDVTVLVDYTVRKFCIQQVGDMTNRKPQRLITQFHFTSWPDFGVPFTPIGMLKFLKKVKACNPQYAGAIVVHCSAGVGRTGTFVVIDAMLDMMHTERKVDVYGFVSRIRAQRCQMVQTDMQYVFIYQALLEHYLYGDTELEVTSLETHLQKIYNKIPGTSNNGLEEEFKKLTSIKIQNDKMRTGNLPANMKKNRVLQIIPYEFNRVIIPVKRGEENTDYVNASFIDGYRQKDSYIASQGPLLHTIEDFWRMIWEWKSCSIVMLTELEERGQEKCAQYWPSDGLVSYGDITVELKKEEECESYTVRDLLVTNTRENKSRQIRQFHFHGWPEVGIPSDGKGMISIIAAVQKQQQQSGNHPITVHCSAGAGRTGTFCALSTVLERVKAEGILDVFQTVKSLRLQRPHMVQTLEQYEFCYKVVQEYIDAFSDYANFK

SEQ ID NO: 60108 - protein, 175 aa, Homo sapiens
MDSWFILVLLGSGLICVSANNATTVAPSVGITRLINSSTAEPVKEEAKTSNPTSSLTSLSVAPTFSPNITLGPTYLTTVNSSDSDNGTTRTASTNSIGITISPNGTWLPDNQFTDARTEPWEGNSSTAATTPETFPPSGNSDSKDRRDETPIIAVMVALSSLLVIVFIIIVLYML

SEQ ID NO: 60109 - protein, 138 aa, Homo sapiens
MDSWFILVLLGSGLICVSANNATTVAPSVGITRLINSSTAEPVKEEAKTSNPTSSLTSLSVAPTFSPNITLGPTYLTTVNSSDSDNGTTRTASTNSIGITISPNGTWLPDNQFTDARTEPWEGNSSTAATTPETFPPS

SEQ ID NO: 60110 - protein, 253 aa, Homo sapiens
MDSWFILVLLGSGLICVSANNATTVAPSVGITRLINSSTAEPVKEEAKTSNPTSSLTSLSVAPTFSPNITLGPTYLTTVNSSDSDNGTTRTASTNSIGITISPNGTWLPDNQFTDARTEPWEGNSSTAATTPETFPPSDETPIIAVMVALSSLLVIVFIIIVLYMLRFKKYKQAGSHSNSFRLSNGRTEDVEPQSVPLLARSPSTNRKYPPLPVDKLEEEINRRMADDNKLFREEFNALPACPIQATCEAASK

SEQ ID NO: 60111 - protein, 412 aa, Homo sapiens
MTNRKPQRLITQFHFTSWPDFGVPFTPIGMLKFLKKVKACNPQYAGAIVVHCSAGVGRTGTFVVIDAMLDMMHTERKVDVYGFVSRIRAQRCQMVQTDMQYVFIYQALLEHYLYGDTELEVTSLETHLQKIYNKIPGTSNNGLEEEFKKLTSIKIQNDKMRTGNLPANMKKNRVLQIIPYEFNRVIIPVKRGEENTDYVNASFIDGYRQKDSYIASQGPLLHTIEDFWRMIWEWKSCSIVMLTELEERGQEKCAQYWPSDGLVSYGDITVELKKEEECESYTVRDLLVTNTRENKSRQIRQFHFHGWPEVGIPSDGKGMISIIAAVQKQQQQSGNHPITVHCSAGAGRTGTFCALSTVLERVKAEGILDVFQTVKSLRLQRPHMVQTLEQYEFCYKVVQEYIDAFSDYANFK

SEQ ID NO: 60112 - protein, 1997 aa, Homo sapiens
MLSHGAGLALWITLSLLQTGLAEPERCNFTLAESKASSHSVSIQWRILGSPCNFSLIYSSDTLGAALCPTFRIDNTTYGCNLQDLQAGTIYNFRIISLDEERTVVLQTDPLPPARFGVSKEKTTSTSLHVWWTPSSGKVTSYEVQLFDENNQKIQGVQIQESTSWNEYTFFNLTAGSKYNIAITAVSGGKRSFSVYTNGSTVPSPVKDIGISTKANSLLISWSHGSGNVERYRLMLMDKGILVHGGVVDKHATSYAFHGLTPGYLYNLTVMTEAAGLQNYRWKLVRTAPMEVSNLKVTNDGSLTSLKVKWQRPPGNVDSYNITLSHKGTIKESRVLAPWITETHFKELVPGRLYQVTVSCVSGELSAQKMAVGRTFPDKVANLEANNNGRMRSLVVSWSPPAGDWEQYRILLFNDSVVLLNITVGKEETQYVMDDTGLVPGRQYEVEVIVESGNLKNSERCQGRTVPLAVLQLRVKHANETSLSIMWQTPVAEWEKYIISLADRDLLLIHKSLSKDAKEFTFTDLVPGRKYMATVTSISGDLKNSSSVKGRTVPAQVTDLHVANQGMTSSLFTNWTQAQGDVEFYQVLLIHENVVIKNESISSETSRYSFHSLKSGSLYSVVVTTVSGGISSRQVVVEGRTVPSSVSGVTVNNSGRNDYLSVSWLLAPGDVDNYEVTLSHDGKVVQSLVIAKSVRECSFSSLTPGRLYTVTITTRSGKYENHSFSQERTVPDKVQGVSVSNSARSDYLRVSWVHATGDFDHYEVTIKNKNNFIQTKSIPKSENECVFVQLVPGRLYSVTVTTKSGQYEANEQGNGRTIPEPVKDLTLRNRSTEDLHVTWSGANGDVDQYEIQLLFNDMKVFPPFHLVNTATEYRFTSLTPGRQYKILVLTISGDVQQSAFIEGFTVPSAVKNIHISPNGATDSLTVNWTPGGGDVDSYTVSAFRHSQKVDSQTIPKHVFEHTFHRLEAGEQYQIMIASVSGSLKNQINVVGRTVPASVQGVIADNAYSSYSLIVSWQKAAGVAERYDILLLTENGILLRNTSEPATTKQHKFEDLTPGKKYKIQILTVSGGLFSKEAQTEGRTVPAAVTDLRITENSTRHLSFRWTASEGELSWYNIFLYNPDGNLQERAQVDPLVQSFSFQNLLQGRMYKMVIVTHSGELSNESFIFGRTVPASVSHLRGSNRNTTDSLWFNWSPASGDFDFYELILYNPNGTKKENWKDKDLTEWRFQGLVPGRKYVLWVVTHSGDLSNKVTAESRTAPSPPSLMSFADIANTSLAITWKGPPDWTDYNDFELQWLPRDALTVFNPYNNRKSEGRIVYGLRPGRSYQFNVKTVSGDSWKTYSKPIFGSVRTKPDKIQNLHCRPQNSTAIACSWIPPDSDFDGYSIECRKMDTQEVEFSRKLEKEKSLLNIMMLVPHKRYLVSIKVQSAGMTSEVVEDSTITMIDRPPPPPPHIRVNEKDVLISKSSINFTVNCSWFSDTNGAVKYFTVVVREADGSDELKPEQQHPLPSYLEYRHNASIRVYQTNYFASKCAENPNSNSKSFNIKLGAEMESLGGKCDPTQQKFCDGPLKPHTAYRISIRAFTQLFDEDLKEFTKPLYSDTFFSLPITTESEPLFGAIEGVSAGLFLIGMLVAVVALLICRQKVSHGRERPSARLSIRRDRPLSVHLNLGQKGNRKTSCPIKINQFEGHFMKLQADSNYLLSKEYEELKDVGRNQSCDIALLPENRGKNRYNNILPYDATRVKLSNVDDDPCSDYINASYIPGNNFRREYIVTQGPLPGTKDDFWKMVWEQNVHNIVMVTQCVEKGRVKCDHYWPADQDSLYYGDLILQMLSESVLPEWTIREFKICGEEQLDAHRLIRHFHYTVWPDHGVPETTQSLIQFVRTVRDYINRSPGAGPTVVHCSAGVGRTGTFIALDRILQQLDSKDSVDIYGAVHDLRLHRVHMVQTECQYVYLHQCVRDVLRARKLRSEQENPLFPIYENVNPEYHRDPVYSRH

SEQ ID NO: 60113 - protein, 2215 aa, Homo sapiens
MEAEFYMVILTCLIFRNSEGFQIVHVQKQQCLFKNEKVVVGSCNRTIQNQQWMWTEDEKLLHVKSALCLAISNSSRGPSRSAILDRCSQAPRWTCYDQEGFLEVENASLFLQKQGSRVVVKKARKYLHSWMKIDVNKEGKLVNESLCLQKAGLGAEVSVRSTRNTAPPQILTTFNAVPDGLVFLIRNTTEAFIRNAAENYSQNSSERQHPNLHMTGITDTSWVLSTTQPFSSTTEETGLAEPERCNFTLAESKASSHSVSIQWRILGSPCNFSLIYSSDTLGAALCPTFRIDNTTYGCNLQDLQAGTIYNFRIISLDEERTVVLQTDPLPPARFGVSKEKTTSTSLHVWWTPSSGKVTSYEVQLFDENNQKIQGVQIQESTSWNEYTFFNLTAGSKYNIAITAVSGGKRSFSVYTNGSTVPSPVKDIGISTKANSLLISWSHGSGNVERYRLMLMDKGILVHGGVVDKHATSYAFHGLTPGYLYNLTVMTEAAGLQNYRWKLVRTAPMEVSNLKVTNDGSLTSLKVKWQRPPGNVDSYNITLSHKGTIKESRVLAPWITETHFKELVPGRLYQVTVSCVSGELSAQKMAVGRTFPDKVANLEANNNGRMRSLVVSWSPPAGDWEQYRILLFNDSVVLLNITVGKEETQYVMDDTGLVPGRQYEVEVIVESGNLKNSERCQGRTVPLAVLQLRVKHANETSLSIMWQTPVAEWEKYIISLADRDLLLIHKSLSKDAKEFTFTDLVPGRKYMATVTSISGDLKNSSSVKGRTVPAQVTDLHVANQGMTSSLFTNWTQAQGDVEFYQVLLIHENVVIKNESISSETSRYSFHSLKSGSLYSVVVTTVSGGISSRQVVVEGRTVPSSVSGVTVNNSGRNDYLSVSWLLAPGDVDNYEVTLSHDGKVVQSLVIAKSVRECSFSSLTPGRLYTVTITTRSGKYENHSFSQERTVPDKVQGVSVSNSARSDYLRVSWVHATGDFDHYEVTIKNKNNFIQTKSIPKSENECVFVQLVPGRLYSVTVTTKSGQYEANEQGNGRTIPEPVKDLTLRNRSTEDLHVTWSGANGDVDQYEIQLLFNDMKVFPPFHLVNTATEYRFTSLTPGRQYKILVLTISGDVQQSAFIEGFTVPSAVKNIHISPNGATDSLTVNWTPGGGDVDSYTVSAFRHSQKVDSQTIPKHVFEHTFHRLEAGEQYQIMIASVSGSLKNQINVVGRTVPASVQGVIADNAYSSYSLIVSWQKAAGVAERYDILLLTENGILLRNTSEPATTKQHKFEDLTPGKKYKIQILTVSGGLFSKEAQTEGRTVPAAVTDLRITENSTRHLSFRWTASEGELSWYNIFLYNPDGNLQERAQVDPLVQSFSFQNLLQGRMYKMVIVTHSGELSNESFIFGRTVPASVSHLRGSNRNTTDSLWFNWSPASGDFDFYELILYNPNGTKKENWKDKDLTEWRFQGLVPGRKYVLWVVTHSGDLSNKVTAESRTAPSPPSLMSFADIANTSLAITWKGPPDWTDYNDFELQWLPRDALTVFNPYNNRKSEGRIVYGLRPGRSYQFNVKTVSGDSWKTYSKPIFGSVRTKPDKIQNLHCRPQNSTAIACSWIPPDSDFDGYSIECRKMDTQEVEFSRKLEKEKSLLNIMMLVPHKRYLVSIKVQSAGMTSEVVEDSTITMIDRPPPPPPHIRVNEKDVLISKSSINFTVNCSWFSDTNGAVKYFTVVVREADGSDELKPEQQHPLPSYLEYRHNASIRVYQTNYFASKCAENPNSNSKSFNIKLGAEMESLGGKCDPTQQKFCDGPLKPHTAYRISIRAFTQLFDEDLKEFTKPLYSDTFFSLPITTESEPLFGAIEGVSAGLFLIGMLVAVVALLICRQKVSHGRERPSARLSIRRDRPLSVHLNLGQKGNRKTSCPIKINQFEGHFMKLQADSNYLLSKEYEELKDVGRNQSCDIALLPENRGKNRYNNILPYDATRVKLSNVDDDPCSDYINASYIPGNNFRREYIVTQGPLPGTKDDFWKMVWEQNVHNIVMVTQCVEKGRVKCDHYWPADQDSLYYGDLILQMLSESVLPEWTIREFKICGEEQLDAHRLIRHFHYTVWPDHGVPETTQSLIQFVRTVRDYINRSPGAGPTVVHCSAGVGRTGTFIALDRILQQLDSKDSVDIYGAVHDLRLHRVHMVQTECQYVYLHQCVRDVLRARKLRSEQENPLFPIYENVNPEYHRDPVYSRH

SEQ ID NO: 60114 - protein, 1907 aa, Homo sapiens
MLSHGAGLALWITLSLLQTGLAEPERCNFTLAESKASSHSVSIQWRILGSPCNFSLIYSSDTLGAALCPTFRIDNTTYGCNLQDLQAGTIYNFRIISLDEERTVVLQTDPLPPARFGVSKEKTTSTSLHVWWTPSSGKVTSYEVQLFDENNQKIQGVQIQESTSWNEYTFFNLTAGSKYNIAITAVSGGKRSFSVYTNGSTVPSPVKDIGISTKANSLLISWSHGSGNVERYRLMLMDKGILVHGGVVDKHATSYAFHGLTPGYLYNLTVMTEAAGLQNYRWKLVRTAPMEVSNLKVTNDGSLTSLKVKWQRPPGNVDSYNITLSHKGTIKESRVLAPWITETHFKELVPGRLYQVTVSCVSGELSAQKMAVGRTFPLAVLQLRVKHANETSLSIMWQTPVAEWEKYIISLADRDLLLIHKSLSKDAKEFTFTDLVPGRKYMATVTSISGDLKNSSSVKGRTVPAQVTDLHVANQGMTSSLFTNWTQAQGDVEFYQVLLIHENVVIKNESISSETSRYSFHSLKSGSLYSVVVTTVSGGISSRQVVVEGRTVPSSVSGVTVNNSGRNDYLSVSWLLAPGDVDNYEVTLSHDGKVVQSLVIAKSVRECSFSSLTPGRLYTVTITTRSGKYENHSFSQERTVPDKVQGVSVSNSARSDYLRVSWVHATGDFDHYEVTIKNKNNFIQTKSIPKSENECVFVQLVPGRLYSVTVTTKSGQYEANEQGNGRTIPEPVKDLTLRNRSTEDLHVTWSGANGDVDQYEIQLLFNDMKVFPPFHLVNTATEYRFTSLTPGRQYKILVLTISGDVQQSAFIEGFTVPSAVKNIHISPNGATDSLTVNWTPGGGDVDSYTVSAFRHSQKVDSQTIPKHVFEHTFHRLEAGEQYQIMIASVSGSLKNQINVVGRTVPASVQGVIADNAYSSYSLIVSWQKAAGVAERYDILLLTENGILLRNTSEPATTKQHKFEDLTPGKKYKIQILTVSGGLFSKEAQTEGRTVPAAVTDLRITENSTRHLSFRWTASEGELSWYNIFLYNPDGNLQERAQVDPLVQSFSFQNLLQGRMYKMVIVTHSGELSNESFIFGRTVPASVSHLRGSNRNTTDSLWFNWSPASGDFDFYELILYNPNGTKKENWKDKDLTEWRFQGLVPGRKYVLWVVTHSGDLSNKVTAESRTAPSPPSLMSFADIANTSLAITWKGPPDWTDYNDFELQWLPRDALTVFNPYNNRKSEGRIVYGLRPGRSYQFNVKTVSGDSWKTYSKPIFGSVRTKPDKIQNLHCRPQNSTAIACSWIPPDSDFDGYSIECRKMDTQEVEFSRKLEKEKSLLNIMMLVPHKRYLVSIKVQSAGMTSEVVEDSTITMIDRPPPPPPHIRVNEKDVLISKSSINFTVNCSWFSDTNGAVKYFTVVVREADGNDELKPEQQHPLPSYLEYRHNASIRVYQTNYFASKCAENPNSNSKSFNIKLGAEMESLGGKCDPTQQKFCDGPLKPHTAYRISIRAFTQLFDEDLKEFTKPLYSDTFFSLPITTESEPLFGAIEGVSAGLFLIGMLVAVVALLICRQKVSHGRERPSARLSIRRDRPLSVHLNLGQKGNRKTSCPIKINQFEGHFMKLQADSNYLLSKEYEELKDVGRNQSCDIALLPENRGKNRYNNILPYDATRVKLSNVDDDPCSDYINASYIPGNNFRREYIVTQGPLPGTKDDFWKMVWEQNVHNIVMVTQCVEKGRVKCDHYWPADQDSLYYGDLILQMLSESVLPEWTIREFKICGEEQLDAHRLIRHFHYTVWPDHGVPETTQSLIQFVRTVRDYINRSPGAGPTVVHCSAGVGRTGTFIALDRILQQLDSKDSVDIYGAVHDLRLHRVHMVQTECQYVYLHQCVRDVLRARKLRSEQENPLFPIYENVNPEYHRDPVYSRH

SEQ ID NO: 60115 - protein, 919 aa, Homo sapiens
MEAEFYMVILTCLIFRNSEGFQIVHVQKQQCLFKNEKVVVGSCNRTIQNQQWMWTEDEKLLHVKSALCLAISNSSRGPSRSAILDRCSQAPRWTCYDQEGFLEVENASLFLQKQGSRVVVKKARKYLHSWMKIDVNKEGKLVNESLCLQKAGLGAEVSVRSTRNTAPPQILTTFNAVPDGLVFLIRNTTEAFIRNAAENYSQNSSERQHPNLHMTGITDTSWVLSTTQPFSSTTEETGLAEPERCNFTLAESKASSHSVSIQWRILGSPCNFSLIYSSDTLGAALCPTFRIDNTTYGCNLQDLQAGTIYNFRIISLDEERTVVLQTDPLPPARFGVSKEKTTSTSLHVWWTPSSGKVTSYEVQLFDENNQKIQGVQIQESTSWNEYTFFNLTAGSKYNIAITAVSGGKRSFSVYTNGSTVPSPVKDIGISTKANSLLISWSHGSGNVERYRLMLMDKGILVHGGVVDKHATSYAFHGLTPGYLYNLTVMTEAAGLQNYRWKLVRTAPMEVSNLKVTNDGSLTSLKVKWQRPPGNVDSYNITLSHKGTIKESRVLAPWITETHFKELVPGRLYQVTVSCVSGELSAQKMAVGRTFPDKVANLEANNNGRMRSLVVSWSPPAGDWEQYRILLFNDSVVLLNITVGKEETQYVMDDTGLVPGRQYEVEVIVESGNLKNSERCQGRTVPLAVLQLRVKHANETSLSIMWQTPVAEWEKYIISLADRDLLLIHKSLSKDAKEFTFTDLVPGRKYMATVTSISGDLKNSSSVKGRTVPAQVTDLHVANQGMTSSLFTNWTQAQGDVEFYQVLLIHENVVIKNESISSETSRYSFHSLKSGSLYSVVVTTVSGGISSRQVVVEGRTVPDKVQGVSVSNSARSDYLRVSWVHATGDFDHYEVTIKNKNNFIQTKAFPSQKTNVYLFS

SEQ ID NO: 60116 - protein, 1907 aa, Homo sapiens
MLSHGAGLALWITLSLLQTGLAEPERCNFTLAESKASSHSVSIQWRILGSPCNFSLIYSSDTLGAALCPTFRIDNTTYGCNLQDLQAGTIYNFRIISLDEERTVVLQTDPLPPARFGVSKEKTTSTSLHVWWTPSSGKVTSYEVQLFDENNQKIQGVQIQESTSWNEYTFFNLTAGSKYNIAITAVSGGKRSFSVYTNGSTVPSPVKDIGISTKANSLLISWSHGSGNVERYRLMLMDKGILVHGGVVDKHATSYAFHGLTPGYLYNLTVMTEAAGLQNYRWKLVRTAPMEVSNLKVTNDGSLTSLKVKWQRPPGNVDSYNITLSHKGTIKESRVLAPWITETHFKELVPGRLYQVTVSCVSGELSAQKMAVGRTFPLAVLQLRVKHANETSLSIMWQTPVAEWEKYIISLADRDLLLIHKSLSKDAKEFTFTDLVPGRKYMATVTSISGDLKNSSSVKGRTVPAQVTDLHVANQGMTSSLFTNWTQAQGDVEFYQVLLIHENVVIKNESISSETSRYSFHSLKSGSLYSVVVTTVSGGISSRQVVVEGRTVPSSVSGVTVNNSGRNDYLSVSWLLAPGDVDNYEVTLSHDGKVVQSLVIAKSVRECSFSSLTPGRLYTVTITTRSGKYENHSFSQERTVPDKVQGVSVSNSARSDYLRVSWVHATGDFDHYEVTIKNKNNFIQTKSIPKSENECVFVQLVPGRLYSVTVTTKSGQYEANEQGNGRTIPEPVKDLTLRNRSTEDLHVTWSGANGDVDQYEIQLLFNDMKVFPPFHLVNTATEYRFTSLTPGRQYKILVLTISGDVQQSAFIEGFTVPSAVKNIHISPNGATDSLTVNWTPGGGDVDSYTVSAFRHSQKVDSQTIPKHVFEHTFHRLEAGEQYQIMIASVSGSLKNQINVVGRTVPASVQGVIADNAYSSYSLIVSWQKAAGVAERYDILLLTENGILLRNTSEPATTKQHKFEDLTPGKKYKIQILTVSGGLFSKEAQTEGRTVPAAVTDLRITENSTRHLSFRWTASEGELSWYNIFLYNPDGNLQERAQVDPLVQSFSFQNLLQGRMYKMVIVTHSGELSNESFIFGRTVPASVSHLRGSNRNTTDSLWFNWSPASGDFDFYELILYNPNGTKKENWKDKDLTEWRFQGLVPGRKYVLWVVTHSGDLSNKVTAESRTAPSPPSLMSFADIANTSLAITWKGPPDWTDYNDFELQWLPRDALTVFNPYNNRKSEGRIVYGLRPGRSYQFNVKTVSGDSWKTYSKPIFGSVRTKPDKIQNLHCRPQNSTAIACSWIPPDSDFDGYSIECRKMDTQEVEFSRKLEKEKSLLNIMMLVPHKRYLVSIKVQSAGMTSEVVEDSTITMIDRPPPPPPHIRVNEKDVLISKSSINFTVNCSWFSDTNGAVKYFTVVVREADGSDELKPEQQHPLPSYLEYRHNASIRVYQTNYFASKCAENPNSNSKSFNIKLGAEMESLGGKCDPTQQKFCDGPLKPHTAYRISIRAFTQLFDEDLKEFTKPLYSDTFFSLPITTESEPLFGAIEGVSAGLFLIGMLVAVVALLICRQKVSHGRERPSARLSIRRDRPLSVHLNLGQKGNRKTSCPIKINQFEGHFMKLQADSNYLLSKEYEELKDVGRNQSCDIALLPENRGKNRYNNILPYDATRVKLSNVDDDPCSDYINASYIPGNNFRREYIVTQGPLPGTKDDFWKMVWEQNVHNIVMVTQCVEKGRVKCDHYWPADQDSLYYGDLILQMLSESVLPEWTIREFKICGEEQLDAHRLIRHFHYTVWPDHGVPETTQSLIQFVRTVRDYINRSPGAGPTVVHCSAGVGRTGTFIALDRILQQLDSKDSVDIYGAVHDLRLHRVHMVQTECQYVYLHQCVRDVLRARKLRSEQENPLFPIYENVNPEYHRDPVYSRH

SEQ ID NO: 60117 - protein, 206 aa, Homo sapiens
MALPCTLGLGMLLALPGALGSGGSAEDSVGSSSVTVVLLLLLLLLLATGLALAWRRLSRDSGGYYHPARLGAALWGRTRRLLWASPPGRWLQARAELGSTDNDLERQEDEQDTDYDHVADGGLQADPGEGEQQCGEASSPEQVPVRAEEARDSDTEGDLVLGSPGPASAGGSAEALLSDLHAFAGSAAWDDSARAAGGQGLHVTAL

SEQ ID NO: 60118 - protein, 1383 aa, Homo sapiens
MVHVARLLLLLLTFFLRTDAETPPRFTRTPVDQTGVSGGVASFICQATGDPRPKIVWNKKGKKVSNQRFEVIEFDDGSGSVLRIQPLRTPRDEAIYECVASNNVGEISVSTRLTVLREDQIPRGFPTIDMGPQLKVVERTRTATMLCAASGNPDPEITWFKDFLPVDTSNNNGRIKQLRSVSVCATYHTGALQIEQSEESDQGKYECVATNSAGTRYSAPANLYVRVNRKVRRVPPRFSIPPTNHEIMPGGSVNITCVAVGSPMPYVKWMLGAEDLTPEDDMPIGRNVLELNDVRQSANYTCVAMSTLGVIEAIAQITVKALPKPPGTPVVTESTATSITLTWDSGNPEPVSYYIIQHKPKNSEELYKEIDGVATTRYSVAGLSPYSDYEFRVVAVNNIGRGPPSEPVLTQTSEQAPSSAPRDVQARMLSSTTILVQWKEPEEPNGQIQGYRVYYTMDPTQHVNNWMKHNVADSQITTIGNLVPQKTYSVKVLAFTSIGDGPLSSDIQVITQTGVPGQPLNFKAEPESETSILLSWTPPRSDTIANYELVYKDGEHGEEQRITIEPGTSYRLQGLKPNSLYYFRLAARSPQGLGASTAEISARTMQSSKGYYIIIVPLKKSRGKFIKPWESPDEMELDELLKEISRKRRSIRYGREVELKPYIAAHFDVLPTEFTLGDDKHYGGFTNKQLQSGQEYVFFVLAVMEHAESKMYATSPYSDPVVSMDLDPQPITDEEEGLIWVVGPVLAVVFIICIVIAILLYKRKRAESDSRKSSIPNNKEIPSHHPTDPVELRRLNFQTPGMASHPPIPILELADHIERLKANDNLKFSQEYESIDPGQQFTWEHSNLEVNKPKNRYANVIAYDHSRVLLSAIEGIPGSDYVNANYIDGYRKQNAYIATQGSLPETFGDFWRMIWEQRSATVVMMTKLEERSRVKCDQYWPSRGTETHGLVQVTLLDTVELATYCVRTFALYKNGSSEKREVRQFQFTAWPDHGVPEHPTPFLAFLRRVKTCNPPDAGPMVVHCSAGVGRTGCFIVIDAMLERIKHEKTVDIYGHVTLMRAQRNYMVQTEDQYIFIHDALLEAVTCGNTEVPARNLYAYIQKLTQIETGENVTGMELEFKRLASSKAHTSRFISANLPCNKFKNRLVNIMPYESTRVCLQPIRGVEGSDYINASFIDGYRQQKAYIATQGPLAETTEDFWRMLWEHNSTIVVMLTKLREMGREKCHQYWPAERSARYQYFVVDPMAEYNMPQYILREFKVTDARDGQSRTVRQFQFTDWPEQGVPKSGEGFIDFIGQVHKTKEQFGQDGPISVHCSAGVGRTGVFITLSIVLERMRYEGVVDIFQTVKMLRTQRPAMVQTEDQYQFSYRAALEYLGSFDHYAT

SEQ ID NO: 60119 - protein, 1506 aa, Homo sapiens
MVHVARLLLLLLTFFLRTDAETPPRFTRTPVDQTGVSGGVASFICQATGDPRPKIVWNKKGKKVSNQRFEVIEFDDGSGSVLRIQPLRTPRDEAIYECVASNNVGEISVSTRLTVLREDQIPRGFPTIDMGPQLKVVERTRTATMLCAASGNPDPEITWFKDFLPVDTSNNNGRIKQLRSESIGGTPIRGALQIEQSEESDQGKYECVATNSAGTRYSAPANLYVRELREVRRVPPRFSIPPTNHEIMPGGSVNITCVAVGSPMPYVKWMLGAEDLTPEDDMPIGRNVLELNDVRQSANYTCVAMSTLGVIEAIAQITVKALPKPPGTPVVTESTATSITLTWDSGNPEPVSYYIIQHKPKNSEELYKEIDGVATTRYSVAGLSPYSDYEFRVVAVNNIGRGPPSEPVLTQTSEQAPSSAPRDVQARMLSSTTILVQWKEPEEPNGQIQGYRVYYTMDPTQHVNNWMKHNVADSQITTIGNLVPQKTYSVKVLAFTSIGDGPLSSDIQVITQTGVPGQPLNFKAEPESETSILLSWTPPRSDTIANYELVYKDGEHGEEQRITIEPGTSYRLQGLKPNSLYYFRLAARSPQGLGASTAEISARTMQSMFAKNFHVKAVMKTSVLLSWEIPENYNSAMPFKILYDDGKMVEEVDGRATQKLIVNLKPEKSYSFVLTNRGNSAGGLQHRVTAKTAPDVLRTKPAFIGKTNLDGMITVQLPEVPANENIKGYYIIIVPLKKSRGKFIKPWESPDEMELDELLKEISRKRRSIRYGREVELKPYIAAHFDVLPTEFTLGDDKHYGGFTNKQLQSGQEYVFFVLAVMEHAESKMYATSPYSDPVVSMDLDPQPITDEEEGLIWVVGPVLAVVFIICIVIAILLYKSSKPDRKRAESDSRKSSIPNNKEIPSHHPTDPVELRRLNFQTPGMASHPPIPILELADHIERLKANDNLKFSQEYESIDPGQQFTWEHSNLEVNKPKNRYANVIAYDHSRVLLSAIEGIPGSDYVNANYIDGYRKQNAYIATQGSLPETFGDFWRMIWEQRSATVVMMTKLEERSRVKCDQYWPSRGTETHGLVQVTLLDTVELATYCVRTFALYKNGSSEKREVRQFQFTAWPDHGVPEHPTPFLAFLRRVKTCNPPDAGPMVVHCSAGVGRTGCFIVIDAMLERIKHEKTVDIYGHVTLMRAQRNYMVQTEDQYIFIHDALLEAVTCGNTEVPARNLYAYIQKLTQIETGENVTGMELEFKRLASSKAHTSRFISANLPCNKFKNRLVNIMPYESTRVCLQPIRGVEGSDYINASFIDGYRQQKAYIATQGPLAETTEDFWRMLWEHNSTIVVMLTKLREMGREKCHQYWPAERSARYQYFVVDPMAEYNMPQYILREFKVTDARDGQSRTVRQFQFTDWPEQGVPKSGEGFIDFIGQVHKTKEQFGQDGPISVHCSAGVGRTGVFITLSIVLERMRYEGVVDIFQTVKMLRTQRPAMVQTEDQYQFSYRAALEYLGSFDHYAT

SEQ ID NO: 60120 - protein, 1912 aa, Homo sapiens
MVHVARLLLLLLTFFLRTDAETPPRFTRTPVDQTGVSGGVASFICQATGDPRPKIVWNKKGKKVSNQRFEVIEFDDGSGSVLRIQPLRTPRDEAIYECVASNNVGEISVSTRLTVLREDQIPRGFPTIDMGPQLKVVERTRTATMLCAASGNPDPEITWFKDFLPVDTSNNNGRIKQLRSESIGGTPIRGALQIEQSEESDQGKYECVATNSAGTRYSAPANLYVRELREVRRVPPRFSIPPTNHEIMPGGSVNITCVAVGSPMPYVKWMLGAEDLTPEDDMPIGRNVLELNDVRQSANYTCVAMSTLGVIEAIAQITVKALPKPPGTPVVTESTATSITLTWDSGNPEPVSYYIIQHKPKNSEELYKEIDGVATTRYSVAGLSPYSDYEFRVVAVNNIGRGPPSEPVLTQTSEQAPSSAPRDVQARMLSSTTILVQWKEPEEPNGQIQGYRVYYTMDPTQHVNNWMKHNVADSQITTIGNLVPQKTYSVKVLAFTSIGDGPLSSDIQVITQTGVPGQPLNFKAEPESETSILLSWTPPRSDTIANYELVYKDGEHGEEQRITIEPGTSYRLQGLKPNSLYYFRLAARSPQGLGASTAEISARTMQSKPSAPPQDISCTSPSSTSILVSWQPPPVEKQNGIITEYSIKYTAVDGEDDKPHEILGIPSDTTKYLLEQLEKWTEYRITVTAHTDVGPGPESLSVLIRTNEDVPSGPPRKVEVEAVNSTSVKVSWRSPVPNKQHGQIRGYQVHYVRMENGEPKGQPMLKDVMLADAQWEFDDTTEHDMIISGLQPETSYSLTVTAYTTKGDGARSKPKLVSTTGAVPGKPRLVINHTQMNTALIQWHPPVDTFGPLQGYRLKFGRKDMEPLTTLEFSEKEDHFTATDIHKGASYVFRLSARNKVGFGEEMVKEISIPEEVPTGFPQNLHSEGTTSTSVQLSWQPPVLAERNGIITKYTLLYRDINIPLLPMEQLIVPADTTMTLTGLKPDTTYDVKVRAHTSKGPGPYSPSVQFRTLPVDQVFAKNFHVKAVMKTSVLLSWEIPENYNSAMPFKILYDDGKMVEEVDGRATQKLIVNLKPEKSYSFVLTNRGNSAGGLQHRVTAKTAPDVLRTKPAFIGKTNLDGMITVQLPEVPANENIKGYYIIIVPLKKSRGKFIKPWESPDEMELDELLKEISRKRRSIRYGREVELKPYIAAHFDVLPTEFTLGDDKHYGGFTNKQLQSGQEYVFFVLAVMEHAESKMYATSPYSDPVVSMDLDPQPITDEEEGLIWVVGPVLAVVFIICIVIAILLYKRKRAESDSRKSSIPNNKEIPSHHPTDPVELRRLNFQTPGMASHPPIPILELADHIERLKANDNLKFSQEYESIDPGQQFTWEHSNLEVNKPKNRYANVIAYDHSRVLLSAIEGIPGSDYVNANYIDGYRKQNAYIATQGSLPETFGDFWRMIWEQRSATVVMMTKLEERSRVKCDQYWPSRGTETHGLVQVTLLDTVELATYCVRTFALYKNGSSEKREVRQFQFTAWPDHGVPEHPTPFLAFLRRVKTCNPPDAGPMVVHCSAGVGRTGCFIVIDAMLERIKHEKTVDIYGHVTLMRAQRNYMVQTEDQYIFIHDALLEAVTCGNTEVPARNLYAYIQKLTQIETGENVTGMELEFKRLASSKAHTSRFISANLPCNKFKNRLVNIMPYESTRVCLQPIRGVEGSDYINASFIDGYRQQKAYIATQGPLAETTEDFWRMLWEHNSTIVVMLTKLREMGREKCHQYWPAERSARYQYFVVDPMAEYNMPQYILREFKVTDARDGQSRTVRQFQFTDWPEQGVPKSGEGFIDFIGQVHKTKEQFGQDGPISVHCSAGVGRTGVFITLSIVLERMRYEGVVDIFQTVKMLRTQRPAMVQTEDQYQFSYRAALEYLGSFDHYAT

SEQ ID NO: 60121 - protein, 1890 aa, Homo sapiens
MVHVARLLLLLLTFFLRTDAETPPRFTRTPVDQTGVSGGVASFICQATGDPRPKIVWNKKGKKVSNQRFEVIEFDDGSGSVLRIQPLRTPRDEAIYECVASNNVGEISVSTRLTVLREDQIPRGFPTIDMGPQLKVVERTRTATMLCAASGNPDPEITWFKDFLPVDTSNNNGRIKQLRSGALQIEQSEESDQGKYECVATNSAGTRYSAPANLYVRVRRVPPRFSIPPTNHEIMPGGSVNITCVAVGSPMPYVKWMLGAEDLTPEDDMPIGRNVLELNDVRQSANYTCVAMSTLGVIEAIAQITVKALPKPPGTPVVTESTATSITLTWDSGNPEPVSYYIIQHKPKNSEELYKEIDGVATTRYSVAGLSPYSDYEFRVVAVNNIGRGPPSEPVLTQTSEQAPSSAPRDVQARMLSSTTILVQWKEPEEPNGQIQGYRVYYTMDPTQHVNNWMKHNVADSQITTIGNLVPQKTYSVKVLAFTSIGDGPLSSDIQVITQTGVPGQPLNFKAEPESETSILLSWTPPRSDTIANYELVYKDGEHGEEQRITIEPGTSYRLQGLKPNSLYYFRLAARSPQGLGASTAEISARTMQSKPSAPPQDISCTSPSSTSILVSWQPPPVEKQNGIITEYSIKYTAVDGEDDKPHEILGIPSDTTKYLLEQLEKWTEYRITVTAHTDVGPGPESLSVLIRTNEDVPSGPPRKVEVEAVNSTSVKVSWRSPVPNKQHGQIRGYQVHYVRMENGEPKGQPMLKDVMLADAQDMIISGLQPETSYSLTVTAYTTKGDGARSKPKLVSTTGAVPGKPRLVINHTQMNTALIQWHPPVDTFGPLQGYRLKFGRKDMEPLTTLEFSEKEDHFTATDIHKGASYVFRLSARNKVGFGEEMVKEISIPEEVPTGFPQNLHSEGTTSTSVQLSWQPPVLAERNGIITKYTLLYRDINIPLLPMEQLIVPADTTMTLTGLKPDTTYDVKVRAHTSKGPGPYSPSVQFRTLPVDQVFAKNFHVKAVMKTSVLLSWEIPENYNSAMPFKILYDDGKMVEEVDGRATQKLIVNLKPEKSYSFVLTNRGNSAGGLQHRVTAKTAPDVLRTKPAFIGKTNLDGMITVQLPEVPANENIKGYYIIIVPLKKSRGKFIKPWESPDEMELDELLKEISRKRRSIRYGREVELKPYIAAHFDVLPTEFTLGDDKHYGGFTNKQLQSGQEYVFFVLAVMEHAESKMYATSPYSDPVVSMDLDPQPITDEEEGLIWVVGPVLAVVFIICIVIAILLYKRKRAESDSRKSSIPNNKEIPSHHPTDPVELRRLNFQTPGMASHPPIPILELADHIERLKANDNLKFSQEYESIDPGQQFTWEHSNLEVNKPKNRYANVIAYDHSRVLLSAIEGIPGSDYVNANYIDGYRKQNAYIATQGSLPETFGDFWRMIWEQRSATVVMMTKLEERSRVKCDQYWPSRGTETHGLVQVTLLDTVELATYCVRTFALYKNGSSEKREVRQFQFTAWPDHGVPEHPTPFLAFLRRVKTCNPPDAGPMVVHCSAGVGRTGCFIVIDAMLERIKHEKTVDIYGHVTLMRAQRNYMVQTEDQYIFIHDALLEAVTCGNTEVPARNLYAYIQKLTQIETGENVTGMELEFKRLASSKAHTSRFISANLPCNKFKNRLVNIMPYESTRVCLQPIRGVEGSDYINASFIDGYRQQKAYIATQGPLAETTEDFWRMLWEHNSTIVVMLTKLREMGREKCHQYWPAERSARYQYFVVDPMAEYNMPQYILREFKVTDARDGQSRTVRQFQFTDWPEQGVPKSGEGFIDFIGQVHKTKEQFGQDGPISVHCSAGVGRTGVFITLSIVLERMRYEGVVDIFQTVKMLRTQRPAMVQTEDQYQFSYRAALEYLGSFDHYAT

SEQ ID NO: 60122 - protein, 1899 aa, Homo sapiens
MVHVARLLLLLLTFFLRTDAETPPRFTRTPVDQTGVSGGVASFICQATGDPRPKIVWNKKGKKVSNQRFEVIEFDDGSGSVLRIQPLRTPRDEAIYECVASNNVGEISVSTRLTVLREDQIPRGFPTIDMGPQLKVVERTRTATMLCAASGNPDPEITWFKDFLPVDTSNNNGRIKQLRSGALQIEQSEESDQGKYECVATNSAGTRYSAPANLYVRVRRVPPRFSIPPTNHEIMPGGSVNITCVAVGSPMPYVKWMLGAEDLTPEDDMPIGRNVLELNDVRQSANYTCVAMSTLGVIEAIAQITVKALPKPPGTPVVTESTATSITLTWDSGNPEPVSYYIIQHKPKNSEELYKEIDGVATTRYSVAGLSPYSDYEFRVVAVNNIGRGPPSEPVLTQTSEQAPSSAPRDVQARMLSSTTILVQWKEPEEPNGQIQGYRVYYTMDPTQHVNNWMKHNVADSQITTIGNLVPQKTYSVKVLAFTSIGDGPLSSDIQVITQTGVPGQPLNFKAEPESETSILLSWTPPRSDTIANYELVYKDGEHGEEQRITIEPGTSYRLQGLKPNSLYYFRLAARSPQGLGASTAEISARTMQSKPSAPPQDISCTSPSSTSILVSWQPPPVEKQNGIITEYSIKYTAVDGEDDKPHEILGIPSDTTKYLLEQLEKWTEYRITVTAHTDVGPGPESLSVLIRTNEDVPSGPPRKVEVEAVNSTSVKVSWRSPVPNKQHGQIRGYQVHYVRMENGEPKGQPMLKDVMLADAQWEFDDTTEHDMIISGLQPETSYSLTVTAYTTKGDGARSKPKLVSTTGAVPGKPRLVINHTQMNTALIQWHPPVDTFGPLQGYRLKFGRKDMEPLTTLEFSEKEDHFTATDIHKGASYVFRLSARNKVGFGEEMVKEISIPEEVPTGFPQNLHSEGTTSTSVQLSWQPPVLAERNGIITKYTLLYRDINIPLLPMEQLIVPADTTMTLTGLKPDTTYDVKVRAHTSKGPGPYSPSVQFRTLPVDQVFAKNFHVKAVMKTSVLLSWEIPENYNSAMPFKILYDDGKMVEEVDGRATQKLIVNLKPEKSYSFVLTNRGNSAGGLQHRVTAKTAPDVLRTKPAFIGKTNLDGMITVQLPEVPANENIKGYYIIIVPLKKSRGKFIKPWESPDEMELDELLKEISRKRRSIRYGREVELKPYIAAHFDVLPTEFTLGDDKHYGGFTNKQLQSGQEYVFFVLAVMEHAESKMYATSPYSDPVVSMDLDPQPITDEEEGLIWVVGPVLAVVFIICIVIAILLYKRKRAESDSRKSSIPNNKEIPSHHPTDPVELRRLNFQTPGMASHPPIPILELADHIERLKANDNLKFSQEYESIDPGQQFTWEHSNLEVNKPKNRYANVIAYDHSRVLLSAIEGIPGSDYVNANYIDGYRKQNAYIATQGSLPETFGDFWRMIWEQRSATVVMMTKLEERSRVKCDQYWPSRGTETHGLVQVTLLDTVELATYCVRTFALYKNGSSEKREVRQFQFTAWPDHGVPEHPTPFLAFLRRVKTCNPPDAGPMVVHCSAGVGRTGCFIVIDAMLERIKHEKTVDIYGHVTLMRAQRNYMVQTEDQYIFIHDALLEAVTCGNTEVPARNLYAYIQKLTQIETGENVTGMELEFKRLASSKAHTSRFISANLPCNKFKNRLVNIMPYESTRVCLQPIRGVEGSDYINASFIDGYRQQKAYIATQGPLAETTEDFWRMLWEHNSTIVVMLTKLREMGREKCHQYWPAERSARYQYFVVDPMAEYNMPQYILREFKVTDARDGQSRTVRQFQFTDWPEQGVPKSGEGFIDFIGQVHKTKEQFGQDGPISVHCSAGVGRTGVFITLSIVLERMRYEGVVDIFQTVKMLRTQRPAMVQTEDQYQFSYRAALEYLGSFDHYAT

SEQ ID NO: 60123 - protein, 1912 aa, Homo sapiens; identical to SEQ ID NO: 60120

SEQ ID NO: 60124 - protein, 1502 aa, Homo sapiens
MVHVARLLLLLLTFFLRTDAETPPRFTRTPVDQTGVSGGVASFICQATGDPRPKIVWNKKGKKVSNQRFEVIEFDDGSGSVLRIQPLRTPRDEAIYECVASNNVGEISVSTRLTVLREDQIPRGFPTIDMGPQLKVVERTRTATMLCAASGNPDPEITWFKDFLPVDTSNNNGRIKQLRSGGTPIRGALQIEQSEESDQGKYECVATNSAGTRYSAPANLYVRELREVRRVPPRFSIPPTNHEIMPGGSVNITCVAVGSPMPYVKWMLGAEDLTPEDDMPIGRNVLELNDVRQSANYTCVAMSTLGVIEAIAQITVKALPKPPGTPVVTESTATSITLTWDSGNPEPVSYYIIQHKPKNSEELYKEIDGVATTRYSVAGLSPYSDYEFRVVAVNNIGRGPPSEPVLTQTSEQAPSSAPRDVQARMLSSTTILVQWKEPEEPNGQIQGYRVYYTMDPTQHVNNWMKHNVADSQITTIGNLVPQKTYSVKVLAFTSIGDGPLSSDIQVITQTGVPGQPLNFKAEPESETSILLSWTPPRSDTIANYELVYKDGEHGEEQRITIEPGTSYRLQGLKPNSLYYFRLAARSPQGLGASTAEISARTMQSMFAKNFHVKAVMKTSVLLSWEIPENYNSAMPFKILYDDGKMVEEVDGRATQKLIVNLKPEKSYSFVLTNRGNSAGGLQHRVTAKTAPDVLRTKPAFIGKTNLDGMITVQLPEVPANENIKGYYIIIVPLKKSRGKFIKPWESPDEMELDELLKEISRKRRSIRYGREVELKPYIAAHFDVLPTEFTLGDDKHYGGFTNKQLQSGQEYVFFVLAVMEHAESKMYATSPYSDPVVSMDLDPQPITDEEEGLIWVVGPVLAVVFIICIVIAILLYKSKPDRKRAESDSRKSSIPNNKEIPSHHPTDPVELRRLNFQTPGMASHPPIPILELADHIERLKANDNLKFSQEYESIDPGQQFTWEHSNLEVNKPKNRYANVIAYDHSRVLLSAIEGIPGSDYVNANYIDGYRKQNAYIATQGSLPETFGDFWRMIWEQRSATVVMMTKLEERSRVKCDQYWPSRGTETHGLVQVTLLDTVELATYCVRTFALYKNGSSEKREVRQFQFTAWPDHGVPEHPTPFLAFLRRVKTCNPPDAGPMVVHCSAGVGRTGCFIVIDAMLERIKHEKTVDIYGHVTLMRAQRNYMVQTEDQYIFIHDALLEAVTCGNTEVPARNLYAYIQKLTQIETGENVTGMELEFKRLASSKAHTSRFISANLPCNKFKNRLVNIMPYESTRVCLQPIRGVEGSDYINASFIDGYRQQKAYIATQGPLAETTEDFWRMLWEHNSTIVVMLTKLREMGREKCHQYWPAERSARYQYFVVDPMAEYNMPQYILREFKVTDARDGQSRTVRQFQFTDWPEQGVPKSGEGFIDFIGQVHKTKEQFGQDGPISVHCSAGVGRTGVFITLSIVLERMRYEGVVDIFQTVKMLRTQRPAMVQTEDQYQFSYRAALEYLGSFDHYAT

SEQ ID NO: 60125 - protein, 1505 aa, Homo sapiens [sequence omitted]

SEQ ID NO: 60126 - protein, 93 aa, Homo sapiens
MVHVARLLLLLLTFFLRTDAETPPRFTRTPVDQTGVSGGVASFICQATGDPRPKIVWNKKGKKVSNQRFEVIEFDDGSGSVLRIQPLRTPRDE

SEQ ID NO: 60127 - protein, 1505 aa, Homo sapiens
MVHVARLLLLLLTFFLRTDAETPPRFTRTPVDQTGVSGGVASFICQATGDPRPKIVWNKKGKKVSNQRFEVIEFDDGSGSVLRIQPLRTPRDEAIYECVASNNVGEISVSTRLTVLREDQIPRGFPTIDMGPQLKVVERTRTATMLCAASGNPDPEITWFKDFLPVDTSNNNGRIKQLRSESIGGTPIRGALQIEQSEESDQGKYECVATNSAGTRYSAPANLYVRELREVRRVPPRFSIPPTNHEIMPGGSVNITCVAVGSPMPYVKWMLGAEDLTPEDDMPIGRNVLELNDVRQSANYTCVAMSTLGVIEAIAQITVKALPKPPGTPVVTESTATSITLTWDSGNPEPVSYYIIQHKPKNSEELYKEIDGVATTRYSVAGLSPYSDYEFRVVAVNNIGRGPPSEPVLTQTSEQAPSSAPRDVQARMLSSTTILVQWKEPEEPNGQIQGYRVYYTMDPTQHVNNWMKHNVADSQITTIGNLVPQKTYSVKVLAFTSIGDGPLSSDIQVITQTGVPGQPLNFKAEPESETSILLSWTPPRSDTIANYELVYKDGEHGEEQRITIEPGTSYRLQGLKPNSLYYFRLAARSPQGLGASTAEISARTMQSMFAKNFHVKAVMKTSVLLSWEIPENYNSAMPFKILYDDGKMVEEVDGRATQKLIVNLKPEKSYSFVLTNRGNSAGGLQHRVTAKTAPDVLRTKPAFIGKTNLDGMITVQLPEVPANENIKGYYIIIVPLKKSRGKFIKPWESPDEMELDELLKEISRKRRSIRYGREVELKPYIAAHFDVLPTEFTLGDDKHYGGFTNKQLQSGQEYVFFVLAVMEHAESKMYATSPYSDPVVSMDLDPQPITDEEEGLIWVVGPVLAVVFIICIVIAILLYKSKPDRKRAESDSRKSSIPNNKEIPSHHPTDPVELRRLNFQTPGMASHPPIPILELADHIERLKANDNLKFSQEYESIDPGQQFTWEHSNLEVNKPKNRYANVIAYDHSRVLLSAIEGIPGSDYVNANYIDGYRKQNAYIATQGSLPETFGDFWRMIWEQRSATVVMMTKLEERSRVKCDQYWPSRGTETHGLVQVTLLDTVELATYCVRTFALYKNGSSEKREVRQFQFTAWPDHGVPEHPTPFLAFLRRVKTCNPPDAGPMVVHCSAGVGRTGCFIVIDAMLERIKHEKTVDIYGHVTLMRAQRNYMVQTEDQYIFIHDALLEAVTCGNTEVPARNLYAYIQKLTQIETGENVTGMELEFKRLASSKAHTSRFISANLPCNKFKNRLVNIMPYESTRVCLQPIRGVEGSDYINASFIDGYRQQKAYIATQGPLAETTEDFWRMLWEHNSTIVVMLTKLREMGREKCHQYWPAERSARYQYFVVDPMAEYNMPQYILREFKVTDARDGQSRTVRQFQFTDWPEQGVPKSGEGFIDFIGQVHKTKEQFGQDGPISVHCSAGVGRTGVFITLSIVLERMRYEGVVDIFQTVKMLRTQRPAMVQTEDQYQFSYRAALEYLGSFDHYAT

SEQ ID NO: 60128 - protein, 1502 aa, Homo sapiens
MVHVARLLLLLLTFFLRTDAETPPRFTRTPVDQTGVSGGVASFICQATGDPRPKIVWNKKGKKVSNQRFEVIEFDDGSGSVLRIQPLRTPRDEAIYECVASNNVGEISVSTRLTVLREDQIPRGFPTIDMGPQLKVVERTRTATMLCAASGNPDPEITWFKDFLPVDTSNNNGRIKQLRSGRVFHTGALQIEQSEESDQGKYECVATNSAGTRYSAPANLYVRVNRKVRRVPPRFSIPPTNHEIMPGGSVNITCVAVGSPMPYVKWMLGAEDLTPEDDMPIGRNVLELNDVRQSANYTCVAMSTLGVIEAIAQITVKALPKPPGTPVVTESTATSITLTWDSGNPEPVSYYIIQHKPKNSEELYKEIDGVATTRYSVAGLSPYSDYEFRVVAVNNIGRGPPSEPVLTQTSEQAPSSAPRDVQARMLSSTTILVQWKEPEEPNGQIQGYRVYYTMDPTQHVNNWMKHNVADSQITTIGNLVPQKTYSVKVLAFTSIGDGPLSSDIQVITQTGVPGQPLNFKAEPESETSILLSWTPPRSDTIANYELVYKDGEHGEEQRITIEPGTSYRLQGLKPNSLYYFRLAARSPQGLGASTAEISARTMQSMFAKNFHVKAVMKTSVLLSWEIPENYNSAMPFKILYDDGKMVEEVDGRATQKLIVNLKPEKSYSFVLTNRGNSAGGLQHRVTAKTAPDVLRTKPAFIGKTNLDGMITVQLPEVPANENIKGYYIIIVPLKKSRGKFIKPWESPDEMELDELLKEISRKRRSIRYGREVELKPYIAAHFDVLPTEFTLGDDKHYGGFTNKQLQSGQEYVFFVLAVMEHAESKMYATSPYSDPVVSMDLDPQPITDEEEGLIWVVGPVLAVVFIICIVIAILLYKRKPYRKRAESDSRKSSIPNNKEIPSHHPTDPVELRRLNFQTPGMASHPPIPILELADHIERLKANDNLKFSQEYESIDPGQQFTWEHSNLEVNKPKNRYANVIAYDHSRVLLSAIEGIPGSDYVNANYIDGYRKQNAYIATQGSLPETFGDFWRMIWEQRSATVVMMTKLEERSRVKCDQYWPSRGTETHGLVQVTLLDTVELATYCVRTFALYKNGSSEKREVRQFQFTAWPDHGVPEHPTPFLAFLRRVKTCNPPDAGPMVVHCSAGVGRTGCFIVIDAMLERIKHEKTVDIYGHVTLMRAQRNYMVQTEDQYIFIHDALLEAVTCGNTEVPARNLYAYIQKLTQIETGENVTGMELEFKRLASSKAHTSRFISANLPCNKFKNRLVNIMPYESTRVCLQPIRGVEGSDYINASFIDGYRQQKAYIATQGPLAETTEDFWRMLWEHNSTIVVMLTKLREMGREKCHQYWPAERSARYQYFVVDPMAEYNMPQYILREFKVTDARDGQSRTVRQFQFTDWPEQGVPKSGEGFIDFIGQVHKTKEQFGQDGPISVHCSAGVGRTGVFITLSIVLERMRYEGVVDIFQTVKMLRTQRPAMVQTEDQYQFSYRAALEYLGSFDHYAT

SEQ ID NO: 60129 - protein, 1912 aa, Homo sapiens; identical to SEQ ID NO: 60120

SEQ ID NO: 60130 - protein, 700 aa, Homo sapiens
MEPLCPLLLVGFSLPLARALRGNETTADSNETTTTSGPPDPGASQPLLAWLLLPLLLLLLVLLLAAYFFRFRKQRKAVVSTSDKKMPNGILEEQEQQRVMLLSRSPSGPKKYFPIPVEHLEEEIRIRSADDCKQFREEFNSLPSGHIQGTFELANKEENREKNRYPNILPNDHSRVILSQLDGIPCSDYINASYIDGYKEKNKFIAAQGPKQETVNDFWRMVWEQKSATIVMLTNLKERKEEKCHQYWPDQGCWTYGNIRVCVEDCVVLVDYTIRKFCIQPQLPDGCKAPRLVSQLHFTSWPDFGVPFTPIGMLKFLKKVKTLNPVHAGPIVVHCSAGVGRTGTFIVIDAMMAMMHAEQKVDVFEFVSRIRNQRPQMVQTDMQYTFIYQALLEYYLYGDTELDVSSLEKHLQTMHGTTTHFDKIGLEEEFRKLTNVRIMKENMRTGNLPANMKKARVIQIIPYDFNRVILSMKRGQEYTDYINASFIDGYRQKDYFIATQGPLAHTVEDFWRMIWEWKSHTIVMLTEVQEREQDKCYQYWPTEGSVTHGEITIEIKNDTLSEAISIRDFLVTLNQPQARQEEQVRVVRQFHFHGWPEIGIPAEGKGMIDLIAAVQKQQQQTGNHPITVHCSAGAGRTGTFIALSNILERVKAEGLLDVFQAVKSLRLQRPHMVQTLEQYEFCYKVVQDFIDIFSDYANFK

SEQ ID NO: 60131 - protein, 642 aa, Homo sapiens
MSNRSSFSRLTWFRKQRKAVVSTSDKKMPNGILEEQEQQRVMLLSRSPSGPKKYFPIPVEHLEEEIRIRSADDCKQFREEFNSLPSGHIQGTFELANKEENREKNRYPNILPNDHSRVILSQLDGIPCSDYINASYIDGYKEKNKFIAAQGPKQETVNDFWRMVWEQKSATIVMLTNLKERKEEKCHQYWPDQGCWTYGNIRVCVEDCVVLVDYTIRKFCIQPQLPDGCKAPRLVSQLHFTSWPDFGVPFTPIGMLKFLKKVKTLNPVHAGPIVVHCSAGVGRTGTFIVIDAMMAMMHAEQKVDVFEFVSRIRNQRPQMVQTDMQYTFIYQALLEYYLYGDTELDVSSLEKHLQTMHGTTTHFDKIGLEEEFRKLTNVRIMKENMRTGNLPANMKKARVIQIIPYDFNRVILSMKRGQEYTDYINASFIDGYRQKDYFIATQGPLAHTVEDFWRMIWEWKSHTIVMLTEVQEREQDKCYQYWPTEGSVTHGEITIEIKNDTLSEAISIRDFLVTLNQPQARQEEQVRVVRQFHFHGWPEIGIPAEGKGMIDLIAAVQKQQQQTGNHPITVHCSAGAGRTGTFIALSNILERVKAEGLLDVFQAVKSLRLQRPHMVQTLEQYEFCYKVVQDFIDIFSDYANFK

SEQ ID NO: 60132 - protein, 700 aa, Homo sapiens; identical to SEQ ID NO: 60130

SEQ ID NO: 60133 - protein, 145 aa, Homo sapiens
MEPLCPLLLVGFSLPLARALRGNETTADSNETTTTSGPPDPGASQPLLAWLLLPLLLLLLVLLLAAYFFRFRKQRKAVVSTSDKKMPNGILEEQEQQRVMLLSRSPSGPKKYFPIPVEHLEEEIRIRSADDCKQFREEFNMTILG

SEQ ID NO: 60134 - protein, 669 aa, Homo sapiens
MVSQRLPRKTRGPPWSPCVHSCWWVLACRSPGLSGATRPLPTATRQPRPQALRTRAPPSRCWPGCYCRCCSSSSCSFSPPTSSGSGPKKYFPIPVEHLEEEIRIRSADDCKQFREEFNSLPSGHIQGTFELANKEENREKNRYPNILPNDHSRVILSQLDGIPCSDYINASYIDGYKEKNKFIAAQGPKQETVNDFWRMVWEQKSATIVMLTNLKERKEEKCHQYWPDQGCWTYGNIRVCVEDCVVLVDYTIRKFCIQPQLPDGCKAPRLVSQLHFTSWPDFGVPFTPIGMLKFLKKVKTLNPVHAGPIVVHCSAGVGRTGTFIVIDAMMAMMHAEQKVDVFEFVSRIRNQRPQMVQTDMQYTFIYQALLEYYLYGDTELDVSSLEKHLQTMHGTTTHFDKIGLEEEFRKLTNVRIMKENMRTGNLPANMKKARVIQIIPYDFNRVILSMKRGQEYTDYINASFIDGYRQKDYFIATQGPLAHTVEDFWRMIWEWKSHTIVMLTEVQEREQDKCYQYWPTEGSVTHGEITIEIKNDTLSEAISIRDFLVTLNQPQARQEEQVRVVRQFHFHGWPEIGIPAEGKGMIDLIAAVQKQQQQTGNHPITVHCRNSMNSATKWYKILLIYFLIMLISNEDSCLKIFFNLMEQRRSHFPQDARLSPPLSGTAFAL

SEQ ID NO: 60135 - protein, 140 aa, Homo sapiens
MEPLCPLLLVGFSLPLARALRGNETTADSNETTTTSGPPDPGASQPLLAWLLLPLLLLLLVLLLAAYFFRFRKQRKAVVSTSDKKMPNGILEEQEQQRVMLLSRSPSGPKKYFPIPVEHLEEEIRIRSADDCKQFREEFN

SEQ ID NO: 60136 - protein, 154 aa, Homo sapiens
MEPLCPLLLVGFSLPLARALRGNETTADSNETTTTSGPPDPGASQPLLAWLLLPLLLLLLVLLLAAYFFRFRKQRKAVVSTSDKKMPNGILEEQEQQRVMLLSRSPSGPKKYFPIPVEHLEEEIRIRSADDCKQFREEFNSLPSGHIQGTFELA

SEQ ID NO: 60137 - protein, 1907 aa, Homo sapiens
MAPEPAPGRTMVPLVPALVMLGLVAGAHGDSKPVFIKVPEDQTGLSGGVASFVCQATGEPKPRITWMKKGKKVSSQRFEVIEFDDGAGSVLRIQPLRVQRDEAIYECTATNSLGEINTSAKLSVLEEEQLPPGFPSIDMGPQLKVVEKARTATMLCAAGGNPDPEISWFKDFLPVDPATSNGRIKQLRSGALQIESSEESDQGKYECVATNSAGTRYSAPANLYVRVRRVAPRFSIPPSSQEVMPGGSVNLTCVAVGAPMPYVKWMMGAEELTKEDEMPVGRNVLELSNVVRSANYTCVAISSLGMIEATAQVTVKALPKPPIDLVVTETTATSVTLTWDSGNSEPVTYYGIQYRAAGTEGPFQEVDGVATTRYSIGGLSPFSEYAFRVLAVNSIGRGPPSEAVRARTGEQAPSSPPRRVQARMLSASTMLVQWEPPEEPNGLVRGYRVYYTPDSRRPPNAWHKHNTDAGLLTTVGSLLPGITYSLRVLAFTAVGDGPPSPTIQVKTQQGVPAQPADFQAEVESDTRIQLSWLLPPQERIIMYELVYWAAEDEDQQHKVTFDPTSSYTLEDLKPDTLYRFQLAARSDMGVGVFTPTIEARTAQSTPSAPPQKVMCVSMGSTTVRVSWVPPPADSRNGVITQYSVAYEAVDGEDRGRHVVDGISREHSSWDLVGLEKWTEYRVWVRAHTDVGPGPESSPVLVRTDEDVPSGPPRKVEVEPLNSTAVHVYWKLPVPSKQHGQIRGYQVTYVRLENGEPRGLPIIQDVMLAEAQWRPEESEDYETTISGLTPETTYSVTVAAYTTKGDGARSKPKIVTTTGAVPGRPTMMISTTAMNTALLQWHPPKELPGELLGYRLQYCRADEARPNTIDFGKDDQHFTVTGLHKGTTYIFRLAAKNRAGLGEEFEKEIRTPEDLPSGFPQNLHVTGLTTSTTELAWDPPVLAERNGRIISYTVVFRDINSQQELQNITTDTRFTLTGLKPDTTYDIKVRAWTSKGSGPLSPSIQSRTMPVEQVFAKNFRVAAAMKTSVLLSWEVPDSYKSAVPFKILYNGQSVEVDGHSMRKLIADLQPNTEYSFVLMNRGSSAGGLQHLVSIRTAPDLLPHKPLPASAYIEDGRFDLSMPHVQDPSLVRWFYIVVVPIDRVGGSMLTPRWSTPEELELDELLEAIEQGGEEQRRRRRQAERLKPYVAAQLDVLPETFTLGDKKNYRGFYNRPLSPDLSYQCFVLASLKEPMDQKRYASSPYSDEIVVQVTPAQQQEEPEMLWVTGPVLAVILIILIVIAILLFKRKRTHSPSSKDEQSIGLKDSLLAHSSDPVEMRRLNYQTPGMRDHPPIPITDLADNIERLKANDGLKFSQEYESIDPGQQFTWENSNLEVNKPKNRYANVIAYDHSRVILTSIDGVPGSDYINANYIDGYRKQNAYIATQGPLPETMGDFWRMVWEQRTATVVMMTRLEEKSRVKCDQYWPARGTETCGLIQVTLLDTVELATYTVRTFALHKSGSSEKRELRQFQFMAWPDHGVPEYPTPILAFLRRVKACNPLDAGPMVVHCSAGVGRTGCFIVIDAMLERMKHEKTVDIYGHVTCMRSQRNYMVQTEDQYVFIHEALLEAATCGHTEVPARNLYAHIQKLGQVPPGESVTAMELEFKLLASSKAHTSRFISANLPCNKFKNRLVNIMPYELTRVCLQPIRGVEGSDYINASFLDGYRQQKAYIATQGPLAESTEDFWRMLWEHNSTIIVMLTKLREMGREKCHQYWPAERSARYQYFVVDPMAEYNMPQYILREFKVTDARDGQSRTIRQFQFTDWPEQGVPKTGEGFIDFIGQVHKTKEQFGQDGPITVHCSAGVGRTGVFITLSIVLERMRYEGVVDMFQTVKTLRTQRPAMVQTEDQYQLCYRAALEYLGSFDHYAT

SEQ ID NO: 60138 - protein, 1898 aa, Homo sapiens
MAPEPAPGRTMVPLVPALVMLGLVAGAHGDSKPVFIKVPEDQTGLSGGVASFVCQATGEPKPRITWMKKGKKVSSQRFEVIEFDDGAGSVLRIQPLRVQRDEAIYECTATNSLGEINTSAKLSVLEEEQLPPGFPSIDMGPQLKVVEKARTATMLCAAGGNPDPEISWFKDFLPVDPATSNGRIKQLRSGALQIESSEESDQGKYECVATNSAGTRYSAPANLYVRVRRVAPRFSIPPSSQEVMPGGSVNLTCVAVGAPMPYVKWMMGAEELTKEDEMPVGRNVLELSNVVRSANYTCVAISSLGMIEATAQVTVKALPKPPIDLVVTETTATSVTLTWDSGNSEPVTYYGIQYRAAGTEGPFQEVDGVATTRYSIGGLSPFSEYAFRVLAVNSIGRGPPSEAVRARTGEQAPSSPPRRVQARMLSASTMLVQWEPPEEPNGLVRGYRVYYTPDSRRPPNAWHKHNTDAGLLTTVGSLLPGITYSLRVLAFTAVGDGPPSPTIQVKTQQGVPAQPADFQAEVESDTRIQLSWLLPPQERIIMYELVYWAAEDEDQQHKVTFDPTSSYTLEDLKPDTLYRFQLAARSDMGVGVFTPTIEARTAQSTPSAPPQKVMCVSMGSTTVRVSWVPPPADSRNGVITQYSVAYEAVDGEDRGRHVVDGISREHSSWDLVGLEKWTEYRVWVRAHTDVGPGPESSPVLVRTDEDVPSGPPRKVEVEPLNSTAVHVYWKLPVPSKQHGQIRGYQVTYVRLENGEPRGLPIIQDVMLAEAQETTISGLTPETTYSVTVAAYTTKGDGARSKPKIVTTTGAVPGRPTMMISTTAMNTALLQWHPPKELPGELLGYRLQYCRADEARPNTIDFGKDDQHFTVTGLHKGTTYIFRLAAKNRAGLGEEFEKEIRTPEDLPSGFPQNLHVTGLTTSTTELAWDPPVLAERNGRIISYTVVFRDINSQQELQNITTDTRFTLTGLKPDTTYDIKVRAWTSKGSGPLSPSIQSRTMPVEQVFAKNFRVAAAMKTSVLLSWEVPDSYKSAVPFKILYNGQSVEVDGHSMRKLIADLQPNTEYSFVLMNRGSSAGGLQHLVSIRTAPDLLPHKPLPASAYIEDGRFDLSMPHVQDPSLVRWFYIVVVPIDRVGGSMLTPRWSTPEELELDELLEAIEQGGEEQRRRRRQAERLKPYVAAQLDVLPETFTLGDKKNYRGFYNRPLSPDLSYQCFVLASLKEPMDQKRYASSPYSDEIVVQVTPAQQQEEPEMLWVTGPVLAVILIILIVIAILLFKRKRTHSPSSKDEQSIGLKDSLLAHSSDPVEMRRLNYQTPGMRDHPPIPITDLADNIERLKANDGLKFSQEYESIDPGQQFTWENSNLEVNKPKNRYANVIAYDHSRVILTSIDGVPGSDYINANYIDGYRKQNAYIATQGPLPETMGDFWRMVWEQRTATVVMMTRLEEKSRVKCDQYWPARGTETCGLIQVTLLDTVELATYTVRTFALHKSGSSEKRELRQFQFMAWPDHGVPEYPTPILAFLRRVKACNPLDAGPMVVHCSAGVGRTGCFIVIDAMLERMKHEKTVDIYGHVTCMRSQRNYMVQTEDQYVFIHEALLEAATCGHTEVPARNLYAHIQKLGQVPPGESVTAMELEFKLLASSKAHTSRFISANLPCNKFKNRLVNIMPYELTRVCLQPIRGVEGSDYINASFLDGYRQQKAYIATQGPLAESTEDFWRMLWEHNSTIIVMLTKLREMGREKCHQYWPAERSARYQYFVVDPMAEYNMPQYILREFKVTDARDGQSRTIRQFQFTDWPEQGVPKTGEGFIDFIGQVHKTKEQFGQDGPITVHCSAGVGRTGVFITLSIVLERMRYEGVVDMFQTVKTLRTQRPAMVQTEDQYQLCYRAALEYLGSFDHYAT

SEQ ID NO: 60139 - protein, 1907 aa, Homo sapiens; identical to SEQ ID NO: 60137

SEQ ID NO: 60140 - protein, 1266 aa, Homo sapiens
MYELVYWAAEDEDQQHKVTFDPTSSYTLEDLKPDTLYRFQLAARSDMGVGVFTPTIEARTAQSMPSGPPRKVEVEPLNSTAVHVYWKLPVPSKQHGQIRGYQVTYVRLENGEPRGLPIIQDVMLAEAQETTISGLTPETTYSVTVAAYTTKGDGARSKPKIVTTTGAVPGRPTMMISTTAMNTALLQWHPPKELPGELLGYRLQYCRADEARPNTIDFGKDDQHFTVTGLHKGTTYIFRLAAKNRAGLGEEFEKEIRTPEDLPSGFPQNLHVTGLTTSTTELAWDPPVLAERNGRIISYTVVFRDINSQQELQNITTDTRFTLTGLKPDTTYDIKVRAWTSKGSGPLSPSIQSRTMPVEQVFAKNFRVAAAMKTSVLLSWEVPDSYKSAVPFKILYNGQSVEVDGHSMRKLIADLQPNTEYSFVLMNRGSSAGGLQHLVSIRTAPDLLPHKPLPASAYIEDGRFDLSMPHVQDPSLVRWFYIVVVPIDRVGGSMLTPRWSTPEELELDELLEAIEQGGEEQRRRRRQAERLKPYVAAQLDVLPETFTLGDKKNYRGFYNRPLSPDLSYQCFVLASLKEPMDQKRYASSPYSDEIVVQVTPAQQQEEPEMLWVTGPVLAVILIILIVIAILLFKRKRTHSPSSKDEQSIGLKDSLLAHSSDPVEMRRLNYQTPGSSVPSCPNTSSMRDHPPIPITDLADNIERLKANDGLKFSQEYESIDPGQQFTWENSNLEVNKPKNRYANVIAYDHSRVILTSIDGVPGSDYINANYIDGYRKQNAYIATQGPLPETMGDFWRMVWEQRTATVVMMTRLEEKSRVKCDQYWPARGTETCGLIQVTLLDTVELATYTVRTFALHKSGSSEKRELRQFQFMAWPDHGVPEYPTPILAFLRRVKACNPLDAGPMVVHCSAGVGRTGCFIVIDAMLERMKHEKTVDIYGHVTCMRSQRNYMVQTEDQYVFIHEALLEAATCGHTEVPARNLYAHIQKLGQVPPGESVTAMELEFKLLASSKAHTSRFISANLPCNKFKNRLVNIMPYELTRVCLQPIRGVEGSDYINASFLDGYRQQKAYIATQGPLAESTEDFWRMLWEHNSTIIVMLTKLREMGREKCHQYWPAERSARYQYFVVDPMAEYNMPQYILREFKVTDARDGQSRTIRQFQFTDWPEQGVPKTGEGFIDFIGQVHKTKEQFGQDGPITVHCSAGVGRTGVFITLSIVLERMRYEGVVDMFQTVKTLRTQRPAMVQTEDQYQLCYRAALEYLGSFDHYAT

SEQ ID NO: 60141 - protein, 1898 aa, Homo sapiens; identical to SEQ ID NO: 60138

SEQ ID NO: 60142 - protein, 1202 aa, Homo sapiens
MMCEVMPTISEAEGPPGGGGGHGSGSPSQPDADSHFEQLMVSMLEERDRLLDTLRETQETLALTQGKLHEVGHERDSLQRQLNTALPQEFAALTKELNVCREQLLEREEEIAELKAERNNTRLLLEHLECLVSRHERSLRMTVVKRQAQSPAGVSSEVEVLKALKSLFEHHKALDEKVRERLRVALERCSLLEEELGATHKELMILKEQNNQKKTLTDGVLDINHEQENTPSTSGKRSSDGSLSHEEDLAKVIELQEIISKQSREQSQMKERLASLSSHVTELEEDLDTARKDLIKSEEMNTKLQRDVREAMAQKEDMEERITTLEKRYLAAQREATSVHDLNDKLENEIANKDSMHRQTEDKNRQLQERLELAEQKLQQTLRKAETLPEVEAELAQRVAALSKAEERHGNIEERLRQMEAQLEEKNQELQRARQREKMNEEHNKRLSDTVDKLLSESNERLQLHLKERMAALEDKNSLLREVESAKKQLEETQHDKDQLVLNIEALRAELDHMRLRGASLHHGRPHLGSVPDFRFPMADGHTDSYSTSAVLRRPQKGRLAALRDEPSKVQTLNEQDWERAQQASVLANVAQAFESDADVSDGEDDRDTLLSSVDLLSPSGQADAHTLAMMLQEQLDAINKEIRLIQEEKENTEQRAEEIESRVGSGSLDNLGRFRSMSSIPPYPASSLASSSPPGSGRSTPRRIPHSPAREVDRLGVMTLLPPSREEVRDDKTTIKCETSPPSSPRALRLDRLHKGALHTVSHEDIRDIRNSTGSQDGPVSNPSSSNSSQDSLHKAPKKKGIKSSIGRLFGKKEKGRPGQTGKEALGQAGVSETDNSSQDALGLSKLGGQAEKNRKLQKKHELLEEARRQGLPFAQWDGPTVVVWLELWVGMPAWYVAACRANVKSGAIMSALSDTEIQREIGISNPLHRLKLRLAIQEIMSLTSPSAPPTSRTTLAYGDMNHEWIGNEWLPSLGLPQYRSYFMECLVDARMLDHLTKKDLRGQLKMVDSFHRNSFQCGIMCLRRLNYDRKELERKREESQSEIKDVLVWSNDRVIRWILSIGLKEYANNLIESGVHGALLALDETFDFSALALLLQIPTQNTQARAVLEREFNNLLVMGTDRRFDEDDDKSFRRAPSWRKKFRPKDIRGLAAGSAETLPANFRVTSSMSSPSMQPKKMQMDGNVSGTQRLDSATVRTYSC

SEQ ID NO: 60143 - protein, 1185 aa, Homo sapiens
MMCEVMPTISEAEGPPGGGGGHGSGSPSQPDADSHFEQLMVSMLEERDRLLDTLRETQETLALTQGKLHEVGHERDSLQRQLNTALPQEFAALTKELNVCREQLLEREEEIAELKAERNNTRLLLEHLECLVSRHERSLRMTVVKRQAQSPAGVSSEVEVLKALKSLFEHHKALDEKVRERLRVALERCSLLEEELGATHKELMILKEQNNQKKTLTDGVLDINHEQENTPSTSGKRSSDGSLSHEEDLAKVIELQEIISKQSREQSQMKERLASLSSHVTELEEDLDTARKDLIKSEEMNTKLQRDVREAMAQKEDMEERITTLEKRYLAAQREATSVHDLNDKLENEIANKDSMHRQTEDKNRQLQERLELAEQKLQQTLRKAETLPEVEAELAQRVAALSKAEERHGNIEERLRQMEAQLEEKNQELQRARQREKMNEEHNKRLSDTVDKLLSESNERLQLHLKERMAALEDKNSLLREVESAKKQLEETQHDKDQLVLNIEALRAELDHMRLRGASLHHGRPHLGSVPDFRFPMADGHTDSYSTSAVLRRPQKGRLAALRDEPSKVQTLNEQDWERAQQASVLANVAQAFESDADVSDGEDDRDTLLSSVDLLSPSGQADAHTLAMMLQEQLDAINKEIRLIQEEKENTEQRAEEIESRVGSGSLDNLGRFRSMSSIPPYPASSLASSSPPGSGRSTPRRIPHSPAREVDRLGVMTLLPPSREEVRDDKTTIKCETSPPSSPRALRLDRLHKGALHTVSHEDIRDIRNSTGSQDGPVSNPSSSNSSQDSLHKAPKKKGIKSSIGRLFGKKEKGRPGQTGKEALGQAGVSETDNSSQDALGLSKLGGQAEKNRKLQKKHELLEEARRQGLPFAQWDGPTVVVWLELWVGMPAWYVAACRANVKSGAIMSALSDTEIQREIGISNPLHRLKLRLAIQEIMSLTSPSAPPTSRTTLAYGDMNHEWIGNEWLPSLGLPQYRSYFMECLVDARMLDHLTKKDLRGQLKMVDSFHRNSFQCGIMCLRRLNYDRKELERKREESQSEIKDVLVWSNDRVIRWILSIGLKEYANNLIESGVHGALLALDETFDFSALALLLQIPTQNTQARAVLEREFNNLLVMGTDRRFDEDDDKSFRRAPSWRKKFRPKDIRGLAAGSAETLPANFRVTSSMSSPSMQPKKMQMDGM

SEQ ID NO: 60144 - protein, 158 aa, Homo sapiens
MMCEVMPTISEAEGPPGGGGGHGSGSPSQPDADSHFEQLMVSMLEERDRLLDTLRETQETLALTQGKLHEVGHERDSLQRQLNTALPQEFAALTKELNVCREQLLEREEEIAELKAERNNTRLLLEHLECLVSRHERSLRMTVVKRQAQSPAGVSSEV

SEQ ID NO: 60145 - protein, 99 aa, Homo sapiens
MMCEVMPTISEAEGPPGGGGGHGSGSPSQPDADSHFEQLMVSMLEERDRLLDTLRETQETLALTQGKLHEVGHERDSLQRQLNTALPQEFAALTKELNV

SEQ ID NO: 60146 - protein, 699 aa, Homo sapiens
MRLRGASLHHGRPHLGSVPDFRFPMADGHTDSYSTSAVLRRPQKGRLAALRDEPSKVQTLNEQDWERAQQASVLANVAQAFESDADVSDGEDDRDTLLSSVDLLSPSGQADAHTLAMMLQEQLDAINKEIRLIQEEKENTEQRAEEIESRVGSGSLDNLGRFRSMSSIPPYPASSLASSSPPGSGRSTPRRIPHSPAREVDRLGVMTLPSDLRKHRRKLPPSREEVRDDKTTIKCETSPPSSPRALRLDRLHKGALHTVSHEDIRDIRNSTGSQDGPVSNPSSSNSSQDSLHKAPKKKGIKSSIGRLFGKKEKGRPGQTGKEALGQAGVSETDNSSQDALGLSKLGGQAEKNRKLQKKHELLEEARRQGLPFAQWDGPTVVVWLELWVGMPAWYVAACRANVKSGAIMSALSDTEIQREIGISNPLHRLKLRLAIQEIMSLTSPSAPPTSRTTLAYGDMNHEWIGNEWLPSLGLPQYRSYFMECLVDARMLDHLTKKDLRGQLKMVDSFHRNSFQCGIMCLRRLNYDRKELERKREESQSEIKDVLVWSNDRVIRWILSIGLKEYANNLIESGVHGALLALDETFDFSALALLLQIPTQNTQARAVLEREFNNLLVMGTDRRFDEDDDKSFRRAPSWRKKFRPKDIRGLAAGSAETLPANFRVTSSMSSPSMQPKKMQMDGNVSGTQRLDSATVRTYSC

SEQ ID NO: 60147 - protein, 1194 aa, Homo sapiens
MMCEVMPTISEDGRRGSALGPDEAGGELERLMVTMLTERERLLETLREAQDGLATAQLRLRELGHEKDSLQRQLSIALPQEFAALTKELNLCREQLLEREEEIAELKAERNNTRLLLEHLECLVSRHERSLRMTVVKRQAQSPGGVSSEVEVLKALKSLFEHHKALDEKVRERLRMALERVAVLEEELELSNQETLNLREQLSRRRSGLEEPGKDGDGQTLANGLGPGGDSNRRTAELEEALERQRAEVCQLRERLAVLCRQMSQLEEELGTAHRELGKAEEANSKLQRDLKEALAQREDMEERITTLEKRYLSAQREATSLHDANDKLENELASKESLYRQSEEKSRQLAEWLDDAKQKLQQTLQKAETLPEIEAQLAQRVAALNKAEERHGNFEERLRQLEAQLEEKNQELQRARQREKMNDDHNKRLSETVDKLLSESNERLQLHLKERMGALEEKNSLSEEIANMKKLQDELLLNKEQLLAEMERMQMEIDQLRGRPPSSYSRSLPGSALELRYSQAPTLPSGAHLDPYVAGSGRAGKRGRWSGVKEEPSKDWERSAPAGSIPPPFPGELDGSDEEEAEGMFGAELLSPSGQADVQTLAIMLQEQLEAINKEIKLIQEEKETTEQRAEELESRVSSSGLDSLGRYRSSCSLPPSLTTSTLASPSPPSSGHSTPRLAPPSPAREGTDKANHVPKEEAGAPRGEGPAIPGDTPPPTPRSARLERMTQALALQAGSLEDGGPPRGSEGTPDSLHKAPKKKSIKSSIGRLFGKKEKGRMGPPGRDSSSLAGTPSDETLATDPLGLAKLTGPGDKDRRNKRKHELLEEACRQGLPFAAWDGPTVVSWLELWVGMPAWYVAACRANVKSGAIMANLSDTEIQREIGISNPLHRLKLRLAIQEMVSLTSPSAPASSRTSTGNVWMTHEEMESLTATTKPETKEISWEQILAYGDMNHEWVGNDWLPSLGLPQYRSYFMESLVDARMLDHLNKKELRGQLKMVDSFHRVSLHYGIMCLKRLNYDRKDLERRREESQTQIRDVMVWSNERVMGWVSGLGLKEFATNLTESGVHGALLALDETFDYSDLALLLQIPTQNAQARQLLEKEFSNLISLGTDRRLDEDSAKSFSRSPSWRKMFREKDLRGVTPDSAEMLPPNFRSAAAGALGSPGLPLRKLQPEGQTSGSSRADGVSVRTYSC

SEQ ID NO: 60148 - protein, 576 aa, Homo sapiens
MSGQEFAALTKELNLCREQLLEREEEIAELKAERNNTRLLLEHLECLVSRHERSLRMTVVKRQAQSPGGVSSEVEVLKALKSLFEHHKALDEKVRERLRMALERVAVLEEELELSNQETLNLREQLSRRRSGLEEPGKDGDGQTLANGLGPGGDSNRRTAELEEALERQRAEVCQLRERLAVLCRQMSQLEEELGTAHRELGKAEEANSKLQRDLKEALAQREDMEERITTLEKRYLSAQREATSLHDANDKLENELASKESLYRQSEEKSRQLAEWLDDAKQKLQQTLQKAETLPEIEAQLAQRVAALNKAEERHGNFEERLRQLEAQLEEKNQELQRARQREKMNDDHNKRLSETVDKLLSESNERLQLHLKERMGALEEKNSLSEEIANMKKLQDELLLNKEQLLAEMERMQMEIDQLRGRPPSSYSRSLPGSALELRYSQAPTLPSGAHLDPYVAGSGRAGKRGRWSGVKEEPSKDWERSAPAGSIPPPFPGELDGSDEEEAEGMFGAELLSPSGQADVQTLAIMLQEQLEAINKEIKIMSLRRKLELHEGRGRPSQETPHHPLPALPVLRE

SEQ ID NO: 60149 - protein, 1445 aa, Homo sapiens
MRRLLEPCWWILFLKITSSVLHYVVCFPALTEGYVGALHENRHGSAVQIRRRKASGDPYWAYSGAYGPEHWVTSSVSCGGRHQSPIDILDQYARVGEEYQELQLDGFDNESSNKTWMKNTGKTVAILLKDDYFVSGAGLPGRFKAEKVEFHWGHSNGSAGSEHSINGRRFPVEMQIFFYNPDDFDSFQTAISENRIIGAMAIFFQVSPRDNSALDPIIHGLKGVVHHEKETFLDPFVLRDLLPASLGSYYRYTGSLTTPPCSEIVEWIVFRRPVPISYHQLEAFYSIFTTEQQDHVKSVEYLRNNFRPQQRLHDRVVSKSAVRDSWNHDMTDFLENPLGTEASKVCSSPPIHMKVQPLNQTALQVSWSQPETIYHPPIMNYMISYSWTKNEDEKEKTFTKDSDKDLKATISHVSPDSLYLFRVQAVCRNDMRSDFSQTMLFQANTTRIFQGTRIVKTGVPTASPASSADMAPISSGSSTWTSSGIPFSFVSMATGMGPSSSGSQATVASVVTSTLLAGLGFGGGGISSFPSTVWPTRLPTAASASKQAARPVLATTEALASPGPDGDSSPTKDGEGTEEGEKDEKSESEDGEREHEEDGEKDSEKKEKSGVTHAAEERNQTEPSPTPSSPNRTAEGGHQTIPGHEQDHTAVPTDQTGGRRDAGPGLDPDMVTSTQVPPTATEEQYAGSDPKRPEMPSKKPMSRGDRFSEDSRFITVNPAEKNTSGMISRPAPGRMEWIIPLIVVSALTFVCLILLIAVLVYWRGCNKIKSKGFPRRFREVPSSGERGEKGSRKCFQTAHFYVEDSSSPRVVPNESIPIIPIPDDMEAIPVKQFVKHIGELYSNNQHGFSEDFEEVQRCTADMNITAEHSNHPENKHKNRYINILAYDHSRVKLRPLPGKDSKHSDYINANYVDGYNKAKAYIATQGPLKSTFEDFWRMIWEQNTGIIVMITNLVEKGRRKCDQYWPTENSEEYGNIIVTLKSTKIHACYTVRRFSIRNTKVKKGQKGNPKGRQNERVVIQYHYTQWPDMGVPEYALPVLTFVRRSSAARMPETGPVLVHCSAGVGRTGTYIVIDSMLQQIKDKSTVNVLGFLKHIRTQRNYLVQTEEQYIFIHDALLEAILGKETEVSSNQLHSYVNSILIPGVGGKTRLEKQFKLVTQCNAKYVECFSAQKECNKEKNRNSSVVPSERARVGLAPLPGMKGTDYINASYIMGYYRSNEFIITQHPLPHTTKDFWRMIWDHNAQIIVMLPDNQSLAEDEFVYWPSREESMNCEAFTVTLISKDRLCLSNEEQIIIHDFILEATQDDYVLEVRHFQCPKWPNPDAPISSTFELINVIKEEALTRDGPTIVHDEYGAVSAGMLCALTTLSQQLENENAVDVFQVAKMINLMRPGVFTDIEQYQFIYKAMLSLVSTKENGNGPMTVDKNGAVLIADESDPAESMESLV

SEQ ID NO: 60150 - protein, 102 aa, Homo sapiens
MRRLLEPCWWILFLKITSSVLHYVVCFPALTEGYVGALHENRHGSAVQIRRRKASGDPYWAYSGKSSCSNGDHTGQLTSHSTHLKAHFESLLCLSSVCSNLS

SEQ ID NO: 60151 - protein, 937 aa, Homo sapiens
MAGAGGGLGVWGNLVLLGLCSWTGARAPAPNPGRNLTVETQTTSSISLSWEVPDGLDSQNSNYWVQCTGDGGTTETRNTTATNVTVDGLGPGSLYTCSVWVEKDGVNSSVGTVTTATAPNPVRNLTVEAQTNSSIALTWEVPDGPDPQNSTYGVEYTGDGGRAGTRSTAHTNITVDRLEPGCLYVFSVWVGKNGINSSRETRNATTAPNPVRNLHMETQTNSSIALCWEVPDGPYPQDYTYWVEYTGDGGGTETRNTTNTSVTAERLEPGTLYTFSVWAEKNGARGSRQNVSISTVPNAVTSLSKQDWTNSTIALRWTAPQGPGQSSYSYWVSWVREGMTDPRTQSTSGTDITLKELEAGSLYHLTVWAERNEVRGYNSTLTAATAPNEVTDLQNETQTKNSVMLWWKAPGDPHSQLYVYWVQWASKGHPRRGQDPQANWVNQTSRTNETWYKVEALEPGTLYNFTVWAERNDVASSTQSLCASTYPDTVTITSCVSTSAGYGVNLIWSCPQGGYEAFELEVGGQRGSQDRSSCGEAVSVLGLGPARSYPATITTIWDGMKVVSHSVVCHTESAGVIAGAFVGILLFLILVGLLIFFLKRRNKKKQQKPELRDLVFSSPGDIPAEDFADHVRKNERDSNCGFADKYQQLSLVGHSQSQMVASASENNAKNRYRNVLPYDWSRVPLKPIHEEPGSDYINASFMPGLWSPQEFIATQGPLPQTVGDFWRLVWEQQSHTLVMLTNCMEAGRVKCEHYWPLDSQPCTHGHLRVTLVGEEVMENWTVRELLLLQVEEQKTLSVRQFHYQAWPDHGVPSSPDTLLAFWRMLRQWLDQTMEGGPPIVHCSAGVGRTGTLIALDVLLRQLQSEGLLGPFSFVRKMRESRPLMVQTEAQYVFLHQCILRFLQQSAQAPAEKEVPYEDVENLIYENVAAIQAHKLEV

SEQ ID NO: 60152 - protein, 1115 aa, Homo sapiens
MAGAGGGLGVWGNLVLLGLCSWTGARAPAPNPGRNLTVETQTTSSISLSWEVPDGLDSQNSNYWVQCTGDGGTTETRNTTATNVTVDGLGPGSLYTCSVWVEKDGVNSSVGTVTTATAPNPVRNLRVEAQTNSSIALTWEVPDGPDPQNSTYGVEYTGDGGRAGTRSTAHTNITVDGLEPGCLYAFSMWVGKNGINSSRETRNATTAHNPVRNLRVEAQTTSSISLSWEVPDGTDPQNSTYCVQCTGDGGRTETRNTTDTRVTVDGLGPGSLYTCSVWVEKDGVNSSVEIVTSATAPNPVRNLTVEAQTNSSIALTWEVPDGPDPQNSTYGVEYTGDGGRAGTRSTAHTNITVDRLEPGCLYVFSVWVGKNGINSSRETRNATTAPNPVRNLHMETQTNSSIALCWEVPDGPYPQDYTYWVEYTGDGGGTETRNTTNTSVTAERLEPGTLYTFSVWAEKNGARGSRQNVSISTVPNAVTSLSKQDWTNSTIALRWTAPQGPGQSSYSYWVSWVREGMTDPRTQSTSGTDITLKELEAGSLYHLTVWAERNEVRGYNSTLTAATAPNEVTDLQNETQTKNSVMLWWKAPGDPHSQLYVYWVQWASKGHPRRGQDPQANWVNQTSRTNETWYKVEALEPGTLYNFTVWAERNDVASSTQSLCASTYPDTVTITSCVSTSAGYGVNLIWSCPQGGYEAFELEVGGQRGSQDRSSCGEAVSVLGLGPARSYPATITTIWDGMKVVSHSVVCHTESAGVIAGAFVGILLFLILVGLLIFFLKRRNKKKQQKPELRDLVFSSPGDIPAEDFADHVRKNERDSNCGFADKYQQLSLVGHSQSQMVASASENNAKNRYRNVLPYDWSRVPLKPIHEEPGSDYINASFMPGLWSPQEFIATQGPLPQTVGDFWRLVWEQQSHTLVMLTNCMEAGRVKCEHYWPLDSQPCTHGHLRVTLVGEEVMENWTVRELLLLQVEEQKTLSVRQFHYQAWPDHGVPSSPDTLLAFWRMLRQWLDQTMEGGPPIVHCSAGVGRTGTLIALDVLLRQLQSEGLLGPFSFVRKMRESRPLMVQTEAQYVFLHQCILRFLQQSAQAPAEKEVPYEDVENLIYENVAAIQAHKLEV

SEQ ID NO: 60153 - protein, 425 aa, Homo sapiens
MKPAAREARLPPRSPGLRWALPLLLLLLRLGQILCAGGTPSPIPDPSVATVATGENGITQISSTAESFHKQNGTGTPQVETNTSEDGESSGANDSLRTPEQGSNGTDGASQKTPSSTGPSPVFDIKAVSISPTNVILTWKSNDTAASEYKYVVKHKMENEKTITVVHQPWCNITGLRPATSYVFSITPGIGNETWGDPRVIKVITEPIPVSDLRVALTGVRKAALSWSNGNGTASCRVLLESIGSHEELTQDSRLQVNISGLKPGVQYNINPYLLQSNKTKGDPLGTEGGLDASNTERSRAGSPTAPVHDESLVGPVDPSSGQQSRDTEVLLVGLEPGTRYNATVYSQAANGTEGQPQAIEFRTNAIQVFDVTAVNISATSLTLIWKVSDNESSSNYTYKIHVAGETDSSNLNVSEPRAVIPGLR

SEQ ID NO: 60154 - protein, 1337 aa, Homo sapiens
MKPAAREARLPPRSPGLRWALPLLLLLLRLGQILCAGGTPSPIPDPSVATVATGENGITQISSTAESFHKQNGTGTPQVETNTSEDGESSGANDSLRTPEQGSNGTDGASQKTPSSTGPSPVFDIKAVSISPTNVILTWKSNDTAASEYKYVVKHKMENEKTITVVHQPWCNITGLRPATSYVFSITPGIGNETWGDPRVIKVITEPIPVSDLRVALTGVRKAALSWSNGNGTASCRVLLESIGSHEELTQDSRLQVNISGLKPGVQYNINPYLLQSNKTKGDPLGTEGGLDASNTERSRAGSPTAPVHDESLVGPVDPSSGQQSRDTEVLLVGLEPGTRYNATVYSQAANGTEGQPQAIEFRTNAIQVFDVTAVNISATSLTLIWKVSDNESSSNYTYKIHVAGETDSSNLNVSEPRAVIPGLRSSTFYNITVCPVLGDIEGTPGFLQVHTPPVPVSDFRVTVVSTTEIGLAWSSHDAESFQMHITQEGAGNSRVEITTNQSIIIGGLFPGTKYCFEIVPKGPNGTEGASRTVCNRTVPSAVFDIHVVYVTTTEMWLDWKSPDGASEYVYHLVIESKHGSNHTSTYDKAITLQGLIPGTLYNITISPEVDHVWGDPNSTAQYTRPSNVSNIDVSTNTTAATLSWQNFDDASPTYSYCLLIEKAGNSSNATQVVTDIGITDATVTELIPGSSYTVEIFAQVGDGIKSLEPGRKSFCTDPASMASFDCEVVPKEPALVLKWTCPPGANAGFELEVSSGAWNNATHLESCSSENGTEYRTEVTYLNFSTSYNISITTVSCGKMAAPTRNTCTTGITDPPPPDGSPNITSVSHNSVKVKFSGFEASHGPIKAYAVILTTGEAGHPSADVLKYTYEDFKKGASDTYVTYLIRTEEKGRSQSLSEVLKYEIDVGNESTTLGYYNGKLEPLGSYRACVAGFTNITFHPQNKGLIDGAESYVSFSRYSDAVSLPQDPGVICGAVFGCIFGALVIVTVGGFIFWRKKRKDAKNNEVSFSQIKPKKSKLIRVENFEAYFKKQQADSNCGFAEEYEDLKLVGISQPKYAAELAENRGKNRYNNVLPYDISRVKLSVQTHSTDDYINANYMPGYHSKKDFIATQGPLPNTLKDFWRMVWEKNVYAIIMLTKCVEQGRTKCEEYWPSKQAQDYGDITVAMTSEIVLPEWTIRDFTVKNIQTSESHPLRQFHFTSWPDHGVPDTTDLLINFRYLVRDYMKQSPPESPILVHCSAGVGRTGTFIAIDRLIYQIENENTVDVYGIVYDLRMHRPLMVQTEDQYVFLNQCVLDIVRSQKDSKVDLIYQNTTAMTIYENLAPVTTFGKTNGYIA

SEQ ID NO: 60155 - protein, 539 aa, Homo sapiens
MKPAAREARLPPRSPGLRWALPLLLLLLRLGQILCAGGTPSPIPDPSVATVATGENGITQISSTAESFHKQNGTGTPQVETNTSEDGESSGANDSLRTPEQGSNGTDGASQKTPSSTGPSPVFDIKAVSISPTNVILTWKSNDTAASEYKYVVKHKMENEKTITVVHQPWCNITGLRPATSYVFSITPGIGNETWGDPRVIKVITEPIPVSDLRVALTGVRKAALSWSNGNGTASCRVLLESIGSHEELTQDSRLQVNISGLKPGVQYNINPYLLQSNKTKGDPLGTEGGLDASNTERSRAGSPTAPVHDESLVGPVDPSSGQQSRDTEVLLVGLEPGTRYNATVYSQAANGTEGQPQAIEFRTNAIQVFDVTAVNISATSLTLIWKVSDNESSSNYTYKIHVAGETDSSNLNVSEPRAVIPGLRSSTFYNITVCPVLGDIEGTPGFLQVHTPPVPVSDFRVTVVSTTEIGLAWSSHDAESFQMHITQEGAGNSRVEITTNQSIIIGGLFPGTKYCFEIVPKGPNGTEGASRTVCNRTG

SEQ ID NO: 60156 - protein, 1472 aa, Homo sapiens
MDTTAAAALPAFVALLLLSPWPLLGSAQGQFSAGGCTFDDGPGACDYHQDLYDDFEWVHVSAQEPHYLPPEMPQGSYMIVDSSDHDPGEKARLQLPTMKENDTHCIDFSYLLYSQKGLNPGTLNILVRVNKGPLANPIWNVTGFTGRDWLRAELAVSTFWPNEYQVIFEAEVSGGRSGYIAIDDIQVLSYPCDKSPHFLRLGDVEVNAGQNATFQCIATGRDAVHNKLWLQRRNGEDIPVAQTKNINHRRFAASFRLQEVTKTDQDLYRCVTQSERGSGVSNFAQLIVREPPRPIAPPQLLGVGPTYLLIQLNANSIIGDGPIILKEVEYRMTSGSWTETHAVNAPTYKLWHLDPDTEYEIRVLLTRPGEGGTGLPGPPLITRTKCAEPMRTPKTLKIAEIQARRIAVDWESLGYNITRCHTFNVTICYHYFRGHNESKADCLDMDPKAPQHVVNHLPPYTNVSLKMILTNPEGRKESEETIIQTDEDVPGPVPVKSLQGTSFENKIFLNWKEPLDPNGIITQYEISYSSIRSFDPAVPVAGPPQTVSNLWNSTHHVFMHLHPGTTYQFFIRASTVKGFGPATAINVTTNISAPTLPDYEGVDASLNETATTITVLLRPAQAKGAPISAYQIVVEELHPHRTKREAGAMECYQVPVTYQNAMSGGAPYYFAAELPPGNLPEPAPFTVGDNRTYQGFWNPPLAPRKGYNIYFQAMSSVEKETKTQCVRIATKAAATEEPEVIPDPAKQTDRVVKIAGISAGILVFILLLLVVILIVKKRRSYYSYSYYLKLAKKRKDAMGNTRQEMTHMVNAMDRSYADQSTLHAEDPLSITFMDQHNFSPRLPNDPLVPTAVLVPITDENHSATAESSRLLDVPRYLCEGTESPYQTGQLHPAIRVADLLQHINLMKTSDSYGFKEEYESFFEGQSASWDVAKKDQNRAKNRYGNIIAYDHSRVILQPVEDDPSSDYINANYIDIWLYRDGYQRPSHYIATQGPVHETVYDFWRMIWQEQSACIVMVTNLVEVGRVKCYKYWPDDTEVYGDFKVTCVEMEPLAEYVVRTFTLERRGYNEIREVKQFHFTGWPDHGVPYHATGLLSFIRRVKLSNPPSAGPIVVHCSAGAGRTGCYIVIDIMLDMAEREGVVDIYNCVKALRSRRINMVQTEEQYIFIHDAILEACLCGETAIPVCEFKAAYFDMIRIDSQTNSSHLKDEFQTLNSVTPRLQAEDCSIACLPRNHDKNRFMDMLPPDRCLPFLITIDGESSNYINAALMDSYRQPAAFIVTQYPLPNTVKDFWRLVYDYGCTSIVMLNEVDLSQGCPQYWPEEGMLRYGPIQVECMSCSMDCDVINRIFRICNLTRPQEGYLMVQQFQYLGWASHREVPGSKRSFLKLILQVEKWQEECEEGEGRTIIHCLNGGGRSGMFCAIGIVVEMVKRQNVVDVFHAVKTLRNSKPNMVEAPEQYRFCYDVALEYLESS

SEQ ID NO: 60157 - protein, 1458 aa, Homo sapiens
MDTTAAAALPAFVALLLLSPWPLLGSAQGQFSAGGCTFDDGPGACDYHQDLYDDFEWVHVSAQEPHYLPPEMPQGSYMIVDSSDHDPGEKARLQLPTMKENDTHCIDFSYLLYSQKGLNPGTLNILVRVNKGPLANPIWNVTGFTGRDWLRAELAVSTFWPNEYQVIFEAEVSGGRSGYIAIDDIQVLSYPCDKSPHFLRLGDVEVNAGQNATFQCIATGRDAVHNKLWLQRRNGEDIPVAQTKNINHRRFAASFRLQEVTKTDQDLYRCVTQSERGSGVSNFAQLIVREPPRPIAPPQLLGVGPTYLLIQLNANSIIGDGPIILKEVEYRMTSGSWTETHAVNAPTYKLWHLDPDTEYEIRVLLTRPGEGGTGLPGPPLITRTKCAEPMRTPKTLKIAEIQARRIAVDWESLGYNITRCHTFNVTICYHYFRGHNESKADCLDMDPKAPQHVVNHLPPYTNVSLKMILTNPEGRKESEETIIQTDEDVPGPVPVKSLQGTSFENKIFLNWKEPLDPNGIITQYEISYSSIRSFDPAVPVAGPPQTVSNLWNSTHHVFMHLHPGTTYQFFIRASTVKGFGPATAINVTTNISAPTLPDYEGVDASLNETATTITVLLRPAQAKGAPISAYQIVVEELHPHRTKREAGAMECYQVPVTYQNAMSGGAPYYFAAELPPGNLPEPAPFTVGDNRTYQGFWNPPLAPRKGYNIYFQAMSSVEKETKTQCVRIATKAAATEEPEVIPDPAKQTDRVVKIAGISAGILVFILLLLVVILIVKKSKLAKKRKDAMGNTRQEMTHMVNAMDRSYADQSTLHAEDPLSITFMDQHNFSPRLPNDPLVPTAVLDENHSATAESSRLLDVPRYLCEGTESPYQTGQLHPAIRVADLLQHINLMKTSDSYGFKEEYESFFEGQSASWDVAKKDQNRAKNRYGNIIAYDHSRVILQPVEDDPSSDYINANYIDIWLYRDGYQRPSHYIATQGPVHETVYDFWRMIWQEQSACIVMVTNLVEVGRVKCYKYWPDDTEVYGDFKVTCVEMEPLAEYVVRTFTLERRGYNEIREVKQFHFTGWPDHGVPYHATGLLSFIRRVKLSNPPSAGPIVVHCSAGAGRTGCYIVIDIMLDMAEREGVVDIYNCVKALRSRRINMVQTEEQYIFIHDAILEACLCGETAIPVCEFKAAYFDMIRIDSQTNSSHLKDEFQTLNSVTPRLQAEDCSIACLPRNHDKNRFMDMLPPDRCLPFLITIDGESSNYINAALMDSYRQPAAFIVTQYPLPNTVKDFWRLVYDYGCTSIVMLNEVDLSQGCPQYWPEEGMLRYGPIQVECMSCSMDCDVINRIFRICNLTRPQEGYLMVQQFQYLGWASHREVPGSKRSFLKLILQVEKWQEECEEGEGRTIIHCLNGGGRSGMFCAIGIVVEMVKRQNVVDVFHAVKTLRNSKPNMVEAPEQYRFCYDVALEYLESS

SEQ ID NO: 60158 - protein, 1446 aa, Homo sapiens
MDTTAAAALPAFVALLLLSPWPLLGSAQGQFSAGGCTFDDGPGACDYHQDLYDDFEWVHVSAQEPHYLPPEMPQGSYMIVDSSDHDPGEKARLQLPTMKENDTHCIDFSYLLYSQKGLNPGTLNILVRVNKGPLANPIWNVTGFTGRDWLRAELAVSTFWPNEYQVIFEAEVSGGRSGYIAIDDIQVLSYPCDKSPHFLRLGDVEVNAGQNATFQCIATGRDAVHNKLWLQRRNGEDIPVAQTKNINHRRFAASFRLQEVTKTDQDLYRCVTQSERGSGVSNFAQLIVREPPRPIAPPQLLGVGPTYLLIQLNANSIIGDGPIILKEVEYRMTSGSWTETHAVNAPTYKLWHLDPDTEYEIRVLLTRPGEGGTGLPGPPLITRTKCAEPMRTPKTLKIAEIQARRIAVDWESLGYNITRCHTFNVTICYHYFRGHNESKADCLDMDPKAPQHVVNHLPPYTNVSLKMILTNPEGRKESEETIIQTDEDVPGPVPVKSLQGTSFENKIFLNWKEPLDPNGIITQYEISYSSIRSFDPAVPVAGPPQTVSNLWNSTHHVFMHLHPGTTYQFFIRASTVKGFGPATAINVTTNISAPTLPDYEGVDASLNETATTITVLLRPAQAKGAPISAYQIVVEELHPHRTKREAGAMECYQVPVTYQNAMSGGAPYYFAAELPPGNLPEPAPFTVGDNRTYQGFWNPPLAPRKGYNIYFQAMSSVEKETKTQCVRIATKAAATEEPEVIPDPAKQTDRVVKIAGISAGILVFILLLLVVILIVKKSKLAKKRKDAMGNTRQEMTHMVNAMDRSYADQSTLHAEDPLSITFMDQHNFSPRYENHSATAESSRLLDVPRYLCEGTESPYQTGQLHPAIRVADLLQHINLMKTSDSYGFKEEYESFFEGQSASWDVAKKDQNRAKNRYGNIIAYDHSRVILQPVEDDPSSDYINANYIDIWLYRDGYQRPSHYIATQGPVHETVYDFWRMIWQEQSACIVMVTNLVEVGRVKCYKYWPDDTEVYGDFKVTCVEMEPLAEYVVRTFTLERRGYNEIREVKQFHFTGWPDHGVPYHATGLLSFIRRVKLSNPPSAGPIVVHCSAGAGRTGCYIVIDIMLDMAEREGVVDIYNCVKALRSRRINMVQTEEQYIFIHDAILEACLCGETAIPVCEFKAAYFDMIRIDSQTNSSHLKDEFQTLNSVTPRLQAEDCSIACLPRNHDKNRFMDMLPPDRCLPFLITIDGESSNYINAALMDSYRQPAAFIVTQYPLPNTVKDFWRLVYDYGCTSIVMLNEVDLSQGCPQYWPEEGMLRYGPIQVECMSCSMDCDVINRIFRICNLTRPQEGYLMVQQFQYLGWASHREVPGSKRSFLKLILQVEKWQEECEEGEGRTIIHCLNGGGRSGMFCAIGIVVEMVKRQNVVDVFHAVKTLRNSKPNMVEAPEQYRFCYDVALEYLESS

SEQ ID NO: 60159 - protein, 1439 aa, Homo sapiens
MDTTAAAALPAFVALLLLSPWPLLGSAQGQFSAGGCTFDDGPGACDYHQDLYDDFEWVHVSAQEPHYLPPEMPQGSYMIVDSSDHDPGEKARLQLPTMKENDTHCIDFSYLLYSQKGLNPGTLNILVRVNKGPLANPIWNVTGFTGRDWLRAELAVSTFWPNEYQVIFEAEVSGGRSGYIAIDDIQVLSYPCDKSPHFLRLGDVEVNAGQNATFQCIATGRDAVHNKLWLQRRNGEDIPVAQTKNINHRRFAASFRLQEVTKTDQDLYRCVTQSERGSGVSNFAQLIVREPPRPIAPPQLLGVGPTYLLIQLNANSIIGDGPIILKEVEYRMTSGSWTETHAVNAPTYKLWHLDPDTEYEIRVLLTRPGEGGTGLPGPPLITRTKCAEPMRTPKTLKIAEIQARRIAVDWESLGYNITRCHTFNVTICYHYFRGHNESKADCLDMDPKAPQHVVNHLPPYTNVSLKMILTNPEGRKESEETIIQTDEDVPGPVPVKSLQGTSFENKIFLNWKEPLDPNGIITQYEISYSSIRSFDPAVPVAGPPQTVSNLWNSTHHVFMHLHPGTTYQFFIRASTVKGFGPATAINVTTNISAPTLPDYEGVDASLNETATTITVLLRPAQAKGAPISAYQIVVEELHPHRTKREAGAMECYQVPVTYQNAMSGGAPYYFAAELPPGNLPEPAPFTVGDNRTYQGFWNPPLAPRKGYNIYFQAMSSVEKETKTQCVRIATKAATEEPEVIPDPAKQTDRVVKIAGISAGILVFILLLLVVILIVKKSKLAKKRKDAMGNTRQEMTHMVNAMDRSYADQSTLHAEDPLSITFMDQHNFSPRYENHSATAESSRLLDVPRYLCEGTESPYQTGQLHPAIRVADLLQHINLMKTSDSYGFKEEYESFFEGQSASWDVAKKDQNRAKNRYGNIIAYDHSRVILQPVEDDPSSDYINANYIDGYQRPSHYIATQGPVHETVYDFWRMIWQEQSACIVMVTNLVEVGRVKCYKYWPDDTEVYGDFKVTCVEMEPLAEYVVRTFTLERRGYNEIREVKQFHFTGWPDHGVPYHATGLLSFIRRVKLSNPPSAGPIVVHCSAGAGRTGCYIVIDIMLDMAEREGVVDIYNCVKALRSRRINMVQTEEQYIFIHDAILEACLCGETAIPVCEFKAAYFDMIRIDSQTNSSHLKDEFQTLNSVTPRLQAEDCSIACLPRNHDKNRFMDMLPPDRCLPFLITIDGESSNYINAALMDSYRQPAAFIVTQYPLPNTVKDFWRLVYDYGCTSIVMLNEVDLSQGCPQYWPEEGMLRYGPIQVECMSCSMDCDVINRIFRICNLTRPQEGYLMVQQFQYLGWASHREVPGSKRSFLKLILQVEKWQEECEEGEGRTIIHCLNGGGRSGMFCAIGIVVEMVKRQNVVDVFHAVKTLRNSKPNMVEAPEQYRFCYDVALEYLESS

SEQ ID NO: 60160 - protein, 1440 aa, Homo sapiens
MDTTAAAALPAFVALLLLSPWPLLGSAQGQFSAGGCTFDDGPGACDYHQDLYDDFEWVHVSAQEPHYLPPEMPQGSYMIVDSSDHDPGEKARLQLPTMKENDTHCIDFSYLLYSQKGLNPGTLNILVRVNKGPLANPIWNVTGFTGRDWLRAELAVSTFWPNEYQVIFEAEVSGGRSGYIAIDDIQVLSYPCDKSPHFLRLGDVEVNAGQNATFQCIATGRDAVHNKLWLQRRNGEDIPVAQTKNINHRRFAASFRLQEVTKTDQDLYRCVTQSERGSGVSNFAQLIVREPPRPIAPPQLLGVGPTYLLIQLNANSIIGDGPIILKEVEYRMTSGSWTETHAVNAPTYKLWHLDPDTEYEIRVLLTRPGEGGTGLPGPPLITRTKCAEPMRTPKTLKIAEIQARRIAVDWESLGYNITRCHTFNVTICYHYFRGHNESKADCLDMDPKAPQHVVNHLPPYTNVSLKMILTNPEGRKESEETIIQTDEDVPGPVPVKSLQGTSFENKIFLNWKEPLDPNGIITQYEISYSSIRSFDPAVPVAGPPQTVSNLWNSTHHVFMHLHPGTTYQFFIRASTVKGFGPATAINVTTNISAPTLPDYEGVDASLNETATTITVLLRPAQAKGAPISAYQIVVEELHPHRTKREAGAMECYQVPVTYQNAMSGGAPYYFAAELPPGNLPEPAPFTVGDNRTYQGFWNPPLAPRKGYNIYFQAMSSVEKETKTQCVRIATKAAATEEPEVIPDPAKQTDRVVKIAGISAGILVFILLLLVVILIVKKSKLAKKRKDAMGNTRQEMTHMVNAMDRSYADQSTLHAEDPLSITFMDQHNFSPRYENHSATAESSRLLDVPRYLCEGTESPYQTGQLHPAIRVADLLQHINLMKTSDSYGFKEEYESFFEGQSASWDVAKKDQNRAKNRYGNIIAYDHSRVILQPVEDDPSSDYINANYIDGYQRPSHYIATQGPVHETVYDFWRMIWQEQSACIVMVTNLVEVGRVKCYKYWPDDTEVYGDFKVTCVEMEPLAEYVVRTFTLERRGYNEIREVKQFHFTGWPDHGVPYHATGLLSFIRRVKLSNPPSAGPIVVHCSAGAGRTGCYIVIDIMLDMAEREGVVDIYNCVKALRSRRINMVQTEEQYIFIHDAILEACLCGETAIPVCEFKAAYFDMIRIDSQTNSSHLKDEFQTLNSVTPRLQAEDCSIACLPRNHDKNRFMDMLPPDRCLPFLITIDGESSNYINAALMDSYRQPAAFIVTQYPLPNTVKDFWRLVYDYGCTSIVMLNEVDLSQGCPQYWPEEGMLRYGPIQVECMSCSMDCDVINRIFRICNLTRPQEGYLMVQQFQYLGWASHREVPGSKRSFLKLILQVEKWQEECEEGEGRTIIHCLNGGGRSGMFCAIGIVVEMVKRQNVVDVFHAVKTLRNSKPNMVEAPEQYRFCYDVALEYLESS

SEQ ID NO: 60161 - protein, 1457 aa, Homo sapiens
MDTTAAAALPAFVALLLLSPWPLLGSAQGQFSAGGCTFDDGPGACDYHQDLYDDFEWVHVSAQEPHYLPPEMPQGSYMIVDSSDHDPGEKARLQLPTMKENDTHCIDFSYLLYSQKGLNPGTLNILVRVNKGPLANPIWNVTGFTGRDWLRAELAVSTFWPNEYQVIFEAEVSGGRSGYIAIDDIQVLSYPCDKSPHFLRLGDVEVNAGQNATFQCIATGRDAVHNKLWLQRRNGEDIPVAQTKNINHRRFAASFRLQEVTKTDQDLYRCVTQSERGSGVSNFAQLIVREPPRPIAPPQLLGVGPTYLLIQLNANSIIGDGPIILKEVEYRMTSGSWTETHAVNAPTYKLWHLDPDTEYEIRVLLTRPGEGGTGLPGPPLITRTKCAEPMRTPKTLKIAEIQARRIAVDWESLGYNITRCHTFNVTICYHYFRGHNESKADCLDMDPKAPQHVVNHLPPYTNVSLKMILTNPEGRKESEETIIQTDEDVPGPVPVKSLQGTSFENKIFLNWKEPLDPNGIITQYEISYSSIRSFDPAVPVAGPPQTVSNLWNSTHHVFMHLHPGTTYQFFIRASTVKGFGPATAINVTTNISAPTLPDYEGVDASLNETATTITVLLRPAQAKGAPISAYQIVVEELHPHRTKREAGAMECYQVPVTYQNAMSGGAPYYFAAELPPGNLPEPAPFTVGDNRTYQGFWNPPLAPRKGYNIYFQAMSSVEKETKTQCVRIATKAAATEEPEVIPDPAKQTDRVVKIAGISAGILVFILLLLVVILIVKKSKLAKKRKDAMGNTRQEMTHMVNAMDRSYADQSTLHAEDPLSITFMDQHNFSPRLPNDPLVPTAVLDENHSATAESSRLLDVPRYLCEGTESPYQTGQLHPAIRVADLLQHINLMKTSDSYGFKEEYESFFEGQSASWDVAKKDQNRAKNRYGNIIAYDHSRVILQPVEDDPSSDYINANYIDVSIFIGYQRPSHYIATQGPVHETVYDFWRMIWQEQSACIVMVTNLVEVGRVKCYKYWPDDTEVYGDFKVTCVEMEPLAEYVVRTFTLERRGYNEIREVKQFHFTGWPDHGVPYHATGLLSFIRRVKLSNPPSAGPIVVHCSAGAGRTGCYIVIDIMLDMAEREGVVDIYNCVKALRSRRINMVQTEEQYIFIHDAILEACLCGETAIPVCEFKAAYFDMIRIDSQTNSSHLKDEFQTLNSVTPRLQAEDCSIACLPRNHDKNRFMDMLPPDRCLPFLITIDGESSNYINAALMDSYRQPAAFIVTQYPLPNTVKDFWRLVYDYGCTSIVMLNEVDLSQGCPQYWPEEGMLRYGPIQVECMSCSMDCDVINRIFRICNLTRPQEGYLMVQQFQYLGWASHREVPGSKRSFLKLILQVEKWQEECEEGEGRTIIHCLNGGGRSGMFCAIGIVVEMVKRQNVVDVFHAVKTLRNSKPNMVEAPEQYRFCYDVALEYLESS

SEQ ID NO: 60162 - protein, 747 aa, Homo sapiens
MTLNGCMLVLKSLIIYHPRCPKVIFEAEVSGGRSGYIAIDDIQVLSYPCDKSPHFLRLGDVEVNAGQNATFQCIATGRDAVHNKLWLQRRNGEDIPVAQTKNINHRRFAASFRLQEVTKTDQDLYRCVTQSERGSGVSNFAQLIVREPPRPIAPPQLLGVGPTYLLIQLNANSIIGDGPIILKEVEYRMTSGSWTETHAVNAPTYKLWHLDPDTEYEIRVLLTRPGEGGTGLPGPPLITRTKCAEPMRTPKTLKIAEIQARRIAVDWESLGYNITRCHTFNVTICYHYFRGHNESKADCLDMDPKAPQHVVNHLPPYTNVSLKMILTNPEGRKESEETIIQTDEDVPGPVPVKSLQGTSFENKIFLNWKEPLDPNGIITQYEISYSSIRSFDPAVPVAGPPQTVSNLWNSTHHVFMHLHPGTTYQFFIRASTVKGFGPATAINVTTNISAPTLPDYEGVDASLNETATTITVLLRPAQAKGAPISAYQIVVEELHPHRTKREAGAMECYQVPVTYQNAMSGGAPYYFAAELPPGNLPEPAPFTVGDNRTYQGFWNPPLAPRKGYNIYFQAMSSVEKETKTQCVRIATKAAATEEPEVIPDPAKQTDRVVKIAGISAGILVFILLLLVVILIVKKRYICWRRHICIRNIRRSYYSYSYYLKLAKKRKDAMGNTRQEMTHMVNAMDRSYADQSTLHAEDPLSITFMDQHNFSPRLPNDPLVPTAVLVPSPGRKNVYHGDNNSFFAISYL

SEQ ID NO: 60163 - protein, 1462 aa, Homo sapiens
MDTTAAAALPAFVALLLLSPWPLLGSAQGQFSAGGCTFDDGPGACDYHQDLYDDFEWVHVSAQEPHYLPPEMPQGSYMIVDSSDHDPGEKARLQLPTMKENDTHCIDFSYLLYSQKGLNPGTLNILVRVNKGPLANPIWNVTGFTGRDWLRAELAVSTFWPNEYQVIFEAEVSGGRSGYIAIDDIQVLSYPCDKSPHFLRLGDVEVNAGQNATFQCIATGRDAVHNKLWLQRRNGEDIPVAQTKNINHRRFAASFRLQEVTKTDQDLYRCVTQSERGSGVSNFAQLIVREPPRPIAPPQLLGVGPTYLLIQLNANSIIGDGPIILKEVEYRMTSGSWTETHAVNAPTYKLWHLDPDTEYEIRVLLTRPGEGGTGLPGPPLITRTKCAEPMRTPKTLKIAEIQARRIAVDWESLGYNITRCHTFNVTICYHYFRGHNESKADCLDMDPKAPQHVVNHLPPYTNVSLKMILTNPEGRKESEETIIQTDEDVPGPVPVKSLQGTSFENKIFLNWKEPLDPNGIITQYEISYSSIRSFDPAVPVAGPPQTVSNLWNSTHHVFMHLHPGTTYQFFIRASTVKGFGPATAINVTTNISAPTLPDYEGVDASLNETATTITVLLRPAQAKGAPISAYQIVVEELHPHRTKREAGAMECYQVPVTYQNAMSGGAPYYFAAELPPGNLPEPAPFTVGDNRTYQGFWNPPLAPRKGYNIYFQAMSSVEKETKTQCVRIATKAAATEEPEVIPDPAKQTDRVVKIAGISAGILVFILLLLVVILIVKKSKLAKKRKDAMGNTRQEMTHMVNAMDRSYADQSTLHAEDPLSITFMDQHNFSPRLPNDPLVPTAVLVPITDENHSATAESSRLLDVPRYLCEGTESPYQTGQLHPAIRVADLLQHINLMKTSDSYGFKEEYESFFEGQSASWDVAKKDQNRAKNRYGNIIAYDHSRVILQPVEDDPSSDYINANYIDIWLYRDGYQRPSHYIATQGPVHETVYDFWRMIWQEQSACIVMVTNLVEVGRVKCYKYWPDDTEVYGDFKVTCVEMEPLAEYVVRTFTLERRGYNEIREVKQFHFTGWPDHGVPYHATGLLSFIRRVKLSNPPSAGPIVVHCSAGAGRTGCYIVIDIMLDMAEREGVVDIYNCVKALRSRRINMVQTEEQYIFIHDAILEACLCGETAIPVCEFKAAYFDMIRIDSQTNSSHLKDEFQTLNSVTPRLQAEDCSIACLPRNHDKNRFMDMLPPDRCLPFLITIDGESSNYINAALMDSYRQPAAFIVTQYPLPNTVKDFWRLVYDYGCTSIVMLNEVDLSQGCPQYWPEEGMLRYGPIQVECMSCSMDCDVINRIFRICNLTRPQEGYLMVQQFQYLGWASHREVPGSKRSFLKLILQVEKWQEECEEGEGRTIIHCLNGGGRSGMFCAIGIVVEMVKRQNVVDVFHAVKTLRNSKPNMVEAPEQYRFCYDVALEYLESS

SEQ ID NO: 60164 - protein, 1452 aa, Homo sapiens
MRGLGTCLATLAGLLLTAAGETFSGGCLFDEPYSTCGYSQSEGDDFNWEQVNTLTKPTSDPWMPSGSFMLVNASGRPEGQRAHLLLPQLKENDTHCIDFHYFVSSKSNSPPGLLNVYVKVNNGPLGNPIWNISGDPTRTWNRAELAISTFWPNFYQVIFEVITSGHQGYLAIDEVKVLGHPCTRTPHFLRIQNVEVNAGQFATFQCSAIGRTVAGDRLWLQGIDVRDAPLKEIKVTSSRRFIASFNVVNTTKRDAGKYRCMIRTEGGVGISNYAELVVKEPPVPIAPPQLASVGATYLWIQLNANSINGDGPIVAREVEYCTASGSWNDRQPVDSTSYKIGHLDPDTEYEISVLLTRPGEGGTGSPGPALRTRTKCADPMRGPRKLEVVEVKSRQITIRWEPFGYNVTRCHSYNLTVHYCYQVGGQEQVREEVSWDTENSHPQHTITNLSPYTNVSVKLILMNPEGRKESQELIVQTDEDLPGAVPTESIQGSTFEEKIFLQWREPTQTYGVITLYEITYKAVSSFDPEIDLSNQSGRVSKLGNETHFLFFGLYPGTTYSFTIRASTAKGFGPPATNQFTTKISAPSMPAYELETPLNQTDNTVTVMLKPAHSRGAPVSVYQIVVEEERPRRTKKTTEILKCYPVPIHFQNASLLNSQYYFAAEFPADSLQAAQPFTIGDNKTYNGYWNTPLLPYKSYRIYFQAASRANGETKIDCVQVATKGAATPKPVPEPEKQTDHTVKIAGVIAGILLFVIIFLGVVLVMKKRKLAKKRKETMSSTRQEMTVMVNSMDKSYAEQGTNCDEAFSFMDTHNLNGRSVSSPSSFTMKTNTLSTSVPNSYYPDETHTMASDTSSLVQSHTYKKREPADVPYQTGQLHPAIRVADLLQHITQMKCAEGYGFKEEYESFFEGQSAPWDSAKKDENRMKNRYGNIIAYDHSRVRLQTIEGDTNSDYINGNYIDGYHRPNHYIATQGPMQETIYDFWRMVWHENTASIIMVTNLVEVGRVKCCKYWPDDTEIYKDIKVTLIETELLAEYVIRTFAVEKRGVHEIREIRQFHFTGWPDHGVPYHATGLLGFVRQVKSKSPPSAGPLVVHCSAGAGRTGCFIVIDIMLDMAEREGVVDIYNCVRELRSRRVNMVQTEEQYVFIHDAILEACLCGDTSVPASQVRSLYYDMNKLDPQTNSSQIKEEFRTLNMVTPTLRVEDCSIALLPRNHEKNRCMDILPPDRCLPFLITIDGESSNYINAALMDSYKQPSAFIVTQHPLPNTVKDFWRLVLDYHCTSVVMLNDVDPAQLCPQYWPENGVHRHGPIQVEFVSADLEEDIISRIFRIYNAARPQDGYRMVQQFQFLGWPMYRDTPVSKRSFLKLIRQVDKWQEEYNGGEGRTVVHCLNGGGRSGTFCAISIVCEMLRHQRTVDVFHAVKTLRNNKPNMVDLLDQYKFCYEVALEYLNSG

SEQ ID NO: 60165 - protein, 1390 aa, Homo sapiens
MPSGSFMLVNASGRPEGQRAHLLLPQLKENDTHCIDFHYFVSSKSNSPPGLLNVYVKVNNGPLGNPIWNISGDPTRTWNRAELAISTFWPNFYQVIFEVITSGHQGYLAIDEVKVLGHPCTRTPHFLRIQNVEVNAGQFATFQCSAIGRTVAGDRLWLQGIDVRDAPLKEIKVTSSRRFIASFNVVNTTKRDAGKYRCMIRTEGGVGISNYAELVVKEPPVPIAPPQLASVGATYLWIQLNANSINGDGPIVAREVEYCTASGSWNDRQPVDSTSYKIGHLDPDTEYEISVLLTRPGEGGTGSPGPALRTRTKCADPMRGPRKLEVVEVKSRQITIRWEPFGYNVTRCHSYNLTVHYCYQVGGQEQVREEVSWDTENSHPQHTITNLSPYTNVSVKLILMNPEGRKESQELIVQTDEDLPGAVPTESIQGSTFEEKIFLQWREPTQTYGVITLYEITYKAVSSFDPEIDLSNQSGRVSKLGNETHFLFFGLYPGTTYSFTIRASTAKGFGPPATNQFTTKISAPSMPAYELETPLNQTDNTVTVMLKPAHSRGAPVSVYQIVVEEERPRRTKKTTEILKCYPVPIHFQNASLLNSQYYFAAEFPADSLQAAQPFTIGDNKTYNGYWNTPLLPYKSYRIYFQAASRANGETKIDCVQVATKGAATPKPVPEPEKQTDHTVKIAGVIAGILLFVIIFLGVVLVMKKRKLAKKRKETMSSTRQEMTVMVNSMDKSYAEQGTNCDEAFSFMDTHNLNGRSVSSPSSFTMKTNTLSTSVPNSYYPDETHTMASDTSSLVQSHTYKKREPADVPYQTGQLHPAIRVADLLQHITQMKCAEGYGFKEEYESFFEGQSAPWDSAKKDENRMKNRYGNIIAYDHSRVRLQTIEGDTNSDYINGNYIDGYHRPNHYIATQGPMQETIYDFWRMVWHENTASIIMVTNLVEVGRVKCCKYWPDDTEIYKDIKVTLIETELLAEYVIRTFAVEKRGVHEIREIRQFHFTGWPDHGVPYHATGLLGFVRQVKSKSPPSAGPLVVHCSAGAGRTGCFIVIDIMLDMAEREGVVDIYNCVRELRSRRVNMVQTEEQYVFIHDAILEACLCGDTSVPASQVRSLYYDMNKLDPQTNSSQIKEEFRTLNMVTPTLRVEDCSIALLPRNHEKNRCMDILPPDRCLPFLITIDGESSNYINAALMDSYKQPSAFIVTQHPLPNTVKDFWRLVLDYHCTSVVMLNDVDPAQLCPQYWPENGVHRHGPIQVEFVSADLEEDIISRIFRIYNAARPQDGYRMVQQFQFLGWPMYRDTPVSKRSFLKLIRQVDKWQEEYNGGEGRTVVHCLNGGGRSGTFCAISIVCEMLRHQRTVDVFHAVKTLRNNKPNMVDLLDQYKFCYEVALEYLNSG

SEQ ID NO: 60166 - protein, 1466 aa, Homo sapiens
MRGLGTCLATLAGLLLTAAGETFSGGCLFDEPYSTCGYSQSEGDDFNWEQVNTLTKPTSDPWMPSGSFMLVNASGRPEGQRAHLLLPQLKENDTHCIDFHYFVSSKSNSPPGLLNVYVKVNNGPLGNPIWNISGDPTRTWNRAELAISTFWPNFYQVIFEVITSGHQGYLAIDEVKVLGHPCTRTPHFLRIQNVEVNAGQFATFQCSAIGRTVAGDRLWLQGIDVRDAPLKEIKVTSSRRFIASFNVVNTTKRDAGKYRCMIRTEGGVGISNYAELVVKEPPVPIAPPQLASVGATYLWIQLNANSINGDGPIVAREVEYCTASGSWNDRQPVDSTSYKIGHLDPDTEYEISVLLTRPGEGGTGSPGPALRTRTKCADPMRGPRKLEVVEVKSRQITIRWEPFGYNVTRCHSYNLTVHYCYQVGGQEQVREEVSWDTENSHPQHTITNLSPYTNVSVKLILMNPEGRKESQELIVQTDEDLPGAVPTESIQGSTFEEKIFLQWREPTQTYGVITLYEITYKAVSSFDPEIDLSNQSGRVSKLGNETHFLFFGLYPGTTYSFTIRASTAKGFGPPATNQFTTKISAPSMPAYELETPLNQTDNTVTVMLKPAHSRGAPVSVYQIVVEEERPRRTKKTTEILKCYPVPIHFQNASLLNSQYYFAAEFPADSLQAAQPFTIGDNKTYNGYWNTPLLPYKSYRIYFQAASRANGETKIDCVQVATKGAATPKPVPEPEKQTDHTVKIAGVIAGILLFVIIFLGVVLVMKKRKLAKKRKETMSSTRQEMTVMVNSMDKSYAEQGTNCDEAFSFMDTHNLNGRSVSSPSSFTMKTNTLSTSVPNSYYPDPFVPTAILDFSLNNETHTMASDTSSLVQSHTYKKREPADVPYQTGQLHPAIRVADLLQHITQMKCAEGYGFKEEYESFFEGQSAPWDSAKKDENRMKNRYGNIIAYDHSRVRLQTIEGDTNSDYINGNYIDGYHRPNHYIATQGPMQETIYDFWRMVWHENTASIIMVTNLVEVGRVKCCKYWPDDTEIYKDIKVTLIETELLAEYVIRTFAVEKRGVHEIREIRQFHFTGWPDHGVPYHATGLLGFVRQVKSKSPPSAGPLVVHCSAGAGRTGCFIVIDIMLDMAEREGVVDIYNCVRELRSRRVNMVQTEEQYVFIHDAILEACLCGDTSVPASQVRSLYYDMNKLDPQTNSSQIKEEFRTLNMVTPTLRVEDCSIALLPRNHEKNRCMDILPPDRCLPFLITIDGESSNYINAALMDSYKQPSAFIVTQHPLPNTVKDFWRLVLDYHCTSVVMLNDVDPAQLCPQYWPENGVHRHGPIQVEFVSADLEEDIISRIFRIYNAARPQDGYRMVQQFQFLGWPMYRDTPVSKRSFLKLIRQVDKWQEEYNGGEGRTVVHCLNGGGRSGTFCAISIVCEMLRHQRTVDVFHAVKTLRNNKPNMVDLLDQYKFCYEVALEYLNSG

SEQ ID NO: 60167 - protein, 1239 aa, Homo sapiens
MGTLSLHPGIDVRDAPLKEIKVTSSRRFIASFNVVNTTKRDAGKYRCMIRTEGGVGISNYAELVVKEPPVPIAPPQLASVGATYLWIQLNANSINGDGPIVAREVEYCTASGSWNDRQPVDSTSYKIGHLDPDTEYEISVLLTRPGEGGTGSPGPALRTRTKCADPMRGPRKLEVVEVKSRQITIRWEPFGYNVTRCHSYNLTVHYCYQVGGQEQVREEVSWDTENSHPQHTITNLSPYTNVSVKLILMNPEGRKESQELIVQTDEDLPGAVPTESIQGSTFEEKIFLQWREPTQTYGVITLYEITYKAVSSFDPEIDLSNQSGRVSKLGNETHFLFFGLYPGTTYSFTIRASTAKGFGPPATNQFTTKISAPSMPAYELETPLNQTDNTVTVMLKPAHSRGAPVSVYQIVVEEERPRRTKKTTEILKCYPVPIHFQNASLLNSQYYFAAEFPADSLQAAQPFTIGDNKTYNGYWNTPLLPYKSYRIYFQAASRANGETKIDCVQVATKGAATPKPVPEPEKQTDHTVKIAGVIAGILLFVIIFLGVVLVMKKRKLAKKRKETMSSTRQEMTVMVNSMDKSYAEQGTNCDEAFSFMDTHNLNGRSVSSPSSFTMKTNTLSTSVPNSYYPDETHTMASDTSSLVQSHTYKKREPADVPYQTGQLHPAIRVADLLQHITQMKCAEGYGFKEEYESFFEGQSAPWDSAKKDENRMKNRYGNIIAYDHSRVRLQTIEGDTNSDYINGNYIDGYHRPNHYIATQGPMQETIYDFWRMVWHENTASIIMVTNLVEVGRVKCCKYWPDDTEIYKDIKVTLIETELLAEYVIRTFAVEKRGVHEIREIRQFHFTGWPDHGVPYHATGLLGFVRQVKSKSPPSAGPLVVHCSAGAGRTGCFIVIDIMLDMAEREGVVDIYNCVRELRSRRVNMVQTEEQYVFIHDAILEACLCGDTSVPASQVRSLYYDMNKLDPQTNSSQIKEEFRTLNMVTPTLRVEDCSIALLPRNHEKNRCMDILPPDRCLPFLITIDGESSNYINAALMDSYKQPSAFIVTQHPLPNTVKDFWRLVLDYHCTSVVMLNDVDPAQLCPQYWPENGVHRHGPIQVEFVSADLEEDIISRIFRIYNAARPQDGYRMVQQFQFLGWPMYRDTPVSKRSFLKLIRQVDKWQEEYNGGEGRTVVHCLNGGGRSGTFCAISIVCEMLRHQRTVDVFHAVKTLRNNKPNMVDLLDQYKFCYEVALEYLNSG

SEQ ID NO: 60168 - protein, 979 aa, Homo sapiens
MRRPRRPGGLGGSGGLRLLLCLLLLSSRPGGCSAVSAHGCLFDRRLCSHLEVCIQDGLFGQCQVGVGQARPLLQVTSPVLQRLQGVLRQLMSQGLSWHDDLTQYVISQEMERIPRLRPPEPRPRDRSGLAPKRPGPAGELLLQDIPTGSAPAAQHRLPQPPVGKGGAGASSSLSPLQAELLPPLLEHLLLPPQPPHPSLSYEPALLQPYLFHQFGSRDGSRVSEGSPGMVSVGPLPKAEAPALFSRTASKGIFGDHPGHSYGDLPGPSPAQLFQDSGLLYLAQELPAPSRARVPRLPEQGSSSRAEDSPEGYEKEGLGDRGEKPASPAVQPDAALQRLAAVLAGYGVELRQLTPEQLSTLLTLLQLLPKGAGRNPGGVVNVGADIKKTMEGPVEGRDTAELPARTSPMPGHPTASPTSSEVQQVPSPVSSEPPKAARPPVTPVLLEKKSPLGQSQPTVAGQPSARPAAEEYGYIVTDQKPLSLAAGVKLLEILAEHVHMSSGSFINISVVGPALTFRIRHNEQNLSLADVTQQAGLVKSELEAQTGLQILQTGVGQREEAAAVLPQTAHSTSPMRSVLLTLVALAGVAGLLVALAVALCVRQHARQQDKERLAALGPEGAHGDTTFEYQDLCRQHMATKSLFNRAEGPPEPSRVSSVSSQFSDAAQASPSSHSSTPSWCEEPAQANMDISTGHMILAYMEDHLRNRDRLAKEWQALCAYQAEPNTCATAQGEGNIKKNRHPDFLPYDHARIKLKVESSPSRSDYINASPIIEHDPRMPAYIATQGPLSHTIADFWQMVWESGCTVIVMLTPLVEDGVKQCDRYWPDEGASLYHVYEVNLVSEHIWCEDFLVRSFYLKNVQTQETRTLTQFHFLSWPAEGTPASTRPLLDFRRKVNKCYRGRSCPIIVHCSDGAGRTGTYILIDMVLNRMAKGVKEIDIAATLEHVRDQRPGLVRSKDQFEFALTAVAEEVNAILKALPQ

SEQ ID NO: 60169 - protein, 950 aa, Homo sapiens
MRRPRRPGGLGGSGGLRLLLCLLLLSSRPGGCSAVSAHGCLFDRRLCSHLEVCIQDGLFGQCQVGVGQARPLLQVTSPVLQRLQGVLRQLMSQGLSWHDDLTQYVISQEMERIPRLRPPEPRPRDRSGLAPKRPGPAGELLLQDIPTGSAPAAQHRLPQPPVGKGGAGASSSLSPLQAELLPPLLEHLLLPPQPPHPSLSYEPALLQPYLFHQFGSRDGSRVSEGSPGMVSVGPLPKAEAPALFSRTASKGIFGDHPGHSYGDLPGPSPAQLFQDSGLLYLAQELPAPSRARVPRLPEQGSSSRAEDSPEGYEKEGLGDRGEKPASPAVQPDAALQRLAAVLAGYGVELRQLTPEQLSTLLTLLQLLPKGAGRNPGGVVNVGADIKKTMEGPVEGRDTAELPARTSPMPGHPTASPTSSEVQQVPSPVSSEPPKAARPPVTPVLLEKKSPLGQSQPTVAGQPSARPAAEEYGYIVTDQNVVGPALTFRIRHNEQNLSLADVTQQAGLVKSELEAQTGLQILQTGVGQREEAAAVLPQTAHSTSPMRSVLLTLVALAGVAGLLVALAVALCVRQHARQQDKERLAALGPEGAHGDTTFEYQDLCRQHMATKSLFNRAEGPPEPSRVSSVSSQFSDAAQASPSSHSSTPSWCEEPAQANMDISTGHMILAYMEDHLRNRDRLAKEWQALCAYQAEPNTCATAQGEGNIKKNRHPDFLPYDHARIKLKVESSPSRSDYINASPIIEHDPRMPAYIATQGPLSHTIADFWQMVWESGCTVIVMLTPLVEDGVKQCDRYWPDEGASLYHVYEVNLVSEHIWCEDFLVRSFYLKNVQTQETRTLTQFHFLSWPAEGTPASTRPLLDFRRKVNKCYRGRSCPIIVHCSDGAGRTGTYILIDMVLNRMAKGVKEIDIAATLEHVRDQRPGLVRSKDQFEFALTAVAEEVNAILKALPQ

SEQ ID NO: 60170 - protein, 162 aa, Homo sapiens
MRRPRRPGGLGGSGGLRLLLCLLLLSSRPGGCSAVSAHGCLFDRRLCSHLEVCIQDGLFGQCQVGVGQARPLLQVTSPVLQRLQGVLRQLMSQGLSWHDDLTQYVISQEMERIPRLRPPEPRPRDRSGLAPKRPGPAGELLLQDIPTGSAPAAQLLSVPSAG

SEQ ID NO: 60171 - protein, 889 aa, Homo sapiens
MSQGLSWHDDLTQYVISQEMERIPRLRPPEPRPRDRSGLAPKRPGPAGELLLQDIPTGSAPAAQHRLPQPPVGKGGAGASSSLSPLQAELLPPLLEHLLLPPQPPHPSLSYEPALLQPYLFHQFGSRDGSRVSEGSPGMVSVGPLPKAEAPALFSRTASKGIFGDHPGHSYGDLPGPSPAQLFQDSGLLYLAQELPAPSRARVPRLPEQGSSSRAEDSPEGYEKEGLGDRGEKPASPAVQPDAALQRLAAVLAGYGVELRQLTPEQLSTLLTLLQLLPKGAGRNPGGVVNVGADIKKTMEGPVEGRDTAELPARTSPMPGHPTASPTSSEVQQVPSPVSSEPPKAARPPVTPVLLEKKSPLGQSQPTVAGQPSARPAAEEYGYIVTDQKPLSLAAGVKLLEILAEHVHMSSGSFINISVVGPALTFRIRHNEQNLSLADVTQQAGLVKSELEAQTGLQILQTGVGQREEAAAVLPQTAHSTSPMRSVLLTLVALAGVAGLLVALAVALCVRQHARQQDKERLAALGPEGAHGDTTFEYQDLCRQHMATKSLFNRAEGPPEPSRVSSVSSQFSDAAQASPSSHSSTPSWCEEPAQANMDISTGHMILAYMEDHLRNRDRLAKEWQALCAYQAEPNTCATAQGEGNIKKNRHPDFLPYDHARIKLKVESSPSRSDYINASPIIEHDPRMPAYIATQGPLSHTIADFWQMVWESGCTVIVMLTPLVEDGVKQCDRYWPDEGASLYHVYEVNLVSEHIWCEDFLVRSFYLKNVQTQETRTLTQFHFLSWPAEGTPASTRPLLDFRRKVNKCYRGRSCPIIVHCSDGAGRTGTYILIDMVLNRMAKGVKEIDIAATLEHVRDQRPGLVRSKDQFEFALTAVAEEVNAILKALPQ

SEQ ID NO: 60172 - protein, 950 aa, Homo sapiens; identical to SEQ ID NO: 60169

SEQ ID NO: 60173 - protein, 986 aa, Homo sapiens
MGPPLPLLLLLLLLLPPRVLPAAPSSVPRGRQLPGRLGCLLEEGLCGASEACVNDGVFGRCQKVPAMDFYRYEVSPVALQRLRVALQKLSGTGFTWQDDYTQYVMDQELADLPKTYLRRPEASSPARPSKHSVGSERRYSREGGAALANALRRHLPFLEALSQAPASDVLARTHTAQDRPPAEGDDRFSESILTYVAHTSALTYPPGSRTQLREDLLPRTLGQLQPDELSPKVDSGVDRHHLMAALSAYAAQRPPAPPGEGSLEPQYLLRAPSRMPRPLLAPAAPQKWPSPLGDSEDPSSTGDGARIHTLLKDLQRQPAEVRGLSGLELDGMAELMAGLMQGVDHGVARGSPGRAALGESGEQADGPKATLRGDSFPDDGVQDDDDRLYQEVHRLSATLGGLLQDHGSRLLPGALPFARPLDMERKKSEHPESSLSSEEETAGVENVKSQTYSKDLLGQQPHSEPGAAAFGELQNQMPGPSKEEQSLPAGAQEALSDGLQLEVQPSEEEARGYIVTDREVLGPAVTFKVSANVQNVTTEDVEKATVDNKDKLEETSGLKILQTGVGSKSKLKFLPPQAEQEDSTKFIALTLVSLACILGVLLASGLIYCLRHSSQHRLKEKLSGLGGDPGADATAAYQELCRQRMATRPPDRPEGPHTSRISSVSSQFSDGPIPSPSARSSASSWSEEPVQSNMDISTGHMILSYMEDHLKNKNRLEKEWEALCAYQAEPNSSFVAQREENVPKNRSLAVLTYDHSRVLLKAENSHSHSDYINASPIMDHDPRNPAYIATQGPLPATVADFWQMVWESGCVVIVMLTPLAENGVRQCYHYWPDEGSNLYHIYEVNLVSEHIWCEDFLVRSFYLKNLQTNETRTVTQFHFLSWYDRGVPSSSRSLLDFRRKVNKCYRGRSCPIIVHCSDGAGRSGTYVLIDMVLNKMAKGAKEIDIAATLEHLRDQRPGMVQTKEQFEFALTAVAEEVNAILKALPQ

SEQ ID NO: 60174 - protein, 998 aa, Homo sapiens
MGPPLPLLLLLLLLLPPRVLPAAPSSVPRGRQLPGRLDGVFGRCQKVPAMDFYRYEVSPVALQRLRVALQKLSGTGFTWQDDYTQYVMDQELADLPKTYLRRPEASSPARPSKHSVGSERRYSREGGAALANALRRHLPFLEALSQAPASDVLARTHTAQDRPPAEGDDRFSESILTYVAHTSALTYPPGSRTQLREDLLPRTLGQLQPDELSPKVDSGVDRHHLMAALSAYAAQRPPAPPGEGSLEPQYLLRAPSRMPRPLLAPAAPQKWPSPLGDSEDPSSTGDGARIHTLLKDLQRQPAEVRGLSGLELDGMAELMAGLMQGVDHGVARGSPGRAALGESGEQADGPKATLRGDSFPDDGVQDDDDRLYQEVHRLSATLGGLLQDHGSRLLPGALPFARPLDMERKKSEHPESSLSSEEETAGVENVKSQTYSKDLLGQQPHSEPGAAAFGELQNQMPGPSKEEQSLPAGAQEALSDGLQLEVQPSEEEARGYIVTDRDPLRPEEGRRLVEDVARLLQVPSSAFADVEVLGPAVTFKVSANVQNVTTEDVEKATVDNKDKLEETSGLKILQTGVGSKSKLKFLPPQAEQEDSTKFIALTLVSLACILGVLLASGLIYCLRHSSQHRLKEKLSGLGGDPGADATAAYQELCRQRMATRPPDRPEGPHTSRISSVSSQFSDGPIPSPSARSSASSWSEEPVQSNMDISTGHMILSYMEDHLKNKNRLEKEWEALCAYQAEPNSSFVAQREENVPKNRSLAVLTYDHSRVLLKAENSHSHSDYINASPIMDHDPRNPAYIATQGPLPATVADFWQMVWESGCVVIVMLTPLAENGVRQCYHYWPDEGSNLYHIYEVNLVSEHIWCEDFLVRSFYLKNLQTNETRTVTQFHFLSWYDRGVPSSSRSLLDFRRKVNKCYRGRSCPIIVHCSDGAGRSGTYVLIDMVLNKMAKGAKEIDIAATLEHLRDQRPGMVQTKEQFEFALTAVAEEVNAILKALPQ

SEQ ID NO: 60175 - protein, 1015 aa, Homo sapiens
MGPPLPLLLLLLLLLPPRVLPAAPSSVPRGRQLPGRLGCLLEEGLCGASEACVNDGVFGRCQKVPAMDFYRYEVSPVALQRLRVALQKLSGTGFTWQDDYTQYVMDQELADLPKTYLRRPEASSPARPSKHSVGSERRYSREGGAALANALRRHLPFLEALSQAPASDVLARTHTAQDRPPAEGDDRFSESILTYVAHTSALTYPPGSRTQLREDLLPRTLGQLQPDELSPKVDSGVDRHHLMAALSAYAAQRPPAPPGEGSLEPQYLLRAPSRMPRPLLAPAAPQKWPSPLGDSEDPSSTGDGARIHTLLKDLQRQPAEVRGLSGLELDGMAELMAGLMQGVDHGVARGSPGRAALGESGEQADGPKATLRGDSFPDDGVQDDDDRLYQEVHRLSATLGGLLQDHGSRLLPGALPFARPLDMERKKSEHPESSLSSEEETAGVENVKSQTYSKDLLGQQPHSEPGAAAFGELQNQMPGPSKEEQSLPAGAQEALSDGLQLEVQPSEEEARGYIVTDRDPLRPEEGRRLVEDVARLLQVPSSAFADVEVLGPAVTFKVSANVQNVTTEDVEKATVDNKDKLEETSGLKILQTGVGSKSKLKFLPPQAEQEDSTKFIALTLVSLACILGVLLASGLIYCLRHSSQHRLKEKLSGLGGDPGADATAAYQELCRQRMATRPPDRPEGPHTSRISSVSSQFSDGPIPSPSARSSASSWSEEPVQSNMDISTGHMILSYMEDHLKNKNRLEKEWEALCAYQAEPNSSFVAQREENVPKNRSLAVLTYDHSRVLLKAENSHSHSDYINASPIMDHDPRNPAYIATQGPLPATVADFWQMVWESGCVVIVMLTPLAENGVRQCYHYWPDEGSNLYHIYEVNLVSEHIWCEDFLVRSFYLKNLQTNETRTVTQFHFLSWYDRGVPSSSRSLLDFRRKVNKCYRGRSCPIIVHCSDGAGRSGTYVLIDMVLNKMAKGAKEIDIAATLEHLRDQRPGMVQTKEQFEFALTAVAEEVNAILKALPQ

SEQ ID NO: 60176 - protein, 1038 aa, Homo sapiens
MAVESEYSLLRTEASFPTMKMFCVSHTLPRVEVMFVSGPQTRERTEPVDPRWQCLVQMWAGCLLEEGLCGASEACVNDGVFGRCQKVPAMDFYRYEVSPVALQRLRVALQKLSGTGFTWQDDYTQYVMDQELADLPKTYLRRPEASSPARPSKHSVGSERRYSREGGAALANALRRHLPFLEALSQAPASDVLARTHTAQDRPPAEGDDRFSESILTYVAHTSALTYPPGSRTQLREDLLPRTLGQLQPDELSPKVDSGVDRHHLMAALSAYAAQRPPAPPGEGSLEPQYLLRAPSRMPRPLLAPAAPQKWPSPLGDSEDPSSTGDGARIHTLLKDLQRQPAEVRGLSGLELDGMAELMAGLMQGVDHGVARGSPGRAALGESGEQADGPKATLRGDSFPDDGVQDDDDRLYQEVHRLSATLGGLLQDHGSRLLPGALPFARPLDMERKKSEHPESSLSSEEETAGVENVKSQTYSKDLLGQQPHSEPGAAAFGELQNQMPGPSKEEQSLPAGAQEALSDGLQLEVQPSEEEARGYIVTDRDPLRPEEGRRLVEDVARLLQVPSSAFADVEVLGPAVTFKVSANVQNVTTEDVEKATVDNKDKLEETSGLKILQTGVGSKSKLKFLPPQAEQEDSTKFIALTLVSLACILGVLLASGLIYCLRHSSQHRLKEKLSGLGGDPGADATAAYQELCRQRMATRPPDRPEGPHTSRISSVSSQFSDGPIPSPSARSSASSWSEEPVQSNMDISTGHMILSYMEDHLKNKNRLEKEWEALCAYQAEPNSSFVAQREENVPKNRSLAVLTYDHSRVLLKAENSHSHSDYINASPIMDHDPRNPAYIATQGPLPATVADFWQMVWESGCVVIVMLTPLAENGVRQCYHYWPDEGSNLYHIYEVNLVSEHIWCEDFLVRSFYLKNLQTNETRTVTQFHFLSWYDRGVPSSSRSLLDFRRKVNKCYRGRSCPIIVHCSDGAGRSGTYVLIDMVLNKMAKGAKEIDIAATLEHLRDQRPGMVQTKEQFEFALTAVAEEVNAILKALPQ

SEQ ID NO: 60177 - protein, 977 aa, Homo sapiens
MGPPLPLLLLLLLLLPPRVLPAAPSSVPRGRQLPGRLGCLLEEGLCGASEACVNGFTWQDDYTQYVMDQELADLPKTYLRRPEASSPARPSKHSVGSERRYSREGGAALANALRRHLPFLEALSQAPASDVLARTHTAQDRPPAEGDDRFSESILTYVAHTSALTYPPGSRTQLREDLLPRTLGQLQPDELSPKVDSGVDRHHLMAALSAYAAQRPPAPPGEGSLEPQYLLRAPSRMPRPLLAPAAPQKWPSPLGDSEDPSSTGDGARIHTLLKDLQRQPAEVRGLSGLELDGMAELMAGLMQGVDHGVARGSPGRAALGESGEQADGPKATLRGDSFPDDGVQDDDDRLYQEVHRLSATLGGLLQDHGSRLLPGALPFARPLDMERKKSEHPESSLSSEEETAGVENVKSQTYSKDLLGQQPHSEPGAAAFGELQNQMPGPSKEEQSLPAGAQEALSDGLQLEVQPSEEEARGYIVTDRDPLRPEEGRRLVEDVARLLQVPSSAFADVEVLGPAVTFKVSANVQNVTTEDVEKATVDNKDKLEETSGLKILQTGVGSKSKLKFLPPQAEQEDSTKFIALTLVSLACILGVLLASGLIYCLRHSSQHRLKEKLSGLGGDPGADATAAYQELCRQRMATRPPDRPEGPHTSRISSVSSQFSDGPIPSPSARSSASSWSEEPVQSNMDISTGHMILSYMEDHLKNKNRLEKEWEALCAYQAEPNSSFVAQREENVPKNRSLAVLTYDHSRVLLKAENSHSHSDYINASPIMDHDPRNPAYIATQGPLPATVADFWQMVWESGCVVIVMLTPLAENGVRQCYHYWPDEGSNLYHIYEVNLVSEHIWCEDFLVRSFYLKNLQTNETRTVTQFHFLSWYDRGVPSSSRSLLDFRRKVNKCYRGRSCPIIVHCSDGAGRSGTYVLIDMVLNKMAKGAKEIDIAATLEHLRDQRPGMVQTKEQFEFALTAVAEEVNAILKALPQ

SEQ ID NO: 60178 - protein, 1216 aa, Homo sapiens
MGHLPTGIHGARRLLPLLWLFVLFKNATAFHVTVQDDNNIVVSLEASDVISPASVYVVKITGESKNYFFEFEEFNSTLPPPVIFKASYHGLYYIITLVVVNGNVVTKPSRSITVLTKPLPVTSVSIYDYKPSPETGVLFEIHYPEKYNVFTRVNISYWEGKDFRTMLYKDFFKGKTVFNHWLPGMCYSNITFQLVSEATFNKSTLVEYSGVSHEPKQHRTAPYPPQNISVRIVNLNKNNWEEQSGNFPEESFMRSQDTIGKEKLFHFTEETPEIPSGNISSGWPDFNSSDYETTSQPYWWDSASAAPESEDEFVSVLPMEYENNSTLSETEKSTSGSFSFFPVQMILTWLPPKPPTAFDGFHIHIEREENFTEYLMVDEEAHEFVAELKEPGKYKLSVTTFSSSGSCETRKSQSAKSLSFYISPSGEWIEELTEKPQHVSVHVLSSTTALMSWTSSQENYNSTIVSVVSLTCQKQKESQRLEKQYCTQVNSSKPIIENLVPGAQYQVVIYLRKGPLIGPPSDPVTFAIVPTGIKDLMLYPLGPTAVVLSWTRPYLGVFRKYVVEMFYFNPATMTSEWTTYYEIAATVSLTASVRIANLLPAWYYNFRVTMVTWGDPELSCCDSSTISFITAPVAPEITSVEYFNSLLYISWTYGDDTTDLSHSRMLHWMVVAEGKKKIKKSVTRNVMTAILSLPPGDIYNLSVTACTERGSNTSMLRLVKLEPAPPKSLFAVNKTQTSVTLLWVEEGVADFFEVFCQQVGSSQKTKLQEPVAVSSHVVTISSLLPATAYNCSVTSFSHDSPSVPTFIAVSTMVTEMNPNVVVISVLAILSTLLIGLLLVTLIILRKKHLQMARECGAGTFVNFASLERDGKLPYNWRRSIFAFLTLLPSCLWTDYLLAFYINPWSKNGLKKRKLTNPVQLDDFDAYIKDMAKDSDYKFSLQFEELKLIGLDIPHFAADLPLNRCKNRYTNILPYDFSRVRLVSMNEEEGADYINANYIPGYNSPQEYIATQGPLPETRNDFWKMVLQQKSQIIVMLTQCNEKRRVKCDHYWPFTEEPIAYGDITVEMISEEEQDDWACRHFRINYADEMQDVMHFNYTAWPDHGVPTANAAESILQFVHMVRQQATKSKGPMIIHCSAGVGRTGTFIALDRLLQHIRDHEFVDILGLVSEMRSYRMSMVQTEEQYIFIHQCVQLMWMKKKQQFCISDVIYENVSKS

SEQ ID NO: 60179 - protein, 1188 aa, Homo sapiens
MGHLPTGIHGARRLLPLLWLFVLFKNATAFHVTVQDDNNIVVSLEASDVISPASVYVVKITGESKNYFFEFEEFNSTLPPPVIFKASYHGLYYIITLVVVNGNVVTKPSRSITVLTKPLPVTSVSIYDYKPSPETGVLFEIHYPEKYNVFTRVNISYWEGKDFRTMLYKDFFKGKTVFNHWLPGMCYSNITFQLVSEATFNKSTLVEYSGVSHEPKQHRTAPYPPQNISVRIVNLNKNNWEEQSGNFPEESFMRSQDTIGKEKLFHFTEETPEIPSGNISSGWPDFNSSDYETTSQPYWWDSASAAPESEDEFVSVLPMEYENNSTLSETEKSTSGSFSFFPVQMILTWLPPKPPTAFDGFHIHIEREENFTEYLMVDEEAHEFVAELKEPGKYKLSVTTFSSSGSCETRKSQSAKSLSFYISPSGEWIEELTEKPQHVSVHVLSSTTALMSWTSSQENYNSTIVSVVSLTCQKQKESQRLEKQYCTQVNSSKPIIENLVPGAQYQVVIYLRKGPLIGPPSDPVTFAIVPTGIKDLMLYPLGPTAVVLSWTRPYLGVFRKYVVEMFYFNPATMTSEWTTYYEIAATVSLTASVRIANLLPAWYYNFRVTMVTWGDPELSCCDSSTISFITAPVAPEITSVEYFNSLLYISWTYGDDTTDLSHSRMLHWMVVAEGKKKIKKSVTRNVMTAILSLPPGDIYNLSVTACTERGSNTSMLRLVKLEPAPPKSLFAVNKTQTSVTLLWVEEGVADFFEVFCQQVGSSQKTKLQEPVAVSSHVVTISSLLPATAYNCSVTSFSHDSPSVPTFIAVSTMVTEMNPNVVVISVLAILSTLLIGLLLVTLIILRKKHLQMARECGAGTFVNFASLERDGKLPYNWSKNGLKKRKLTNPVQLDDFDAYIKDMAKDSDYKFSLQFEELKLIGLDIPHFAADLPLNRCKNRYTNILPYDFSRVRLVSMNEEEGADYINANYIPGYNSPQEYIATQGPLPETRNDFWKMVLQQKSQIIVMLTQCNEKRRVKCDHYWPFTEEPIAYGDITVEMISEEEQDDWACRHFRINYADEMQDVMHFNYTAWPDHGVPTANAAESILQFVHMVRQQATKSKGPMIIHCSAGVGRTGTFIALDRLLQHIRDHEFVDILGLVSEMRSYRMSMVQTEEQYIFIHQCVQLMWMKKKQQFCISDVIYENVSKS

SEQ ID NO: 60180 - protein, 405 aa, Homo sapiens
MVTEMNPNVVVISVLAILSTLLIGLLLVTLIILRKKHLQMARECGAGTFVNFASLERDGKLPYNWRRSIFAFLTLLPSCLWTDYLLAFYINPWSKNGLKKRKLTNPVQLDDFDAYIKDMAKDSDYKFSLQFEELKLIGLDIPHFAADLPLNRCKNRYTNILPYDFSRVRLVSMNEEEGADYINANYIPGYNSPQEYIATQGPLPETRNDFWKMVLQQKSQIIVMLTQCNEKRRVKCDHYWPFTEEPIAYGDITVEMISEEEQDDWACRHFRINYADEMQDVMHFNYTAWPDHGVPTANAAESILQFVHMVRQQATKSKGPMIIHCSAGVGRTGTFIALDRLLQHIRDHEFVDILGLVSEMRSYRMSMVQTEEQYIFIHQCVQLMWMKKKQQFCISDVIYENVSKS

SEQ ID NO: 60181 - protein, 405 aa, Homo sapiens; identical to SEQ ID NO: 60180

SEQ ID NO: 60182 - protein, 377 aa, Homo sapiens
MVTEMNPNVVVISVLAILSTLLIGLLLVTLIILRKKHLQMARECGAGTFVNFASLERDGKLPYNWSKNGLKKRKLTNPVQLDDFDAYIKDMAKDSDYKFSLQFEELKLIGLDIPHFAADLPLNRCKNRYTNILPYDFSRVRLVSMNEEEGADYINANYIPGYNSPQEYIATQGPLPETRNDFWKMVLQQKSQIIVMLTQCNEKRRVKCDHYWPFTEEPIAYGDITVEMISEEEQDDWACRHFRINYADEMQDVMHFNYTAWPDHGVPTANAAESILQFVHMVRQQATKSKGPMIIHCSAGVGRTGTFIALDRLLQHIRDHEFVDILGLVSEMRSYRMSMVQTEEQYIFIHQCVQLMWMKKKQQFCISDVIYENVSKS

SEQ ID NO: 60183 - protein, 377 aa, Homo sapiens; identical to SEQ ID NO: 60182

SEQ ID NO: 60184 - protein, 2295 aa, Homo sapiens
MDFLIIFLLLFIGTSETQVDVSNVVPGTRYDITISSISTTYTSPVTRIVTTNVTKPGPPVFLAGERVGSAGILLSWNTPPNPNGRIISYIVKYKEVCPWMQTVYTQVRSKPDSLEVLLTNLNPGTTYEIKVIILNATKVGCLLSPILLNTVLEGLARAINLTRECQTVDAGQCVQCAVREPKQGSTSGGRAQTNKKTAVTSADLNHTAGDLRTGRLPPQPLTAEQPNWEAPPSRGRLTPHKAGYSSATAAGTQANRVWSRPLAKIQTTIREYYKHLYAKKEGILPNSFYEASIILIPKPVPEGPPQNCVTGNITGKSFSILWDPPTIVTGKFSYRVELYGPSGRILDNSTKDLKFAFTNLTPFTMYDVYIAAETSAGTGPKSNISVFTPPDVPGAVFDLQLAEVESTQVRITWKKPRQPNGIINQYRVKVLVPETGIILENTLLTGNNEYINDPMAPEIVNIVEPMVGLYEGSAEMSSDLHSLATFIYNSHPDKNFPARNRAEDQTSPVVTTRNQYITDIAAEQLSYVIRRLVPFTEHMISVSAFTIMGEGPPTVLSVRTRQQVPSSIKIINYKNISSSSILLYWDPPEYPNGKITHYTIYAMELDTNRAFQITTIDNSFLITGLKKYTKYKMRVAASTHVGESSLSEENDIFVRTSEDEPESSPQDVEVIDVTADEIRLKWSPPEKPNGIIIAYEVLYKNIDTLYMKNTSTTDIILRNLRPHTLYNISVRSYTRFGHGNQVSSLLSVRTSETVPDSAPENITYKNISSGEIELSFLPPSSPNGIIQKYTIYLKRSNGNEERTINTTSLTQNIKVLKKYTQYIIEVSASTLKGEGVRSAPISILTEEDAPDSPPQDFSVKQLSGVTVKLSWQPPLEPNGIILYYTVYVWNRSSLKTINVTETSLELSDLDYNVEYSAYVTASTRFGDGKTRSNIISFQTPEGAPSDPPKDVYYANLSSSSIILFWTPPSKPNGIIQYYSVYYRNTSGTFMQNFTLHEVTNDFDNMTVSTIIDKLTIFSYYTFWLTASTSVGNGNKSSDIIEVYTDQDIPEGFVGNLTYESISSTAINVSWVPPAQPNGLVFYYVSLILQQTPRHVRPPLVTYERSIYFDNLEKYTDYILKITPSTEKGFSDTYTAQLYIKTEEDVPETSPIINTFKNLSSTSVLLSWDPPVKPNGAIISYDLTLQGPNENYSFITSDNYIILEELSPFTLYSFFAAARTRKGLGPSSILFFYTDESVPLAPPQNLTLINCTSDFVWLKWSPSPLPGGIVKVYSFKIHEHETDTIYYKNISGFKTEAKLVGLEPVSTYSIRVSAFTKVGNGNQFSNVVKFTTQESVPDVVQNMQCMATSWQSVLVKWDPPKKANGIITQYMVTVERNSTKVSPQDHMYTFIKLLANTSYVFKVRASTSAGEGDESTCHVSTLPETVPSVPTNIAFSDVQSTSATLTWIRPDTILGYFQNYKITTQLRAQKCKEWESEECVEYQKIQYLYEAHLTEETVYGLKKFRWYRFQVAASTNAGYGNASNWISTKTLPGPPDGPPENVHVVATSPFSISISWSEPAVITGPTCYLIDVKSVDNDEFNISFIKSNEENKTIEIKDLEIFTRYSVVITAFTGNISAAYVEGKSSAEMIVTTLESAPKDPPNNMTFQKIPDEVTKFQLTFLPPSQPNGNIQVYQALVYREDDPTAVQIHNLSIIQKTNTFVIAMLEGLKGGHTYNISVYAVNSAGAGPKVPMRITMDIKAPARPKTKPTPIYDATGKLLVTSTTITIRMPICYYSDDHGPIKNVQVLVTETGAQHDGNVTKWYDAYFNKARPYFTNEGFPNPPCTEGKTKFSGNEEIYIIGADNACMIPGNEDKICNGPLKPKKQYLFKFRATNIMGQFTDSDYSDPVKTLGEGLSERTVEIILSVTLCILSIILLGTAIFAFARIRQKQKEGGTYSPQDAEIIDTKLKLDQLITVADLELKDERLTRLLSYRKSIKPISKKSFLQHVEELCTNNNLKFQEEFSELPKFLQDLSSTDADLPWNRAKNRFPNIKPYNNNRVKLIADASVPGSDYINASYISGYLCPNEFIATQGPLPGTVGDFWRMVWETRAKTLVMLTQCFEKGRIRCHQYWPEDNKPVTVFGDIVITKLMEDVQIDWTIRDLKIERHGDCMTVRQCNFTAWPEHGVPENSAPLIHFVKLVRASRAHDTTPMIVHCSAGVGRTGVFIALDHLTQHINDHDFVDIYGLVAELRSERMCMVQNLAQYIFLHQCILDLLSNKGSNQPICFVNYSALQKMDSLDAMEGDVELEWEETTM

SEQ ID NO: 60185 - protein, 1928 aa, Homo sapiens
MAPTWGPGMVSVVGPMGLLVVLLVGGCAAEEPPRFIKEPKDQIGVSGGVASFVCQATGDPKPRVTWNKKGKKVNSQRFETIEFDESAGAVLRIQPLRTPRDENVYECVAQNSVGEITVHAKLTVLREDQLPSGFPNIDMGPQLKVVERTRTATMLCAASGNPDPEITWFKDFLPVDPSASNGRIKQLRSDQAFSHLPTGALQIESSEETDQGKYECVATNSAGVRYSSPANLYVRVRRVAPRFSILPMSHEIMPGGNVNITCVAVGSPMPYVKWMQGAEDLTPEDDMPVGRNVLELTDVKDSANYTCVAMSSLGVIEAVAQITVKSLPKAPGTPMVTENTATSITITWDSGNPDPVSYYVIEYKSKSQDGPYQIKEDITTTRYSIGGLSPNSEYEIWVSAVNSIGQGPPSESVVTRTGEQAPASAPRNVQARMLSATTMIVQWEEPVEPNGLIRGYRVYYTMEPEHPVGNWQKHNVDDSLLTTVGSLLEDETYTVRVLAFTSVGDGPLSDPIQVKTQQGVPGQPMNLRAEARSETSITLSWSPPRQESIIKYELLFREGDHGREVGRTFDPTTSYVVEDLKPNTEYAFRLAARSPQGLGAFTPVVRQRTLQSKPSAPPQDVKCVSVRSTAILVSWRPPPPETHNGALVGYSVRYRPLGSEDPEPKEVNGIPPTTTQILLEALEKWTQYRITTVAHTEVGPGPESSPVVVRTDEDVPSAPPRKVEAEALNATAIRVLWRSPAPGRQHGQIRGYQVHYVRMEGAEARGPPRIKDVMLADAQWETDDTAEYEMVITNLQPETAYSITVAAYTMKGDGARSKPKVVVTKGAVLGRPTLSVQQTPEGSLLARWEPPAGTAEDQVLGYRLQFGREDSTPLATLEFPPSEDRYTASGVHKGATYVFRLAARSRGGLGEEAAEVLSIPEDTPRGHPQILEAAGNASAGTVLLRWLPPVPAERNGAIVKYTVAVREAGALGPARETELPAAAEPGAENALTLQGLKPDTAYDLQVRAHTRRGPGPFSPPVRYRTFLRDQVSPKNFKVKMIMKTSVLLSWEFPDNYNSPTPYKIQYNGLTLDVDGRTTKKLITHLKPHTFYNFVLTNRGSSLGGLQQTVTAWTAFNLLNGKPSVAPKPDADGFIMVYLPDGQSPVPVQSYFIVMVPLRKSRGGQFLTPLGSPEDMDLEELIQDISRLQRRSLRHSRQLEVPRPYIAARFSVLPPTFHPGDQKQYGGFDNRGLEPGHRYVLFVLAVLQKSEPTFAASPFSDPFQLDNPDPQPIVDGEEGLIWVIGPVLAVVFIICIVIAILLYKNKPDSKRKDSEPRTKCLLNNADLAPHHPKDPVEMRRINFQTPGMLSHPPIPIADMAEHTERLKANDSLKLSQEYESIDPGQQFTWEHSNLEVNKPKNRYANVIAYDHSRVILQPIEGIMGSDYINANYVDGYRCQNAYIATQGPLPETFGDFWRMVWEQRSATIVMMTRLEEKSRIKCDQYWPNRGTETYGFIQVTLLDTIELATFCVRTFSLHKNGSSEKREVRQFQFTAWPDHGVPEYPTPFLAFLRRVKTCNPPDAGPIVVHCSAGVGRTGCFIVIDAMLERIKPEKTVDVYGHVTLMRSQRNYMVQTEDQYSFIHEALLEAVGCGNTEVPARSLYAYIQKLAQVEPGEHVTGMELEFKRLANSKAHTSRFISANLPCNKFKNRLVNIMPYESTRVCLQPIRGVEGSDYINASFIDGYRQQKAYIATQGPLAETTEDFWRMLWENNSTIVVMLTKLREMGREKCHQYWPAERSARYQYFVVDPMAEYNMPQYILREFKVTDARDGQSRTVRQFQFTDWPEQGVPKSGEGFIDFIGQVHKTKEQFGQDGPISVHCSAGVGRTGVFITLSIVLERMRYEGVVDIFQTVKMLRTQRPAMVQTEDEYQFCYQAALEYLGSFDHYAT

SEQ ID NO: 60186 - protein, 1910 aa, Homo sapiens
MAPTWGPGMVSVVGPMGLLVVLLVGGCAAEEPPRFIKEPKDQIGVSGGVASFVCQATGDPKPRVTWNKKGKKVNSQRFETIEFDESAGAVLRIQPLRTPRDENVYECVAQNSVGEITVHAKLTVLREDQLPSGFPNIDMGPQLKVVERTRTATMLCAASGNPDPEITWFKDFLPVDPSASNGRIKQLRSGALQIESSEETDQGKYECVATNSAGVRYSSPANLYVRVRRVAPRFSILPMSHEIMPGGNVNITCVAVGSPMPYVKWMQGAEDLTPEDDMPVGRNVLELTDVKDSANYTCVAMSSLGVIEAVAQITVKSLPKAPGTPMVTENTATSITITWDSGNPDPVSYYVIEYKSKSQDGPYQIKEDITTTRYSIGGLSPNSEYEIWVSAVNSIGQGPPSESVVTRTGEQAPASAPRNVQARMLSATTMIVQWEEPVEPNGLIRGYRVYYTMEPEHPVGNWQKHNVDDSLLTTVGSLLEDETYTVRVLAFTSVGDGPLSDPIQVKTQQGVPGQPMNLRAEARSETSITLSWSPPRQESIIKYELLFREGDHGREVGRTFDPTTSYVVEDLKPNTEYAFRLAARSPQGLGAFTPVVRQRTLQSKPSAPPQDVKCVSVRSTAILVSWRPPPPETHNGALVGYSVRYRPLGSEDPEPKEVNGIPPTTTQILLEALEKWTQYRITTVAHTEVGPGPESSPVVVRTDEDVPSAPPRKVEAEALNATAIRVLWRSPAPGRQHGQIRGYQVHYVRMEGAEARGPPRIKDVMLADAQEMVITNLQPETAYSITVAAYTMKGDGARSKPKVVVTKGAVLGRPTLSVQQTPEGSLLARWEPPAGTAEDQVLGYRLQFGREDSTPLATLEFPPSEDRYTASGVHKGATYVFRLAARSRGGLGEEAAEVLSIPEDTPRGHPQILEAAGNASAGTVLLRWLPPVPAERNGAIVKYTVAVREAGALGPARETELPAAAEPGAENALTLQGLKPDTAYDLQVRAHTRRGPGPFSPPVRYRTFLRDQVSPKNFKVKMIMKTSVLLSWEFPDNYNSPTPYKIQYNGLTLDVDGRTTKKLITHLKPHTFYNFVLTNRGSSLGGLQQTVTAWTAFNLLNGKPSVAPKPDADGFIMVYLPDGQSPVPVQSYFIVMVPLRKSRGGQFLTPLGSPEDMDLEELIQDISRLQRRSLRHSRQLEVPRPYIAARFSVLPPTFHPGDQKQYGGFDNRGLEPGHRYVLFVLAVLQKSEPTFAASPFSDPFQLDNPDPQPIVDGEEGLIWVIGPVLAVVFIICIVIAILLYKNKPDSKRKDSEPRTKCLLNNADLAPHHPKDPVEMRRINFQTPGMLSHPPIPIADMAEHTERLKANDSLKLSQEYESIDPGQQFTWEHSNLEVNKPKNRYANVIAYDHSRVILQPIEGIMGSDYINANYVDGYRCQNAYIATQGPLPETFGDFWRMVWEQRSATIVMMTRLEEKSRIKCDQYWPNRGTETYGFIQVTLLDTIELATFCVRTFSLHKNGSSEKREVRQFQFTAWPDHGVPEYPTPFLAFLRRVKTCNPPDAGPIVVHCSAGVGRTGCFIVIDAMLERIKPEKTVDVYGHVTLMRSQRNYMVQTEDQYSFIHEALLEAVGCGNTEVPARSLYAYIQKLAQVEPGEHVTGMELEFKRLANSKAHTSRFISANLPCNKFKNRLVNIMPYESTRVCLQPIRGVEGSDYINASFIDGYRQQKAYIATQGPLAETTEDFWRMLWENNSTIVVMLTKLREMGREKCHQYWPAERSARYQYFVVDPMAEYNMPQYILREFKVTDARDGQSRTVRQFQFTDWPEQGVPKSGEGFIDFIGQVHKTKEQFGQDGPISVHCSAGVGRTGVFITLSIVLERMRYEGVVDIFQTVKMLRTQRPAMVQTEDEYQFCYQAALEYLGSFDHYAT

SEQ ID NO: 60187 - protein, 1501 aa, Homo sapiens
MAPTWGPGMVSVVGPMGLLVVLLVGGCAAEEPPRFIKEPKDQIGVSGGVASFVCQATGDPKPRVTWNKKGKKVNSQRFETIEFDESAGAVLRIQPLRTPRDENVYECVAQNSVGEITVHAKLTVLREDQLPSGFPNIDMGPQLKVVERTRTATMLCAASGNPDPEITWFKDFLPVDPSASNGRIKQLRSGALQIESSEETDQGKYECVATNSAGVRYSSPANLYVRVRRVAPRFSILPMSHEIMPGGNVNITCVAVGSPMPYVKWMQGAEDLTPEDDMPVGRNVLELTDVKDSANYTCVAMSSLGVIEAVAQITVKSLPKAPGTPMVTENTATSITITWDSGNPDPVSYYVIEYKSKSQDGPYQIKEDITTTRYSIGGLSPNSEYEIWVSAVNSIGQGPPSESVVTRTGEQAPASAPRNVQARMLSATTMIVQWEEPVEPNGLIRGYRVYYTMEPEHPVGNWQKHNVDDSLLTTVGSLLEDETYTVRVLAFTSVGDGPLSDPIQVKTQQGVPGQPMNLRAEARSETSITLSWSPPRQESIIKYELLFREGDHGREVGRTFDPTTSYVVEDLKPNTEYAFRLAARSPQGLGAFTPVVRQRTLQSISPKNFKVKMIMKTSVLLSWEFPDNYNSPTPYKIQYNGLTLDVDGRTTKKLITHLKPHTFYNFVLTNRGSSLGGLQQTVTAWTAFNLLNGKPSVAPKPDADGFIMVYLPDGQSPVPVQSYFIVMVPLRKSRGGQFLTPLGSPEDMDLEELIQDISRLQRRSLRHSRQLEVPRPYIAARFSVLPPTFHPGDQKQYGGFDNRGLEPGHRYVLFVLAVLQKSEPTFAASPFSDPFQLDNPDPQPIVDGEEGLIWVIGPVLAVVFIICIVIAILLYKNKPDSKRKDSEPRTKCLLNNADLAPHHPKDPVEMRRINFQTPGMLSHPPIPIADMAEHTERLKANDSLKLSQEYESIDPGQQFTWEHSNLEVNKPKNRYANVIAYDHSRVILQPIEGIMGSDYINANYVDGYRCQNAYIATQGPLPETFGDFWRMVWEQRSATIVMMTRLEEKSRIKCDQYWPNRGTETYGFIQVTLLDTIELATFCVRTFSLHKNGSSEKREVRQFQFTAWPDHGVPEYPTPFLAFLRRVKTCNPPDAGPIVVHCSAGVGRTGCFIVIDAMLERIKPEKTVDVYGHVTLMRSQRNYMVQTEDQYSFIHEALLEAVGCGNTEVPARSLYAYIQKLAQVEPGEHVTGMELEFKRLANSKAHTSRFISANLPCNKFKNRLVNIMPYESTRVCLQPIRGVEGSDYINASFIDGYRQQKAYIATQGPLAETTEDFWRMLWENNSTIVVMLTKLREMGREKCHQYWPAERSARYQYFVVDPMAEYNMPQYILREFKVTDARDGQSRTVRQFQFTDWPEQGVPKSGEGFIDFIGQVHKTKEQFGQDGPISVHCSAGVGRTGVFITLSIVLERMRYEGVVDIFQTVKMLRTQRPAMVQTEDEYQFCYQAALEYLGSFDHYAT

SEQ ID NO: 60188 - protein, 1948 aa, Homo sapiens
MAPTWGPGMVSVVGPMGLLVVLLVGGCAAEEPPRFIKEPKDQIGVSGGVASFVCQATGDPKPRVTWNKKGKKVNSQRFETIEFDESAGAVLRIQPLRTPRDENVYECVAQNSVGEITVHAKLTVLREDQLPSGFPNIDMGPQLKVVERTRTATMLCAASGNPDPEITWFKDFLPVDPSASNGRIKQLRSDQAFSHLPTGALQIESSEETDQGKYECVATNSAGVRYSSPANLYVRVWRTVRRVAPRFSILPMSHEIMPGGNVNITCVAVGSPMPYVKWMQGAEDLTPEDDMPVGRNVLELTDVKDSANYTCVAMSSLGVIEAVAQITVKSLPKAPGTPMVTENTATSITITWDSGNPDPVSYYVIEYKSKSQDGPYQIKEDITTTRYSIGGLSPNSEYEIWVSAVNSIGQGPPSESVVTRTGEQAPASAPRNVQARMLSATTMIVQWEEPVEPNGLIRGYRVYYTMEPEHPVGNWQKHNVDDSLLTTVGSLLEDETYTVRVLAFTSVGDGPLSDPIQVKTQQGVPGQPMNLRAEARSETSITLSWSPPRQESIIKYELLFREGDHGREVGRTFDPTTSYVVEDLKPNTEYAFRLAARSPQGLGAFTPVVRQRTLQSKPSAPPQDVKCVSVRSTAILVSWRPPPPETHNGALVGYSVRYRPLGSEDPEPKEVNGIPPTTTQILLEALEKWTQYRITTVAHTEVGPGPESSPVVVRTDEDVPSAPPRKVEAEALNATAIRVLWRSPAPGRQHGQIRGYQVHYVRMEGAEARGPPRIKDVMLADAQWETDDTAEYEMVITNLQPETAYSITVAAYTMKGDGARSKPKVVVTKGAVLGRPTLSVQQTPEGSLLARWEPPAGTAEDQVLGYRLQFGREDSTPLATLEFPPSEDRYTASGVHKGATYVFRLAARSRGGLGEEAAEVLSIPEDTPRGHPQILEAAGNASAGTVLLRWLPPVPAERNGAIVKYTVAVREAGALGPARETELPAAAEPGAENALTLQGLKPDTAYDLQVRAHTRRGPGPFSPPVRYRTFLRDQVSPKNFKVKMIMKTSVLLSWEFPDNYNSPTPYKIQYNGLTLDVDGRTTKKLITHLKPHTFYNFVLTNRGSSLGGLQQTVTAWTAFNLLNGKPSVAPKPDADGFIMVYLPDGQSPVPVQSYFIVMVPLRKSRGGQFLTPLGSPEDMDLEELIQDISRLQRRSLRHSRQLEVPRPYIAARFSVLPPTFHPGDQKQYGGFDNRGLEPGHRYVLFVLAVLQKSEPTFAASPFSDPFQLDNPDPQPIVDGEEGLIWVIGPVLAVVFIICIVIAILLYKNKPDSKRKDSEPRTKCLLNNADLAPHHPKDPVEMRRINFQTPDSGLRSPLREPGFHFESMLSHPPIPIADMAEHTERLKANDSLKLSQEYESIDPGQQFTWEHSNLEVNKPKNRYANVIAYDHSRVILQPIEGIMGSDYINANYVDGYRCQNAYIATQGPLPETFGDFWRMVWEQRSATIVMMTRLEEKSRIKCDQYWPNRGTETYGFIQVTLLDTIELATFCVRTFSLHKNGSSEKREVRQFQFTAWPDHGVPEYPTPFLAFLRRVKTCNPPDAGPIVVHCSAGVGRTGCFIVIDAMLERIKPEKTVDVYGHVTLMRSQRNYMVQTEDQYSFIHEALLEAVGCGNTEVPARSLYAYIQKLAQVEPGEHVTGMELEFKRLANSKAHTSRFISANLPCNKFKNRLVNIMPYESTRVCLQPIRGVEGSDYINASFIDGYRQQKAYIATQGPLAETTEDFWRMLWENNSTIVVMLTKLREMGREKCHQYWPAERSARYQYFVVDPMAEYNMPQYILREFKVTDARDGQSRTVRQFQFTDWPEQGVPKSGEGFIDFIGQVHKTKEQFGQDGPISVHCSAGVGRTGVFITLSIVLERMRYEGVVDIFQTVKMLRTQRPAMVQTEDEYQFCYQAALEYLGSFDHYAT

SEQ ID NO: 60189 - protein, 1530 aa, Homo sapiens
MAPTWGPGMVSVVGPMGLLVVLLVGGCAAEEPPRFIKEPKDQIGVSGGVASFVCQATGDPKPRVTWNKKGKKVNSQRFETIEFDESAGAVLRIQPLRTPRDENVYECVAQNSVGEITVHAKLTVLREDQLPSGFPNIDMGPQLKVVERTRTATMLCAASGNPDPEITWFKDFLPVDPSASNGRIKQLRSDQAFSHLPTGALQIESSEETDQGKYECVATNSAGVRYSSPANLYVRVWRTVRRVAPRFSILPMSHEIMPGGNVNITCVAVGSPMPYVKWMQGAEDLTPEDDMPVGRNVLELTDVKDSANYTCVAMSSLGVIEAVAQITVKSLPKAPGTPMVTENTATSITITWDSGNPDPVSYYVIEYKSKSQDGPYQIKEDITTTRYSIGGLSPNSEYEIWVSAVNSIGQGPPSESVVTRTGEQAPASAPRNVQARMLSATTMIVQWEEPVEPNGLIRGYRVYYTMEPEHPVGNWQKHNVDDSLLTTVGSLLEDETYTVRVLAFTSVGDGPLSDPIQVKTQQGVPGQPMNLRAEARSETSITLSWSPPRQESIIKYELLFREGDHGREVGRTFDPTTSYVVEDLKPNTEYAFRLAARSPQGLGAFTPVVRQRTLQSISPKNFKVKMIMKTSVLLSWEFPDNYNSPTPYKIQYNGLTLDVDGRTTKKLITHLKPHTFYNFVLTNRGSSLGGLQQTVTAWTAFNLLNGKPSVAPKPDADGFIMVYLPDGQSPVPVQSYFIVMVPLRKSRGGQFLTPLGSPEDMDLEELIQDISRLQRRSLRHSRQLEVPRPYIAARFSVLPPTFHPGDQKQYGGFDNRGLEPGHRYVLFVLAVLQKSEPTFAASPFSDPFQLDNPDPQPIVDGEEGLIWVIGPVLAVVFIICIVIAILLYKNKPDSKRKDSEPRTKCLLNNADLAPHHPKDPVEMRRINFQTPDSGLRSPLREPGFHFESMLSHPPIPIADMAEHTERLKANDSLKLSQEYESIDPGQQFTWEHSNLEVNKPKNRYANVIAYDHSRVILQPIEGIMGSDYINANYVDGYRCQNAYIATQGPLPETFGDFWRMVWEQRSATIVMMTRLEEKSRIKCDQYWPNRGTETYGFIQVTLLDTIELATFCVRTFSLHKNGSSEKREVRQFQFTAWPDHGVPEYPTPFLAFLRRVKTCNPPDAGPIVVHCSAGVGRTGCFIVIDAMLERIKPEKTVDVYGHVTLMRSQRNYMVQTEDQYSFIHEALLEAVGCGNTEVPARSLYAYIQKLAQVEPGEHVTGMELEFKRLANSKAHTSRFISANLPCNKFKNRLVNIMPYESTRVCLQPIRGVEGSDYINASFIDGYRQQKAYIATQGPLAETTEDFWRMLWENNSTIVVMLTKLREMGREKCHQYWPAERSARYQYFVVDPMAEYNMPQYILREFKVTDARDGQSRTVRQFQFTDWPEQGVPKSGEGFIDFIGQVHKTKEQFGQDGPISVHCSAGVGRTGVFITLSIVLERMRYEGVVDIFQTVKMLRTQRPAMVQTEDEYQFCYQAALEYLGSFDHYAT

SEQ ID NO: 60190 - protein, 1939 aa, Homo sapiens
MAPTWGPGMVSVVGPMGLLVVLLVGGCAAEEPPRFIKEPKDQIGVSGGVASFVCQATGDPKPRVTWNKKGKKVNSQRFETIEFDESAGAVLRIQPLRTPRDENVYECVAQNSVGEITVHAKLTVLREDQLPSGFPNIDMGPQLKVVERTRTATMLCAASGNPDPEITWFKDFLPVDPSASNGRIKQLRSDQAFSHLPTGALQIESSEETDQGKYECVATNSAGVRYSSPANLYVRVWRTVRRVAPRFSILPMSHEIMPGGNVNITCVAVGSPMPYVKWMQGAEDLTPEDDMPVGRNVLELTDVKDSANYTCVAMSSLGVIEAVAQITVKSLPKAPGTPMVTENTATSITITWDSGNPDPVSYYVIEYKSKSQDGPYQIKEDITTTRYSIGGLSPNSEYEIWVSAVNSIGQGPPSESVVTRTGEQAPASAPRNVQARMLSATTMIVQWEEPVEPNGLIRGYRVYYTMEPEHPVGNWQKHNVDDSLLTTVGSLLEDETYTVRVLAFTSVGDGPLSDPIQVKTQQGVPGQPMNLRAEARSETSITLSWSPPRQESIIKYELLFREGDHGREVGRTFDPTTSYVVEDLKPNTEYAFRLAARSPQGLGAFTPVVRQRTLQSKPSAPPQDVKCVSVRSTAILVSWRPPPPETHNGALVGYSVRYRPLGSEDPEPKEVNGIPPTTTQILLEALEKWTQYRITTVAHTEVGPGPESSPVVVRTDEDVPSAPPRKVEAEALNATAIRVLWRSPAPGRQHGQIRGYQVHYVRMEGAEARGPPRIKDVMLADAQEMVITNLQPETAYSITVAAYTMKGDGARSKPKVVVTKGAVLGRPTLSVQQTPEGSLLARWEPPAGTAEDQVLGYRLQFGREDSTPLATLEFPPSEDRYTASGVHKGATYVFRLAARSRGGLGEEAAEVLSIPEDTPRGHPQILEAAGNASAGTVLLRWLPPVPAERNGAIVKYTVAVREAGALGPARETELPAAAEPGAENALTLQGLKPDTAYDLQVRAHTRRGPGPFSPPVRYRTFLRDQVSPKNFKVKMIMKTSVLLSWEFPDNYNSPTPYKIQYNGLTLDVDGRTTKKLITHLKPHTFYNFVLTNRGSSLGGLQQTVTAWTAFNLLNGKPSVAPKPDADGFIMVYLPDGQSPVPVQSYFIVMVPLRKSRGGQFLTPLGSPEDMDLEELIQDISRLQRRSLRHSRQLEVPRPYIAARFSVLPPTFHPGDQKQYGGFDNRGLEPGHRYVLFVLAVLQKSEPTFAASPFSDPFQLDNPDPQPIVDGEEGLIWVIGPVLAVVFIICIVIAILLYKNKPDSKRKDSEPRTKCLLNNADLAPHHPKDPVEMRRINFQTPDSGLRSPLREPGFHFESMLSHPPIPIADMAEHTERLKANDSLKLSQEYESIDPGQQFTWEHSNLEVNKPKNRYANVIAYDHSRVILQPIEGIMGSDYINANYVDGYRCQNAYIATQGPLPETFGDFWRMVWEQRSATIVMMTRLEEKSRIKCDQYWPNRGTETYGFIQVTLLDTIELATFCVRTFSLHKNGSSEKREVRQFQFTAWPDHGVPEYPTPFLAFLRRVKTCNPPDAGPIVVHCSAGVGRTGCFIVIDAMLERIKPEKTVDVYGHVTLMRSQRNYMVQTEDQYSFIHEALLEAVGCGNTEVPARSLYAYIQKLAQVEPGEHVTGMELEFKRLANSKAHTSRFISANLPCNKFKNRLVNIMPYESTRVCLQPIRGVEGSDYINASFIDGYRQQKAYIATQGPLAETTEDFWRMLWENNSTIVVMLTKLREMGREKCHQYWPAERSARYQYFVVDPMAEYNMPQYILREFKVTDARDGQSRTVRQFQFTDWPEQGVPKSGEGFIDFIGQVHKTKEQFGQDGPISVHCSAGVGRTGVFITLSIVLERMRYEGVVDIFQTVKMLRTQRPAMVQTEDEYQFCYQAALEYLGSFDHYAT

SEQ ID NO: 60191 - protein, 1948 aa, Homo sapiens
MAPTWGPGMVSVVGPMGLLVVLLVGGCAAEEPPRFIKEPKDQIGVSGGVASFVCQATGDPKPRVTWNKKGKKVNSQRFETIEFDESAGAVLRIQPLRTPRDENVYECVAQNSVGEITVHAKLTVLREDQLPSGFPNIDMGPQLKVVERTRTATMLCAASGNPDPEITWFKDFLPVDPSASNGRIKQLRSETFESTPIRGALQIESSEETDQGKYECVATNSAGVRYSSPANLYVRELREVRRVAPRFSILPMSHEIMPGGNVNITCVAVGSPMPYVKWMQGAEDLTPEDDMPVGRNVLELTDVKDSANYTCVAMSSLGVIEAVAQITVKSLPKAPGTPMVTENTATSITITWDSGNPDPVSYYVIEYKSKSQDGPYQIKEDITTTRYSIGGLSPNSEYEIWVSAVNSIGQGPPSESVVTRTGEQAPASAPRNVQARMLSATTMIVQWEEPVEPNGLIRGYRVYYTMEPEHPVGNWQKHNVDDSLLTTVGSLLEDETYTVRVLAFTSVGDGPLSDPIQVKTQQGVPGQPMNLRAEARSETSITLSWSPPRQESIIKYELLFREGDHGREVGRTFDPTTSYVVEDLKPNTEYAFRLAARSPQGLGAFTPVVRQRTLQSKPSAPPQDVKCVSVRSTAILVSWRPPPPETHNGALVGYSVRYRPLGSEDPEPKEVNGIPPTTTQILLEALEKWTQYRITTVAHTEVGPGPESSPVVVRTDEDVPSAPPRKVEAEALNATAIRVLWRSPAPGRQHGQIRGYQVHYVRMEGAEARGPPRIKDVMLADAQWETDDTAEYEMVITNLQPETAYSITVAAYTMKGDGARSKPKVVVTKGAVLGRPTLSVQQTPEGSLLARWEPPAGTAEDQVLGYRLQFGREDSTPLATLEFPPSEDRYTASGVHKGATYVFRLAARSRGGLGEEAAEVLSIPEDTPRGHPQILEAAGNASAGTVLLRWLPPVPAERNGAIVKYTVAVREAGALGPARETELPAAAEPGAENALTLQGLKPDTAYDLQVRAHTRRGPGPFSPPVRYRTFLRDQVSPKNFKVKMIMKTSVLLSWEFPDNYNSPTPYKIQYNGLTLDVDGRTTKKLITHLKPHTFYNFVLTNRGSSLGGLQQTVTAWTAFNLLNGKPSVAPKPDADGFIMVYLPDGQSPVPVQSYFIVMVPLRKSRGGQFLTPLGSPEDMDLEELIQDISRLQRRSLRHSRQLEVPRPYIAARFSVLPPTFHPGDQKQYGGFDNRGLEPGHRYVLFVLAVLQKSEPTFAASPFSDPFQLDNPDPQPIVDGEEGLIWVIGPVLAVVFIICIVIAILLYKNKPDSKRKDSEPRTKCLLNNADLAPHHPKDPVEMRRINFQTPDSGLRSPLREPGFHFESMLSHPPIPIADMAEHTERLKANDSLKLSQEYESIDPGQQFTWEHSNLEVNKPKNRYANVIAYDHSRVILQPIEGIMGSDYINANYVDGYRCQNAYIATQGPLPETFGDFWRMVWEQRSATIVMMTRLEEKSRIKCDQYWPNRGTETYGFIQVTLLDTIELATFCVRTFSLHKNGSSEKREVRQFQFTAWPDHGVPEYPTPFLAFLRRVKTCNPPDAGPIVVHCSAGVGRTGCFIVIDAMLERIKPEKTVDVYGHVTLMRSQRNYMVQTEDQYSFIHEALLEAVGCGNTEVPARSLYAYIQKLAQVEPGEHVTGMELEFKRLANSKAHTSRFISANLPCNKFKNRLVNIMPYESTRVCLQPIRGVEGSDYINASFIDGYRQQKAYIATQGPLAETTEDFWRMLWENNSTIVVMLTKLREMGREKCHQYWPAERSARYQYFVVDPMAEYNMPQYILREFKVTDARDGQSRTVRQFQFTDWPEQGVPKSGEGFIDFIGQVHKTKEQFGQDGPISVHCSAGVGRTGVFITLSIVLERMRYEGVVDIFQTVKMLRTQRPAMVQTEDEYQFCYQAALEYLGSFDHYAT

SEQ ID NO: 60192 - protein, 1949 aa, Homo sapiens
MAPTWGPGMVSVVGPMGLLVVLLVGGCAAEEPPRFIKEPKDQIGVSGGVASFVCQATGDPKPRVTWNKKGKKVNSQRFETIEFDESAGAVLRIQPLRTPRDENVYECVAQNSVGEITVHAKLTVLREDQLPSGFPNIDMGPQLKVVERTRTATMLCAASGNPDPEITWFKDFLPVDPSASNGRIKQLRRSETFESTPIRGALQIESSEETDQGKYECVATNSAGVRYSSPANLYVRELREVRRVAPRFSILPMSHEIMPGGNVNITCVAVGSPMPYVKWMQGAEDLTPEDDMPVGRNVLELTDVKDSANYTCVAMSSLGVIEAVAQITVKSLPKAPGTPMVTENTATSITITWDSGNPDPVSYYVIEYKSKSQDGPYQIKEDITTTRYSIGGLSPNSEYEIWVSAVNSIGQGPPSESVVTRTGEQAPASAPRNVQARMLSATTMIVQWEEPVEPNGLIRGYRVYYTMEPEHPVGNWQKHNVDDSLLTTVGSLLEDETYTVRVLAFTSVGDGPLSDPIQVKTQQGVPGQPMNLRAEARSETSITLSWSPPRQESIIKYELLFREGDHGREVGRTFDPTTSYVVEDLKPNTEYAFRLAARSPQGLGAFTPVVRQRTLQSKPSAPPQDVKCVSVRSTAILVSWRPPPPETHNGALVGYSVRYRPLGSEDPEPKEVNGIPPTTTQILLEALEKWTQYRITTVAHTEVGPGPESSPVVVRTDEDVPSAPPRKVEAEALNATAIRVLWRSPAPGRQHGQIRGYQVHYVRMEGAEARGPPRIKDVMLADAQWETDDTAEYEMVITNLQPETAYSITVAAYTMKGDGARSKPKVVVTKGAVLGRPTLSVQQTPEGSLLARWEPPAGTAEDQVLGYRLQFGREDSTPLATLEFPPSEDRYTASGVHKGATYVFRLAARSRGGLGEEAAEVLSIPEDTPRGHPQILEAAGNASAGTVLLRWLPPVPAERNGAIVKYTVAVREAGALGPARETELPAAAEPGAENALTLQGLKPDTAYDLQVRAHTRRGPGPFSPPVRYRTFLRDQVSPKNFKVKMIMKTSVLLSWEFPDNYNSPTPYKIQYNGLTLDVDGRTTKKLITHLKPHTFYNFVLTNRGSSLGGLQQTVTAWTAFNLLNGKPSVAPKPDADGFIMVYLPDGQSPVPVQSYFIVMVPLRKSRGGQFLTPLGSPEDMDLEELIQDISRLQRRSLRHSRQLEVPRPYIAARFSVLPPTFHPGDQKQYGGFDNRGLEPGHRYVLFVLAVLQKSEPTFAASPFSDPFQLDNPDPQPIVDGEEGLIWVIGPVLAVVFIICIVIAILLYKKKPHSKRKDSEPRTKCLLNNADLAPHHPKDPVEMRRINFQTPDSGLRSPLREPGFHFESMLSHPPIPIADMAEHTERLKANDSLKLSQEYESIDPGQQFTWEHSNLEVNKPKNRYANVIAYDHSRVILQPIEGIMGSDYINANYVDGYRCQNAYIATQGPLPETFGDFWRMVWEQRSATIVMMTRLEEKSRIKCDQYWPNRGTETYGFIQVTLLDTIELATFCVRTFSLHKNGSSEKREVRQFQFTAWPDHGVPEYPTPFLAFLRRVKTCNPPDAGPIVVHCSAGVGRTGCFIVIDAMLERIKPEKTVDVYGHVTLMRSQRNYMVQTEDQYSFIHEALLEAVGCGNTEVPARSLYAYIQKLAQVEPGEHVTGMELEFKRLANSKAHTSRFISANLPCNKFKNRLVNIMPYESTRVCLQPIRGVEGSDYINASFIDGYRQQKAYIATQGPLAETTEDFWRMLWENNSTIVVMLTKLREMGREKCHQYWPAERSARYQYFVVDPMAEYNMPQYILREFKVTDARDGQSRTVRQFQFTDWPEQGVPKSGEGFIDFIGQVHKTKEQFGQDGPISVHCSAGVGRTGVFITLSIVLERMRYEGVVDIFQTVKMLRTQRPAMVQTEDEYQFCYQAALEYLGSFDHYAT

SEQ ID NO: 60193 - protein, 1560 aa, Homo sapiens
RSARGLSVRDRGAIPLQGGDRRSLPSMAPTWGPGMVSVVGPMGLLVVLLVGGCAAEEPPRFIKEPKDQIGVSGGVASFVCQATGDPKPRVTWNKKGKKVNSQRFETIEFDESAGAVLRIQPLRTPRDENVYECVAQNSVGEITVHAKLTVLREDQLPSGFPNIDMGPQLKVVERTRTATMLCAASGNPDPEITWFKDFLPVDPSASNGRIKQLRSGALQIESSEETDQGKYECVATNSAGVRYSSPANLYVRVRRVAPRFSILPMSHEIMPGGNVNITCVAVGSPMPYVKWMQGAEDLTPEDDMPVGRNVLELTDVKDSANYTCVAMSSLGVIEAVAQITVKSLPKAPGTPMVTENTATSITITWDSGNPDPVSYYVIEYKSKSQDGPYQIKEDITTTRYSIGGLSPNSEYEIWVSAVNSIGQGPPSESVVTRTGEQAPASAPRNVQARMLSATTMIVQWEEPVEPNGLIRGYRVYYTMEPEHPVGNWQKHNVDDSLLTTVGSLLEDETYTVRVLAFTSVGDGPLSDPIQVKTQQGVPGQPMNLRAEARSETSITLSWSPPRQESIIKYELLFREGDHGREVGRTFDPTTSYVVEDLKPNTEYAFRLAARSPQGLGAFTPVVRQRTLQSISPKNFKVKMIMKTSVLLSWEFPDNYNSPTPYKIQYNGLTLDVDGRTTKKLITHLKPHTFYNFVLTNRGSSLGGLQQTVTAWTAFNLLNGKPSVAPKPDADGFIMVYLPDGQSPVPVQSYFIVMVPLRKSRGGQFLTPLGSPEDMDLEELIQDISRLQRRSLRHSRQLEVPRPYIAARFSVLPPTFHPGDQKQYGGFDNRGLEPGHRYVLFVLAVLQKSEPTFAASPFSDPFQLDNPDPQPIVDGEEGLIWVIGPVLAVVFIICIVIAILLYKNKPDSKRKDSEPRTKCLLNNADLAPHHPKDPVEMRRINFQTPDSGLRSPLREPGFHFESMLSHPPIPIADMAEHTERLKANDSLKLSQEYESIDPGQQFTWEHSNLEVNKPKNRYANVIAYDHSRVILQPIEGIMGSDYINANYVDGYRCQNAYIATQGPLPETFGDFWRMVWEQRSATIVMMTRLEEKSRIKCDQYWPNRGTETYGFIQVTLLDTIELATFCVRTFSLHKNGSSEKREVRQFQFTAWPDHGVPEYPTPFLAFLRRVKTCNPPDAGPIVVHCSAGVGRTGCFIVIDAMLERIKPEKTVDVYGHVTLMRSQRNYMVQTEDQYSFIHEALLEAVGCGNTEVPARSLYAYIQKLAQVEPGEHVTGMELEFKRLANSKAHTSRFISANLPCNKFKNRLVNIMPYESTRVCLQPIRGVEGSDYINASFIDGYRQQKAYIATQGPLAETTEDFWRMLWENNSTIVVMLTKLREMGREKCHQYWPAERSARYQYFVVDPMAEYNMPQYILREFKVTDARDGQSRTVRQFQFTDWPEQGVPKSGEGFIDFIGQVHKTKEQFGQDGPISVHCSAGVGRTGVFITLSIVLERMRYEGVVDIFQTVKMLRTQRPAMVQTETESRPGWSAVAQSRLTASSASWIHAILLPQPPEWLGLQV

SEQ ID NO: 60194 - protein, 1505 aa, Homo sapiens
MAPTWGPGMVSVVGPMGLLVVLLVGGCAAEEPPRFIKEPKDQIGVSGGVASFVCQATGDPKPRVTWNKKGKKVNSQRFETIEFDESAGAVLRIQPLRTPRDENVYECVAQNSVGEITVHAKLTVLREDQLPSGFPNIDMGPQLKVVERTRTATMLCAASGNPDPEITWFKDFLPVDPSASNGRIKQLRSGALQIESSEETDQGKYECVATNSAGVRYSSPANLYVRALREVRRVAPRFSILPMSHEIMPGGNVNITCVAVGSPMPYVKWMQGAEDLTPEDDMPVGRNVLELTDVKDSANYTCVAMSSLGVIEAVAQITVKSLPKAPGTPMVTENTATSITITWDSGNPDPVSYYVIEYKSKSQDGPYQIKEDITTTRYSIGGLSPNSEYEIWVSAVNSIGQGPPSESVVTRTGEQAPASAPRNVQARMLSATTMIVQWEEPVEPNGLIRGYRVYYTMEPEHPVGNWQKHNVDDSLLTTVGSLLEDETYTVRVLAFTSVGDGPLSDPIQVKTQQGVPGQPMNLRAEARSETSITLSWSPPRQESIIKYELLFREGDHGREVGRTFDPTTSYVVEDLKPNTEYAFRLAARSPQGLGAFTPVVRQRTLQSISPKNFKVKMIMKTSVLLSWEFPDNYNSPTPYKIQYNGLTLDVDGRTTKKLITHLKPHTFYNFVLTNRGSSLGGLQQTVTAWTAFNLLNGKPSVAPKPDADGFIMVYLPDGQSPVPVQSYFIVMVPLRKSRGGQFLTPLGSPEDMDLEELIQDISRLQRRSLRHSRQLEVPRPYIAARFSVLPPTFHPGDQKQYGGFDNRGLEPGHRYVLFVLAVLQKSEPTFAASPFSDPFQLDNPDPQPIVDGEEGLIWVIGPVLAVVFIICIVIAILLYKNKPDSKRKDSEPRTKCLLNNADLAPHHPKDPVEMRRINFQTPGMLSHPPIPIADMAEHTERLKANDSLKLSQEYESIDPGQQFTWEHSNLEVNKPKNRYANVIAYDHSRVILQPIEGIMGSDYINANYVDGYRCQNAYIATQGPLPETFGDFWRMVWEQRSATIVMMTRLEEKSRIKCDQYWPNRGTETYGFIQVTLLDTIELATFCVRTFSLHKNGSSEKREVRQFQFTAWPDHGVPEYPTPFLAFLRRVKTCNPPDAGPIVVHCSAGVGRTGCFIVIDAMLERIKPEKTVDVYGHVTLMRSQRNYMVQTEDQYSFIHEALLEAVGCGNTEVPARSLYAYIQKLAQVEPGEHVTGMELEFKRLANSKAHTSRFISANLPCNKFKNRLVNIMPYESTRVCLQPIRGVEGSDYINASFIDGYRQQKAYIATQGPLAETTEDFWRMLWENNSTIVVMLTKLREMGREKCHQYWPAERSARYQYFVVDPMAEYNMPQYILREFKVTDARDGQSRTVRQFQFTDWPEQGVPKSGEGFIDFIGQVHKTKEQFGQDGPISVHCSAGVGRTGVFITLSIVLERMRYEGVVDIFQTVKMLRTQRPAMVQTEDEYQFCYQAALEYLGSFDHYAT

SEQ ID NO: 60195 - protein, 1442 aa, Homo sapiens
MARAQALVLALTFQLCAPETETPAAGCTFEEASDPAVPCEYSQAQYDDFQWEQVRIHPGTRAPADLPHGSYLMVNTSQHAPGQRAHVIFQSLSENDTHCVQFSYFLYSRDGHSPGTLGVYVRVNGGPLGSAVWNMTGSHGRQWHQAELAVSTFWPNEYQVLFEALISPDRRGYMGLDDILLLSYPCAKAPHFSRLGDVEVNAGQNASFQCMAAGRAAEAERFLLQRQSGALVPAAGVRHISHRRFLATFPLAAVSRAEQDLYRCVSQAPRGAGVSNFAELIVKEPPTPIAPPQLLRAGPTYLIIQLNTNSIIGDGPIVRKEIEYRMARGPWAEVHAVSLQTYKLWHLDPDTEYEISVLLTRPGDGGTGRPGPPLISRTKCAEPMRAPKGLAFAEIQARQLTLQWEPLGYNVTRCHTYTVSLCYHYTLGSSHNQTIRECVKTEQGVSRYTIKNLLPYRNVHVRLVLTNPEGRKEGKEVTFQTDEDVPSGIAAESLTFTPLEDMIFLKWEEPQEPNGLITQYEISYQSIESSDPAVNVPGPRRTISKLRNETYHVFSNLHPGTTYLFSVRARTGKGFGQAALTEITTNISAPSFDYADMPSPLGESENTITVLLRPAQGRGAPISVYQVIVEEERARRLRREPGGQDCFPVPLTFEAALARGLVHYFGAELAASSLPEAMPFTVGDNQTYRGFWNPPLEPRKAYLIYFQAASHLKGETRLNCIRIARKAACKESKRPLEVSQRSEEMGLILGICAGGLAVLILLLGAIIVIIRKGKPVNMTKATVNYRQEKTHMMSAVDRSFTDQSTLQEDERLGLSFMDTHGYSTRGDQRSGGVTEASSLLGGSPRRPCGRKGSPYHTGQLHPAVRVADLLQHINQMKTAEGYGFKQEYESFFEGWDATKKKDKVKGSRQEPMPAYDRHRVKLHPMLGDPNADYINANYIDLRGGRTGYHRSNHFIATQGPKPEMVYDFWRMVWQEHCSSIVMITKLVEVGRVKCSRYWPEDSDTYGDIKIMLVKTETLAEYVVRTFALERRGYSARHEVRQFHFTAWPEHGVPYHATGLLAFIRRVKASTPPDAGPIVIHCSAGTGRTGCYIVLDVMLDMAECEGVVDIYNCVKTLCSRRVNMIQTEEQYIFIHDAILEACLCGETTIPVSEFKATYKEMIRIDPQSNSSQLREEFQTLNSVTPPLDVEECSIALLPRNRDKNRSMDVLPPDRCLPFLISTDGDSNNYINAALTDSYTRSAAFIVTLHPLQSTTPDFWRLVYDYGCTSIVMLNQLNQSNSAWPCLQYWPEPGRQQYGLMEVEFMSGTADEDLVARVFRVQNISRLQEGHLLVRHFQFLRWSAYRDTPDSKKAFLHLLAEVDKWQAESGDGRTIVHCLNGGGRSGTFCACATVLEMIRCHNLVDVFFAAKTLRNYKPNMVETMDQYHFCYDVALEYLEGLESR

SEQ ID NO: 60196 - protein, 1446 aa, Homo sapiens
MARAQALVLALTFQLCAPETETPAAGCTFEEASDPAVPCEYSQAQYDDFQWEQVRIHPGTRAPADLPHGSYLMVNTSQHAPGQRAHVIFQSLSENDTHCVQFSYFLYSRDGHSPGTLGVYVRVNGGPLGSAVWNMTGSHGRQWHQAELAVSTFWPNEYQVLFEALISPDRRGYMGLDDILLLSYPCAKAPHFSRLGDVEVNAGQNASFQCMAAGRAAEAERFLLQRQSGALVPAAGVRHISHRRFLATFPLAAVSRAEQDLYRCVSQAPRGAGVSNFAELIVKEPPTPIAPPQLLRAGPTYLIIQLNTNSIIGDGPIVRKEIEYRMARGPWAEVHAVSLQTYKLWHLDPDTEYEISVLLTRPGDGGTGRPGPPLISRTKCAEPMRAPKGLAFAEIQARQLTLQWEPLGYNVTRCHTYTVSLCYHYTLGSSHNQTIRECVKTEQGVSRYTIKNLLPYRNVHVRLVLTNPEGRKEGKEVTFQTDEDVPSGIAAESLTFTPLEDMIFLKWEEPQEPNGLITQYEISYQSIESSDPAVNVPGPRRTISKLRNETYHVFSNLHPGTTYLFSVRARTGKGFGQAALTEITTNISAPSFDYADMPSPLGESENTITVLLRPAQGRGAPISVYQVIVEEERARRLRREPGGQDCFPVPLTFEAALARGLVHYFGAELAASSLPEAMPFTVGDNQTYRGFWNPPLEPRKAYLIYFQAASHLKGETRLNCIRIARKAACKESKRPLEVSQRSEEMGLILGICAGGLAVLILLLGAIIVIIRKGRDHYAYSYYPKPVNMTKATVNYRQEKTHMMSAVDRSFTDQSTLQEDERLGLSFMDTHGYSTRGDQRSGGVTEASSLLGGSPRRPCGRKGSPYHTGQLHPAVRVADLLQHINQMKTAEGYGFKQEYESFFEGWDATKKKDKVKGSRQEPMPAYDRHRVKLHPMLGDPNADYINANYIDGYHRSNHFIATQGPKPEMVYDFWRMVWQEHCSSIVMITKLVEVGRVKCSRYWPEDSDTYGDIKIMLVKTETLAEYVVRTFALERRGYSARHEVRQFHFTAWPEHGVPYHATGLLAFIRRVKASTPPDAGPIVIHCSAGTGRTGCYIVLDVMLDMAECEGVVDIYNCVKTLCSRRVNMIQTEEQYIFIHDAILEACLCGETTIPVSEFKATYKEMIRIDPQSNSSQLREEFQTLNSVTPPLDVEECSIALLPRNRDKNRSMDVLPPDRCLPFLISTDGDSNNYINAALTDSYTRSAAFIVTLHPLQSTTPDFWRLVYDYGCTSIVMLNQLNQSNSAWPCLQYWPEPGRQQYGLMEVEFMSGTADEDLVARVFRVQNISRLQEGHLLVRHFQFLRWSAYRDTPDSKKAFLHLLAEVDKWQAESGDGRTIVHCLNGGGRSGTFCACATVLEMIRCHNLVDVFFAAKTLRNYKPNMVETMDQYHFCYDVALEYLEGLESR

SEQ ID NO: 60197 - protein, 1442 aa, Homo sapiens
MARAQALVLALTFQLCAPETETPAAGCTFEEASDPAVPCEYSQAQYDDFQWEQVRIHPGTRAPADLPHGSYLMVNTSQHAPGQRAHVIFQSLSENDTHCVQFSYFLYSRDGHSPGTLGVYVRVNGGPLGSAVWNMTGSHGRQWHQAELAVSTFWPNEYQVLFEALISPDRRGYMGLDDILLLSYPCAKAPHFSRLGDVEVNAGQNASFQCMAAGRAAEAERFLLQRQSGALVPAAGVRHISHRRFLATFPLAAVSRAEQDLYRCVSQAPRGAGVSNFAELIVKEPPTPIAPPQLLRAGPTYLIIQLNTNSIIGDGPIVRKEIEYRMARGPWAEVHAVSLQTYKLWHLDPDTEYEISVLLTRPGDGGTGRPGPPLISRTKCAEPMRAPKGLAFAEIQARQLTLQWEPLGYNVTRCHTYTVSLCYHYTLGSSHNQTIRECVKTEQGVSRYTIKNLLPYRNVHVRLVLTNPEGRKEGKEVTFQTDEDVPSGIAAESLTFTPLEDMIFLKWEEPQEPNGLITQYEISYQSIESSDPAVNVPGPRRTISKLRNETYHVFSNLHPGTTYLFSVRARTGKGFGQAALTEITTNISAPSFDYADMPSPLGESENTITVLLRPAQGRGAPISVYQVIVEEERARRLRREPGGQDCFPVPLTFEAALARGLVHYFGAELAASSLPEAMPFTVGDNQTYRGFWNPPLEPRKAYLIYFQAASHLKGETRLNCIRIARKAACKESKRPLEVSQRSEEMGLILGICAGGLAVLILLLGAIIVIIRKGKPVNMTKATVNYRQEKTHMMSAVDRSFTDQSTLQEDERLGLSFMDTHGYSTRGDQRSGGVTEASSLLGGSPRRPCGRKGSPYHTGQLHPAVRVADLLQHINQMKTAEGYGFKQEYESFFEGWDATKKKDKVKGSRQEPMPAYDRHRVKLHPMLGDPNADYINANYIDIRINREGYHRSNHFIATQGPKPEMVYDFWRMVWQEHCSSIVMITKLVEVGRVKCSRYWPEDSDTYGDIKIMLVKTETLAEYVVRTFALERRGYSARHEVRQFHFTAWPEHGVPYHATGLLAFIRRVKASTPPDAGPIVIHCSAGTGRTGCYIVLDVMLDMAECEGVVDIYNCVKTLCSRRVNMIQTEEQYIFIHDAILEACLCGETTIPVSEFKATYKEMIRIDPQSNSSQLREEFQTLNSVTPPLDVEECSIALLPRNRDKNRSMDVLPPDRCLPFLISTDGDSNNYINAALTDSYTRSAAFIVTLHPLQSTTPDFWRLVYDYGCTSIVMLNQLNQSNSAWPCLQYWPEPGRQQYGLMEVEFMSGTADEDLVARVFRVQNISRLQEGHLLVRHFQFLRWSAYRDTPDSKKAFLHLLAEVDKWQAESGDGRTIVHCLNGGGRSGTFCACATVLEMIRCHNLVDVFFAAKTLRNYKPNMVETMDQYHFCYDVALEYLEGLESR

SEQ ID NO: 60198 - protein, 1436 aa, Homo sapiens
MARAQALVLALTFQLCAPETETPAAGCTFEEASDPAVPCEYSQAQYDDFQWEQVRIHPGTRAPADLPHGSYLMVNTSQHAPGQRAHVIFQSLSENDTHCVQFSYFLYSRDGHSPGTLGVYVRVNGGPLGSAVWNMTGSHGRQWHQAELAVSTFWPNEYQVLFEALISPDRRGYMGLDDILLLSYPCAKAPHFSRLGDVEVNAGQNASFQCMAAGRAAEAERFLLQRQSGALVPAAGVRHISHRRFLATFPLAAVSRAEQDLYRCVSQAPRGAGVSNFAELIVKEPPTPIAPPQLLRAGPTYLIIQLNTNSIIGDGPIVRKEIEYRMARGPWAEVHAVSLQTYKLWHLDPDTEYEISVLLTRPGDGGTGRPGPPLISRTKCAEPMRAPKGLAFAEIQARQLTLQWEPLGYNVTRCHTYTVSLCYHYTLGSSHNQTIRECVKTEQGVSRYTIKNLLPYRNVHVRLVLTNPEGRKEGKEVTFQTDEDVPSGIAAESLTFTPLEDMIFLKWEEPQEPNGLITQYEISYQSIESSDPAVNVPGPRRTISKLRNETYHVFSNLHPGTTYLFSVRARTGKGFGQAALTEITTNISAPSFDYADMPSPLGESENTITVLLRPAQGRGAPISVYQVIVEEERARRLRREPGGQDCFPVPLTFEAALARGLVHYFGAELAASSLPEAMPFTVGDNQTYRGFWNPPLEPRKAYLIYFQAASHLKGETRLNCIRIARKAACKESKRPLEVSQRSEEMGLILGICAGGLAVLILLLGAIIVIIRKGKPVNMTKATVNYRQEKTHMMSAVDRSFTDQSTLQEDERLGLSFMDTHGYSTRGDQRSGGVTEASSLLGGSPRRPCGRKGSPYHTGQLHPAVRVADLLQHINQMKTAEGYGFKQEYESFFEGWDATKKKDKVKGSRQEPMPAYDRHRVKLHPMLGDPNADYINANYIDGYHRSNHFIATQGPKPEMVYDFWRMVWQEHCSSIVMITKLVEVGRVKCSRYWPEDSDTYGDIKIMLVKTETLAEYVVRTFALERRGYSARHEVRQFHFTAWPEHGVPYHATGLLAFIRRVKASTPPDAGPIVIHCSAGTGRTGCYIVLDVMLDMAECEGVVDIYNCVKTLCSRRVNMIQTEEQYIFIHDAILEACLCGETTIPVSEFKATYKEMIRIDPQSNSSQLREEFQTLNSVTPPLDVEECSIALLPRNRDKNRSMDVLPPDRCLPFLISTDGDSNNYINAALTDSYTRSAAFIVTLHPLQSTTPDFWRLVYDYGCTSIVMLNQLNQSNSAWPCLQYWPEPGRQQYGLMEVEFMSGTADEDLVARVFRVQNISRLQEGHLLVRHFQFLRWSAYRDTPDSKKAFLHLLAEVDKWQAESGDGRTIVHCLNGGGRSGTFCACATVLEMIRCHNLVDVFFAAKTLRNYKPNMVETMDQYHFCYDVALEYLEGLESR

SEQ ID NO: 60199 - protein, 1433 aa, Homo sapiens
MARAQALVLALTFQLCAPETETPAAGCTFEEASDPAVPCEYSQAQYDDFQWEQVRIHPGTRAPADLPHGSYLMVNTSQHAPGQRAHVIFQSLSENDTHCVQFSYFLYSRDGHSPGTLGVYVRVNGGPLGSAVWNMTGSHGRQWHQAELAVSTFWPNEYQVLFEALISPDRRGYMGLDDILLLSYPCAKAPHFSRLGDVEVNAGQNASFQCMAAGRAAEAERFLLQRQSGALVPAAGVRHISHRRFLATFPLAAVSRAEQDLYRCVSQAPRGAGVSNFAELIVKEPPTPIAPPQLLRAGPTYLIIQLNTNSIIGDGPIVRKEIEYRMARGPWAEVHAVSLQTYKLWHLDPDTEYEISVLLTRPGDGGTGRPGPPLISRTKCAEPMRAPKGLAFAEIQARQLTLQWEPLGYNVTRCHTYTVSLCYHYTLGSSHNQTIRECVKTEQGVSRYTIKNLLPYRNVHVRLVLTNPEGRKEGKEVTFQTDEDVPSGIAAESLTFTPLEDMIFLKWEEPQEPNGLITQYEISYQSIESSDPAVNVPGPRRTISKLRNETYHVFSNLHPGTTYLFSVRARTGKGFGQAALTEITTNISAPSFDYADMPSPLGESENTITVLLRPAQGRGAPISVYQVIVEEERARRLRREPGGQDCFPVPLTFEAALARGLVHYFGAELAASSLPEAMPFTVGDNQTYRGFWNPPLEPRKAYLIYFQAASHLKGETRLNCIRIARKAACKESKRPLEVSQRSEEMGLILGICAGGLAVLILLLGAIIVIIRKGKPVNMTKATVNYRQEKTHMMSAVDRSFTDQSTLQEDERLGLSFMDTHGYSTRGDQRSGGVTEASSLLGGSPRRPCGRKGSPYHTGQLHPAVRVADLLQHINQMKTAEGYGFKQEYESFFEGWDATKKKDKVKGSRQEPMPAYDRHRVKLHPMLGDPNADYINANYIDGYHRSNHFIATQGPKPEMVYDFWRMVWQEHCSSIVMITKLVEVKCSRYWPEDSDTYGDIKIMLVKTETLAEYVVRTFALERRGYSARHEVRQFHFTAWPEHGVPYHATGLLAFIRRVKASTPPDAGPIVIHCSAGTGRTGCYIVLDVMLDMAECEGVVDIYNCVKTLCSRRVNMIQTEEQYIFIHDAILEACLCGETTIPVSEFKATYKEMIRIDPQSNSSQLREEFQTLNSVTPPLDVEECSIALLPRNRDKNRSMDVLPPDRCLPFLISTDGDSNNYINAALTDSYTRSAAFIVTLHPLQSTTPDFWRLVYDYGCTSIVMLNQLNQSNSAWPCLQYWPEPGRQQYGLMEVEFMSGTADEDLVARVFRVQNISRLQEGHLLVRHFQFLRWSAYRDTPDSKKAFLHLLAEVDKWQAESGDGRTIVHCLNGGGRSGTFCACATVLEMIRCHNLVDVFFAAKTLRNYKPNMVETMDQYHFCYDVALEYLEGLESR

SEQ ID NO: 60200 - protein, 2315 aa, Homo sapiens
MRILKRFLACIQLLCVCRLDWANGYYRQQRKLVEEIGWSYTGALNQKNWGKKYPTCNSPKQSPINIDEDLTQVNVNLKKLKFQGWDKTSLENTFIHNTGKTVEINLTNDYRVSGGVSEMVFKASKITFHWGKCNMSSDGSEHSLEGQKFPLEMQIYCFDADRFSSFEEAVKGKGKLRALSILFEVGTEENLDFKAIIDGVESVSRFGKQAALDPFILLNLLPNSTDKYYIYNGSLTSPPCTDTVDWIVFKDTVSISESQLAVFCEVLTMQQSGYVMLMDYLQNNFREQQYKFSRQVFSSYTGKEEIHEAVCSSEPENVQADPENYTSLLVTWERPRVVYDTMIEKFAVLYQQLDGEDQTKHEFLTDGYQDLGAILNNLLPNMSYVLQIVAICTNGLYGKYSDQLIVDMPTDNPELDLFPELIGTEEIIKEEEEGKDIEEGAIVNPGRDSATNQIRKKEPQISTTTHYNRIGTKYNEAKTNRSPTRGSEFSGKGDVPNTSLNSTSQPVTKLATEKDISLTSQTVTELPPHTVEGTSASLNDGSKTVLRSPHMNLSGTAESLNTVSITEYEEESLLTSFKLDTGAEDSSGSSPATSAIPFISENISQGYIFSSENPETITYDVLIPESARNASEDSTSSGSEESLKDPSMEGNVWFPSSTDITAQPDVGSGRESFLQTNYTEIRVDESEKTTKSFSAGPVMSQGPSVTDLEMPHYSTFAYFPTEVTPHAFTPSSRQQDLVSTVNVVYSQTTQPVYNGETPLQPSYSSEVFPLVTPLLLDNQILNTTPAASSSDSALHATPVFPSVDVSFESILSSYDGAPLLPFSSASFSSELFRHLHTVSQILPQVTSATESDKVPLHASLPVAGGDLLLEPSLAQYSDVLSTTHAASETLEFGSESGVLYKTLMFSQVEPPSSDAMMHARSSGPEPSYALSDNEGSQHIFTVSYSSAIPVHDSVGVTYQGSLFSGPSHIPIPKSSLITPTASLLQPTHALSGDGEWSGASSDSEFLLPDTDGLTALNISSPVSVAEFTYTTSVFGDDNKALSKSEIIYGNETELQIPSFNEMVYPSESTVMPNMYDNVNKLNASLQETSVSISSTKGMFPGSLAHTTTKVFDHEISQVPENNFSVQPTHTVSQASGDTSLKPVLSANSEPASSDPASSEMLSPSTQLLFYETSASFSTEVLLQPSFQASDVDTLLKTVLPAVPSDPILVETPKVDKISSTMLHLIVSNSASSENMLHSTSVPVFDVSPTSHMHSASLQGLTISYASEKYEPVLLKSESSHQVVPSLYSNDELFQTANLEINQAHPPKGRHVFATPVLSIDEPLNTLINKLIHSDEILTSTKSSVTGKVFAGIPTVASDTFVSTDHSVPIGNGHVAITAVSPHRDGSVTSTKLLFPSKATSELSHSAKSDAGLVGGGEDGDTDDDGDDDDDDRGSDGLSIHKCMSCSSYRESQEKVMNDSDTHENSLMDQNNPISYSLSENSEEDNRVTSVSSDSQTGMDRSPGKSPSANGLSQKHNDGKEENDIQTGSALLPLSPESKAWAVLTSDEESGSGQGTSDSLNENETSTDFSFADTNEKDADGILAAGDSEITPGFPQSPTSSVTSENSEVFHVSEAEASNSSHESRIGLAEGLESEKKAVIPLVIVSALTFICLVVLVGILIYWRKCFQTAHFYLEDSTSPRVISTPPTPIFPISDDVGAIPIKHFPKHVADLHASSGFTEEFETLKEFYQEVQSCTVDLGITADSSNHPDNKHKNRYINIVAYDHSRVKLAQLAEKDGKLTDYINANYVDGYNRPKAYIAAQGPLKSTAEDFWRMIWEHNVEVIVMITNLVEKGRRKCDQYWPADGSEEYGNFLVTQKSVQVLAYYTVRNFTLRNTKIKKGSQKGRPSGRVVTQYHYTQWPDMGVPEYSLPVLTFVRKAAYAKRHAVGPVVVHCSAGVGRTGTYIVLDSMLQQIQHEGTVNIFGFLKHIRSQRNYLVQTEEQYVFIHDTLVEAILSKETEVLDSHIHAYVNALLIPGPAGKTKLEKQFQLLSQSNIQQSDYSAALKQCNREKNRTSSIIPVERSRVGISSLSGEGTDYINASYIMGYYQSNEFIITQHPLLHTIKDFWRMIWDHNAQLVVMIPDGQNMAEDEFVYWPNKDEPINCESFKVTLMAEEHKCLSNEEKLIIQDFILEATQDDYVLEVRHFQCPKWPNPDSPISKTFELISVIKEEAANRDGPMIVHDEHGGVTAGTFCALTTLMHQLEKENSVDVYQVAKMINLMRPGVFADIEQYQFLYKVILSLVSTRQEENPSTSLDSNGAALPDGNIAESLESLV

SEQ ID NO: 60201 - protein, 157 aa, Homo sapiens
MGRLTEAAAAGSGSRAAGWAGSPPTLLPLSPTSPRCAATMASSDEDGTNGGASEAGEDREAPGERRRLGVLATAWLTFYDIAMTAGRLILSPRLECIGAISAHCQPQPPEFKRFSCLGLRSSWDYKRGPPRPINFCIFGRDRVSPCWPGWSRTPDLK

SEQ ID NO: 60202 - protein, 288 aa, Homo sapiens
MGRLTEAAAAGSGSRAAGWAGSPPTLLPLSPTSPRCAATMASSDEDGTNGGASEAGEDREAPGERRRLGVLATAWLTFYDIAMTAGWLVLAIAMVRFYMEKGTHRGLYKSIQKTLKFFQTFALLEIVHCLIGIVPTSVIVTGVQVSSRIFMVWLITHSIKPIQNEESVVLFLVAWTVTEITRYSFYTFSLLDHLPYFIKWARYNFFIILYPVGVAGELLTIYAALPHVKKTGMFSIRLPNKYNVSFDYYYFLLITMASYIPLFPQLYFHMLRQRRKVLHGEVIVEKDD

SEQ ID NO: 60203 - protein, 422 aa, Homo sapiens
MAGCVPLLQGLVLVLALHRVEPSATSLKERHGLHSDSACTGVQESLFLPASKANDVLVRWKRAGSYLLEELFEGNLEKECYEEICVYEEAREVFENEVVTDEFWRRYKGGSPCISQPCLHNGSCQDSIWGYTCTCSPGYEGSNCELAKNECHPERTDGCQHFCLPGQESYTCSCAQGYRLGEDHKQCVPHDQCACGVLTSEKRAPDLQDLPWQVKLTNSEGKDFCGGVIIRENFVLTTAKCSLLHRNITVKTYFNRTSQDPLMIKITHVHVHMRYDADAGENDLSLLELEWPIQCPGAGLPVCTPEKDFAEHLLIPRTRGLLSGWARNGTDLGNSLTTRPVTLVEGEECGQVLNVTVTTRTYCERSSVAAMHWMDGSVVTREHRGSWFLTGVLGSQPVGGQAHMVLVTKVSRYSLWFKQIMN

SEQ ID NO: 60204 - protein, 400 aa, Homo sapiens
MAGCVPLLQGLVLVLALHRVEPSVFLPASKANDVLVRWKRAGSYLLEELFEGNLEKECYEEICVYEEAREVFENEVVTDEFWRRYKGGSPCISQPCLHNGSCQDSIWGYTCTCSPGYEGSNCELAKNECHPERTDGCQHFCLPGQESYTCSCAQGYRLGEDHKQCVPHDQCACGVLTSEKRAPDLQDLPWQVKLTNSEGKDFCGGVIIRENFVLTTAKCSLLHRNITVKTYFNRTSQDPLMIKITHVHVHMRYDADAGENDLSLLELEWPIQCPGAGLPVCTPEKDFAEHLLIPRTRGLLSGWARNGTDLGNSLTTRPVTLVEGEECGQVLNVTVTTRTYCERSSVAAMHWMDGSVVTREHRGSWFLTGVLGSQPVGGQAHMVLVTKVSRYSLWFKQIMN

SEQ ID NO: 60205 - protein, 256 aa, Homo sapiens
MAHRPPSPALASVLLALLLSGAARAAEIVGGHEAQPHSRPYMASLQMRGNPGSHFCGGTLIHPSFVLTAAHCLRDIPQRLVNVVLGAHNVRTQEPTQQHFSVAQVFLNNYDAENKLNDVLLIQLSSPANLSASVATVQLPQQDQPVPHGTQCLAMGWGRVGAHDPPAQVLQELNVTVVTFFCRPHNICTFVPRRKAGICFGDSGGPLICDGIIQGIDSFVIWGCATRLFPDFFTRVALYVDWIRSTLRRVEAKGRP

SEQ ID NO: 60206 - protein, 215 aa, Homo sapiens
MASLQMRGNPGSHFCGGTLIHPSFVLTAAHCLRDIPQRLVNVVLGAHNVRTQEPTQQHFSVAQVFLNNYDAENKLNDVLLIQLSSPANLSASVATVQLPQQDQPVPHGTQCLAMGWGRVGAHDPPAQVLQELNVTVVTFFCRPHNICTFVPRRKAGICFGDSGGPLICDGIIQGIDSFVIWGCATRLFPDFFTRVALYVDWIRSTLRRVEAKGRP

SEQ ID NO: 60207 - protein, 285 aa, Homo sapiens
MPGARSGGSGGDGSNSGSYSGDASGAVTVWEVVSLLGKLLGTVVALKVVLYLLRVCLAMAWKSGGASHSELIHNLRKNGIIKTDKVFEVMLATDRSHYAKCNPYMDSPQSIGFQATISAPHMHAYALELLFDQLHEGAKALDVGSGSGILTACFARMVGCTGKVIGIDHIKELVDDSVNNVRKDDPTLLSSGRVQLVVGDGRMGYAEEAPYDAIHVGAAAPVVPQALIDQLKPGGRLILPVGPAGGNQMLEQYDKLQDGSIKMKPLMGVIYVPLTDKEKQWSRWK

SEQ ID NO: 60208 - protein, 227 aa, Homo sapiens
MAWKSGGASHSELIHNLRKNGIIKTDKVFEVMLATDRSHYAKCNPYMDSPQSIGFQATISAPHMHAYALELLFDQLHEGAKALDVGSGSGILTACFARMVGCTGKVIGIDHIKELVDDSVNNVRKDDPTLLSSGRVQLVVGDGRMGYAEEAPYDAIHVGAAAPVVPQALIDQLKPGGRLILPVGPAGGNQMLEQYDKLQDGSIKMKPLMGVIYVPLTDKEKQWSRWK

SEQ ID NO: 60209 - protein, 286 aa, Homo sapiens
MPGARSGGSGGDGSNSGSYSGDASGAVTVWEVVSLLGKLLGTVVALKVVLYLLRVCLAMAWKSGGASHSELIHNLRKNGIIKTDKVFEVMLATDRSHYAKCNPYMDSPQSIGFQATISAPHMHAYALELLFDQLHEGAKALDVGSGSGILTACFARMVGCTGKVIGIDHIKELVDDSVNNVRKDDPTLLSSGRVQLVVGDGRMGYAEEAPYDAIHVGAAAPVVPQALIDQLKPGGRLILPVGPAGGNQMLEQYDKLQDGSIKMKPLMGVIYVPLTDKEKQWSRDEL

SEQ ID NO: 60210 - protein, 285 aa, Homo sapiens; identical to SEQ ID NO: 60207

SEQ ID NO: 60211 - protein, 192 aa, Homo sapiens
MAWKSGGASHSELIHNLRSFQATISAPHMHAYALELLFDQLHEGAKALDVGSGSGILTACFARMVGCTGKVIGIDHIKELVDDSVNNVRKDDPTLLSSGRVQLVVGDGRMGYAEEAPYDAIHVGAAAPVVPQALIDQLKPGGRLILPVGPAGGNQMLEQYDKLQDGSIKMKPLMGVIYVPLTDKEKQWSRWK

SEQ ID NO: 60212 - protein, 671 aa, Homo sapiens
MKQIFFLDDSGPPFGHMVLALGGYLGGFDGNFLWNRIGAEYSSNVPVWSLRLLPALAGALSVPMAYQIVLELHFSHCAAMGAALLMLIENALITQSRLMLLESVLIFFNLLAVLSYLKFFNCQKHSPFSLSWWFWLTLTGVACSCAVGIKYMGVFTYVLVLGVAAVHAWHLLGDQTLSNVCVFCHLLARAVALLVIPVVLYLLFFYVHLILVFRSGPHDQIMSSAFQASLEGGLARITQGQPLEVAFGSQVTLRNVFGKPVPCWLHSHQDTYPMIYENGRGSSHQQQVTCYPFKDVNNWWIVKDPRRHQLVVSSPPRPVRHGDMVQLVHGMTTRSLNTHDVAAPLSPHSQEVSCYIDYNISMPAQNLWRLEIVNRGSDTDVWKTILSEVRFVHVNTSAVLKLSGAHLPDWGYRQLEIVGEKLSRGYHGSTVWNVEEHRYGASQEQRERERELHSPAQVDVSRNLSFMARFSELQWRMLALRSDDSEHKYSSSPLEWVTLDTNIAYWLHPRTSAQIHLLGNIVIWVSGSLALAIYALLSLWYLLRRRRNVHDLPQDAWLRWVLAGALCAGGWAVNYLPFFLMEKTLFLYHYLPALTFQILLLPVVLQHISDHLCRSQLQRSIFSALVVAWYSSACHVSNTLRPLTYGDKSLSPHELKALRWKDSWDILIRKH

SEQ ID NO: 60213 - protein, 695 aa, Homo sapiens
MWGFLKRPVVVTADINLSLVALTGMGLLSRLWRLTYPRAVVLFRRIRWQFFVEQNWSSVVAFPEYSSNVPVWSLRLLPALAGALSVPMAYQIVLELHFSHCAAMGAALLMLIENALITQSRLMLLESVLIFFNLLAVLSYLKFFNCQKHSPFSLSWWFWLTLTGVACSCAVGIKYMGVFTYVLVLGVAAVHAWHLLGDQTLSNVCVFCHLLARAVALLVIPVVLYLLFFYVHLILVFRSGPHDQIMSSAFQASLEGGLARITQGQPLEVAFGSQVTLRNVFGKPVPCWLHSHQDTYPMIYENGRGSSHQQQVTCYPFKDVNNWWIVKDPRRHQLVVSSPPRPVRHGDMVQLVHGMTTRSLNTHDVAAPLSPHSQEVSCYIDYNISMPAQNLWRLEIVNRGSDTDVWKTILSEVRFVHVNTSAVLKLSGAHLPDWGYRQLEIVGEKLSRGYHGSTVWNVEEHRYGASQEQRERERELHSPAQVDVSRNLSFMARFSELQWRMLALRSDDSEHKYSSSPLEWVTLDTNIAYWLHPRTSAQIHLLGNIVIWVSGSLALAIYALLSLWYLLRRRRNVHDLPQDAWLRWVLAGALCAGGWAVNYLPFFLMEKTLFLYHYLPALTFQILLLPVVLQHISDHLCRSQLQRSIFSALVVAWYSSACHVSNTLRPLTYGDKSLSPHELKALRWKDSWDILIRKH

SEQ ID NO: 60214 - protein, 346 aa, Homo sapiens
WRGGGCTSPATLGAARGAVGIGKEGQYQPLIASLTWGLVPLSQAQEIVNRGSDTDVWKTILSEVRFVHVNTSAVLKLSGAHLPDWGYRQLEIVGEKLSRGYHGSTVWNVEEHRYGASQEQRERERELHSPAQVDVSRNLSFMARFSELQWRMLALRSDDSEHKYSSSPLEWVTLDTNIAYWLHPRTSAQIHLLGNIVIWVSGSLALAIYALLSLWYLLRRRRNVHDLPQDAWLRWVLAGALCAGGWAVNYLPFFLMEKTLFLYHYLPALTFQILLLPVVLQHISDHLCRSQLQRSIFSALVVAWYSSACHVSNTLRPLTYGDKSLSPHELKALRWKDSWDILIRKH

SEQ ID NO: 60215 - protein, 156 aa, Homo sapiens
MAYQIVLELHFSHCAAMGAALLMLIENALITQSRLMLLESVLIFFNLLAVLSYLKFFNCQKHSLPLWAPRPNHVQCLPGQLRGRTSSDHSGSATGGGLWVPGHSEERLWETCALLASFPPGHLPHDVRYENGRGSSHQQQVTCYPFKDVNNWWIVK

SEQ ID NO: 60216 - protein, 747 aa, Homo sapiens
MWGFLKRPVVVTADINLSLVALTGMGLLSRLWRLTYPRAVVFDEVYYGQYISFYMKQIFFLDDSGPPFGHMVLALGGYLGGFDGNFLWNRIGAEYSSNVPVWSLRLLPALAGALSVPMAYQIVLELHFSHCAAMGAALLMLIENALITQSRLMLLESVLIFFNLLAVLSYLKFFNCQKHSPFSLSWWFWLTLTGVACSCAVGIKYMGVFTYVLVLGVAAVHAWHLLGDQTLSNVGADVQCCMRPACMGQMQMSQGVCVFCHLLARAVALLVIPVVLYLLFFYVHLILVFRSGPHDQIMSSAFQASLEGGLARITQGQPLEVAFGSQVTLRNVFGKPVPCWLHSHQDTYPMIYENGRGSSHQQQVTCYPFKDVNNWWIVKDPRRHQLVVSSPPRPVRHGDMVQLVHGMTTRSLNTHDVAAPLSPHSQEVSCYIDYNISMPAQNLWRLEIVNRGSDTDVWKTILSEVRFVHVNTSAVLKLSGAHLPDWGYRQLEIVGEKLSRGYHGSTVWNVEEHRYGASQEQRERERELHSPAQVDVSRNLSFMARFSELQWRMLALRSDDSEHKYSSSPLEWVTLDTNIAYWLHPRTSAQIHLLGNIVIWVSGSLALAIYALLSLWYLLRRRRNVHDLPQDAWLRWVLAGALCAGGWAVNYLPFFLMEKTLFLYHYLPALTFQILLLPVVLQHISDHLCRSQLQRSIFSALVVAWYSSACHVSNTLRPLTYGDKSLSPHELKALRWKDSWDILIRKH

SEQ ID NO: 60217 - protein, 725 aa, Homo sapiens
MWGFLKRPVVVTADINLSLVALTGMGLLSRLWRLTYPRAVVFDEVYYGQYISFYMKQIFFLDDSGPPFGHMVLALGGYLGGFDGNFLWNRIGAEYSSNVPVWSLRLLPALAGALSVPMAYQIVLELHFSHCAAMGAALLMLIENALITQSRLMLLESVLIFFNLLAVLSYLKFFNCQKHSPFSLSWWFWLTLTGVACSCAVGIKYMGVFTYVLVLGVAAVHAWHLLGDQTLSNVCVFCHLLARAVALLVIPVVLYLLFFYVHLILVFRSGPHDQIMSSAFQASLEGGLARITQGQPLEVAFGSQVTLRNVFGKPVPCWLHSHQDTYPMIYENGRGSSHQQQVTCYPFKDVNNWWIVKDPRRHQLVVSSPPRPVRHGDMVQLVHGMTTRSLNTHDVAAPLSPHSQEVSCYIDYNISMPAQNLWRLEIVNRGSDTDVWKTILSEVRFVHVNTSAVLKLSGAHLPDWGYRQLEIVGEKLSRGYHGSTVWNVEEHRYGASQEQRERERELHSPAQVDVSRNLSFMARFSELQWRMLALRSDDSEHKYSSSPLEWVTLDTNIAYWLHPRTSAQIHLLGNIVIWVSGSLALAIYALLSLWYLLRRRRNVHDLPQDAWLRWVLAGALCAGGWAVNYLPFFLMEKTLFLYHYLPALTFQILLLPVVLQHISDHLCRSQLQRSIFSALVVAWYSSACHVSNTLRPLTYGDKSLSPHELKALRWKDSWDILIRKH

SEQ ID NO: 60218 - protein, 608 aa, Homo sapiens
MAYQIVLELHFSHCAAMGAALLMLIENALITQSRLMLLESVLIFFNLLAVLSYLKFFNCQKHSPFSLSWWFWLTLTGVACSCAVGIKYMGVFTYVLVLGVAAVHAWHLLGDQTLSNVCVFCHLLARAVALLVIPVVLYLLFFYVHLILVFRSGPHDQIMSSAFQASLEGGLARITQGQPLEVAFGSQVTLRNVFGKPVPCWLHSHQDTYPMIYENGRGSSHQQQVTCYPFKDVNNWWIVKDPRRHQLVVSSPPRPVRHGDMVQLVHGMTTRSLNTHDVAAPLSPHSQEVSCYIDYNISMPAQNLWRLEIVNRGSDTDVWKTILSEVRFVHVNTSAVLKLSGAHLPDWGYRQLEIVGEKLSRGYHGSTVWNVEEHRYGASQEQRERERELHSPAQVDVSRNLSFMARFSELQWRMLALRSDDSEHKYSSSPLEWVTLDTNIAYWLHPRTSAQIHLLGNIVIWVSGSLALAIYALLSLWYLLRRRRNVHDLPQDAWLRWVLAGALCAGGWAVNYLPFFLMEKTLFLYHYLPALTFQILLLPVVLQHISDHLCRSQLQRSIFSALVVAWYSSACHVSNTLRPLTYGDKSLSPHELKALRWKDSWDILIRKH

SEQ ID NO: 60219 - protein, 156 aa, Homo sapiens; identical to SEQ ID NO: 60215

SEQ ID NO: 60220 - protein, 142 aa, Homo sapiens
MWGFLKRPVVVTADINLSLVALTGMGLLSRLWRLTYPRAVVFDEVYYGQYISFYMKQIFFLDDSGPPFGHMVLALGGYLGGFDGNFLWNRIGAEYSSNVPVWSLRLLPALAGALSVPMAYQIVLELHFSHCAAMGAALLMLI

SEQ ID NO: 60221 - protein, 573 aa, Homo sapiens
MLLESVLIFFNLLAVLSYLKFFNCQKHSPFSLSWWFWLTLTGVACSCAVGIKYMGVFTYVLVLGVAAVHAWHLLGDQTLSNVCVFCHLLARAVALLVIPVVLYLLFFYVHLILVFRSGPHDQIMSSAFQASLEGGLARITQGQPLEVAFGSQVTLRNVFGKPVPCWLHSHQDTYPMIYENGRGSSHQQQVTCYPFKDVNNWWIVKDPRRHQLVVSSPPRPVRHGDMVQLVHGMTTRSLNTHDVAAPLSPHSQEVSCYIDYNISMPAQNLWRLEIVNRGSDTDVWKTILSEVRFVHVNTSAVLKLSGAHLPDWGYRQLEIVGEKLSRGYHGSTVWNVEEHRYGASQEQRERERELHSPAQVDVSRNLSFMARFSELQWRMLALRSDDSEHKYSSSPLEWVTLDTNIAYWLHPRTSAQIHLLGNIVIWVSGSLALAIYALLSLWYLLRRRRNVHDLPQDAWLRWVLAGALCAGGWAVNYLPFFLMEKTLFLYHYLPALTFQILLLPVVLQHISDHLCRSQLQRSIFSALVVAWYSSACHVSNTLRPLTYGDKSLSPHELKALRWKDSWDILIRKH

SEQ ID NO: 60222 - protein, 725 aa, Homo sapiens; identical to SEQ ID NO: 60217

SEQ ID NO: 60223 - protein, 168 aa, Homo sapiens
MAYQIVLELHFSHCAAMGAALLMLIENALITQSRLMLLESVLIFFNLLAVLSYLKFFNCQKHSPFSLSWWFWLTLTGVACSCAVGIKYMGVFTYVLVLGVAAVHAWHLLGDQTLSNVCVFCHLLARAVALLVIPVVLYLLFFYVHLILVFRSGPHDQIMSSAFQASLE

SEQ ID NO: 60224 - protein, 297 aa, Homo sapiens
MAYQIVLELHFSHCAAMGAALLMLIENALITQSRLMLLESVLIFFNLLAVLSYLKFFNCQKHSPFSLSWWFWLTLTGVACSCAVGIKYMGVFTYVLVLGVAAVHAWHLLGDQTLSNVGADVQCCMRPACMGQMQMSQGVCVFCHLLARAVALLVIPVVLYLLFFYVHLILVFRSGPHDQIMSSAFQASLEGGLARITQGQPLEVAFGSQVTLRNVFGKPVPCWLHSHQDTYPMIYENGRGSSHQQQVTCYPFKDVNNWWIVKDPRRHQLVVSSPPRPVRHGDMVQLVHGMTTRSLNT

SEQ ID NO: 60225 - protein, 218 aa, Homo sapiens
MKQIFFLDDSGPPFGHMVLALGGYLGGFDGNFLWNRIGAEYSSNVPVWSLRLLPALAGALSVPMAYQIVLELHFSHCAAMGAALLMLIENALITQSRLMLLESVLIFFNLLAVLSYLKFFNCQKHSPFSLSWWFWLTLTGVACSCAVGIKYMGVFTYVLVLGVAAVHAWHLLGDQTLSNVGADVQCCMRPACMGQMQMSQGVCVFCHLLARAVALLVI

SEQ ID NO: 60226 - protein, 465 aa, Homo sapiens
MAIFCGTELEQVCVFCHLLARAVALLVIPVVLYLLFFYVHLILVFRSGPHDQIMSSAFQASLEGGLARITQGQPLEVAFGSQVTLRNVFGKPVPCWLHSHQDTYPMIYENGRGSSHQQQVTCYPFKDVNNWWIVKDPRRHQLVVSSPPRPVRHGDMVQLVHGMTTRSLNTHDVAAPLSPHSQEVSCYIDYNISMPAQNLWRLEIVNRGSDTDVWKTILSEVRFVHVNTSAVLKLSGAHLPDWGYRQLEIVGEKLSRGYHGSTVWNVEEHRYGASQEQRERERELHSPAQVDVSRNLSFMARFSELQAQIHLLGNIVIWVSGSLALAIYALLSLWYLLRRRRNVHDLPQDAWLRWVLAGALCAGGWAVNYLPFFLMEKTLFLYHYLPALTFQILLLPVVLQHISDHLCRSQLQRSIFSALVVAWYSSACHVSNTLRPLTYGDKSLSPHELKALRWKDSWDILIRKH

SEQ ID NO: 60227 - protein, 750 aa, Homo sapiens
MPPATGGGLAESELRPRRGRCGPQAARAAGRDVAAEAVARSPKRPAWGSRRFEAVGWWALLALVTLLSFATRFHRLDEPPHICWDETHFGKMGSYYINRTFFFDVHPPLGKMLIGLAGYLSGYDGTFLFQKPGDKYEHHSYMGMRGFCAFLGSWLVPFAYLTVLDLSKSLSAALLTAALLTFDTGCLTLSQYILLDPILMFFIMAAMLSMVKYNSCADRPFSAPWWFWLSLTGVSLAGALGVKFVGLFIILQVGLNTIADLWYLFGDLSLSLVTVGKHLTARVLCLIVLPLALYTATFAVHFMVLSKSGPGDGFFSSAFQARLSGNNLHNASIPEHLAYGSVITVKNLRMAIGYLHSHRHLYPEGIGARQQQVTTYLHKDYNNLWIIKKHNTNSDPLDPSFPVEFVRHGDIIRLEHKETSRNLHSHYHEAPMTRKHYQVTGYGINGTGDSNDFWRIEVVNRKFGNRIKVLRSRIRFIHLVTGCVLGSSGKVLPKWGWEQLEVTCTPYLKETLNSIWNVEDHINPKLPNISLDVLQPSFPEILLESHMVMIRGNSGLKPKDNEFTSKPWHWPINYQGLRFSGVNDTDFRVYLLGNPVVWWLNLLSIALYLLSGSIIAVAMQRGARLPAEVAGLSQVLLRGGGQVLLGWTLHYFPFFLMGRVLYFHHYFPAMLFSSMLTGILWDTLLRLCAWGLASWPLARGIHVAGILSLLLGTAYSFYLFHPLAYGMVGPLAQDPQSPMAGLRWLDSWDF

SEQ ID NO: 60228 - protein, 222 aa, Homo sapiens
MKLPLLLALLFGAVSALHLRSETSTFETPLGAKTLPEDEETPEQEMEETPCRELEEEEEWGSGSEDASKKDGAVESISVPDMVDKNLTCPEEEDTVKVVGIPGCQTCRYLLVRSLQTFSQAWFTCRRCYRGNLVSIHNFNINYRIQCSVSALNQGQVWIGGRITGSGRCRRFQWVDGSRWNFAYWAAHQPWSRGGHCVALCTRGGHWRRAHCLRRLPFICSY

SEQ ID NO: 60229 - protein, 222 aa, Homo sapiens; identical to SEQ ID NO: 60228

SEQ ID NO: 60230 - protein, 211 aa, Homo sapiens
MKLPLLLALLFGAVSALHLRSETSTFETPLGAKTLPEDEETPEQEMEETPCRELEEEEEWGSGSEDASKKDGAVESISVPDMVDKNLTCPEEEDTVKVVGIPGCQTCRYLLFTCRRCYRGNLVSIHNFNINYRIQCSVSALNQGQVWIGGRITGSGRCRRFQWVDGSRWNFAYWAAHQPWSRGGHCVALCTRGGHWRRAHCLRRLPFICSY

SEQ ID NO: 60231 - protein, 225 aa, Homo sapiens
MQCLLLLPFLLLGTVSALHLENDAPHLESLETQADLGQDLDSSKEQERDLALTEEVIQAEGEEVKASACQDNFEDEEAMESDPAALDKDFQCPREEDIVEVQGSPRCKICRYLLVRTPKTFAEAQNVCSRCYGGNLVSIHDFNFNYRIQCCTSTVNQAQVWIGGNLRGWFLWKRFCWTDGSHWNFAYWSPGQPGNGQGSCVALCTKGGYWRRAQCDKQLPFVCSF

SEQ ID NO: 60232 - protein, 1363 aa, Homo sapiens
MAWKTLPIYLLLLLSVFVIQQVSSQELSCKGRCFESFERGRECDCDAQCKKYDKCCPDYESFCAEVHNPTSPPSSKKAPPPSGASQTIKSTTKRSPKPPNKKKTKKVIESEEITEEHSVSENQESSSSSSSSSSSSTIRKIKSSKNSAANRELQKKLKVKDNKKNRTKKKPTPKPPVVDEAGSGLDNGDFKVTTPDTSTTQHNKVSTSPKITTAKPINPRPSLPPNSDTSKETSLTVNKETTVETKETTTTNKQTSTDGKEKTTSAKETQSIEKTSAKDLAPTSKVLAKPTPKAETTTKGPALTTPKEPTPTTPKEPASTTPKEPTPTTIKSAPTTPKEPAPTTTKSAPTTPKEPAPTTTKEPAPTTPKEPAPTTTKEPAPTTTKSAPTTPKEPAPTTPKKPAPTTPKEPAPTTPKEPTPTTPKEPAPTTKEPAPTTPKEPAPTAPKKPAPTTPKEPAPTTPKEPAPTTTKEPSPTTPKEPAPTTTKSAPTTTKEPAPTTTKSAPTTPKEPSPTTTKEPAPTTPKEPAPTTPKKPAPTTPKEPAPTTPKEPAPTTTKKPAPTTPKEPAPTTPKETAPTTPKKLTPTTPEKLAPTTPEKPAPTTPEELAPTTPEEPTPTTPEEPAPTTPKAAAPNTPKEPAPTTPKEPAPTTPKEPAPTTPKETAPTTPKGTAPTTLKEPAPTTPKKPAPKELAPTTTKEPTSTTCDKPAPTTPKGTAPTTPKEPAPTTPKEPAPTTPKGTAPTTLKEPAPTTPKKPAPKELAPTTTKGPTSTTSDKPAPTTPKETAPTTPKEPAPTTPKKPAPTTPETPPPTTSEVSTPTTTKEPTTIHKSPDESTPELSAEPTPKALENSPKEPGVPTTKTPAATKPEMTTTAKDKTTERDLRTTPETTTAAPKMTKETATTTEKTTESKITATTTQVTSTTTQDTTPFKITTLKTTTLAPKVTTTKKTITTTEIMNKPEETAKPKDRATNSKATTPKPQKPTKAPKKPTSTKKPKTMPRVRKPKTTPTPRKMTSTMPELNPTSRIAEAMLQTTTRPNQTPNSKLVEVNPKSEDAGGAEGETPHMLLRPHVFMPEVTPDMDYLPRVPNQGIIINPMLSDETNICNGKPVDGLTTLRNGTLVAFRGHYFWMLSPFSPPSPARRITEVWGIPSPIDTVFTRCNCEGKTFFFKDSQYWRFTNDIKDAGYPKPIFKGFGGLTGQIVAALSTAKYKNWPESVYFFKRGGSIQQYIYKQEPVQKCPGRRPALNYPVYGETTQVRRRRFERAIGPSQTHTIRIQYSPARLAYQDKGVLHNEVKVSILWRGLPNVVTSAISLPNIRKPDGYDYYAFSKDQYYNIDVPSRTARAITTRSGQTLSKVWYNCP

SEQ ID NO: 60233 - protein, 933 aa, Homo sapiens
MAWKTLPIYLLLLLSVFVIQQVSSQELSCKGRCFESFERGRECDCDAQCKKYDKCCPDYESFCAEVHNPTSPPSSKKAPPPSGASQTIKSTTKRSPKPPNKKKTKKVIESEEITEEHSVSENQESSSSSSSSSSSSTIRKIKSSKNSAANRELQKKLKVKDNKKNRTKKKPTPKPPVVDEAGSGLDNGDFKVTTPDTSTTQHNKVSTSPKITTAKPINPRPSLPPNSDTSKETSLTVNKETTVETKETTTTNKQTSTDGKEKTTSAKETQSIEKTSAKDLAPTSKVLAKPTPKAETTTKGPALTTPKEPTPTTPKEPASTTPKEPTPTTIKSAPTTPKEPAPTTTKSAPTTPKEPAPTTTKEPAPTTPKKPAPTTPETPPPTTSEVSTPTTTKEPTTIHKSPDESTPELSAEPTPKALENSPKEPGVPTTKTPAATKPEMTTTAKDKTTERDLRTTPETTTAAPKMTKETATTTEKTTESKITATTTQVTSTTTQDTTPFKITTLKTTTLAPKVTTTKKTITTTEIMNKPEETAKPKDRATNSKATTPKPQKPTKAPKKPTSTKKPKTMPRVRKPKTTPTPRKMTSTMPELNPTSRIAEAMLQTTTRPNQTPNSKLVEVNPKSEDAGGAEGETPHMLLRPHVFMPEVTPDMDYLPRVPNQGIIINPMLSDETNICNGKPVDGLTTLRNGTLVAFRGHYFWMLSPFSPPSPARRITEVWGIPSPIDTVFTRCNCEGKTFFFKDSQYWRFTNDIKDAGYPKPIFKGFGGLTGQIVAALSTAKYKNWPESVYFFKRGGSIQQYIYKQEPVQKCPGRRPALNYPVYGETTQVRRRRFERAIGPSQTHTIRIQYSPARLAYQDKGVLHNEVKVSILWRGLPNVVTSAISLPNIRKPDGYDYYAFSKDQYYNIDVPSRTARAITTRSGQTLSKVWYNCP

SEQ ID NO: 60234 - protein, 1311 aa, Homo sapiens
MAWKTLPIYLLLLLSVFVIQQVSSQDLSSCAGRCGEGYSRDATCNCDYNCQHYMECCPDFKRVCTAELSCKGRCFESFERGRECDCDAQCKKYDKCCPDYESFCAEVKDNKKNRTKKKPTPKPPVVDEAGSGLDNGDFKVTTPDTSTTQHNKVSTSPKITTAKPINPRPSLPPNSDTSKETSLTVNKETTVETKETTTTNKQTSTDGKEKTTSAKETQSIEKTSAKDLAPTSKVLAKPTPKAETTTKGPALTTPKEPTPTTPKEPASTTPKEPTPTTIKSAPTTPKEPAPTTTKSAPTTPKEPAPTTTKEPAPTTPKEPAPTTTKEPAPTTTKSAPTTPKEPAPTTPKKPAPTTPKEPAPTTPKEPTPTTPKEPAPTTKEPAPTTPKEPAPTAPKKPAPTTPKEPAPTTPKEPAPTTTKEPSPTTPKEPAPTTTKSAPTTTKEPAPTTTKSAPTTPKEPSPTTTKEPAPTTPKEPAPTTPKKPAPTTPKEPAPTTPKEPAPTTTKKPAPTTPKEPAPTTPKETAPTTPKKLTPTTPEKLAPTTPEKPAPTTPEELAPTTPEEPTPTTPEEPAPTTPKAAAPNTPKEPAPTTPKEPAPTTPKEPAPTTPKETAPTTPKGTAPTTLKEPAPTTPKKPAPKELAPTTTKEPTSTTCDKPAPTTPKGTAPTTPKEPAPTTPKEPAPTTPKGTAPTTLKEPAPTTPKKPAPKELAPTTTKGPTSTTSDKPAPTTPKETAPTTPKEPAPTTPKKPAPTTPETPPPTTSEVSTPTTTKEPTTIHKSPDESTPELSAEPTPKALENSPKEPGVPTTKTPAATKPEMTTTAKDKTTERDLRTTPETTTAAPKMTKETATTTEKTTESKITATTTQVTSTTTQDTTPFKITTLKTTTLAPKVTTTKKTITTTEIMNKPEETAKPKDRATNSKATTPKPQKPTKAPKKPTSTKKPKTMPRVRKPKTTPTPRKMTSTMPELNPTSRIAEAMLQTTTRPNQTPNSKLVEVNPKSEDAGGAEGETPHMLLRPHVFMPEVTPDMDYLPRVPNQGIIINPMLSDETNICNGKPVDGLTTLRNGTLVAFRGHYFWMLSPFSPPSPARRITEVWGIPSPIDTVFTRCNCEGKTFFFKDSQYWRFTNDIKDAGYPKPIFKGFGGLTGQIVAALSTAKYKNWPESVYFFKRGGSIQQYIYKQEPVQKCPGRRPALNYPVYGETTQVRRRRFERAIGPSQTHTIRIQYSPARLAYQDKGVLHNEVKVSILWRGLPNVVTSAISLPNIRKPDGYDYYAFSKDQYYNIDVPSRTARAITTRSGQTLSKVWYNCP

SEQ ID NO: 60235 - protein, 1361 aa, Homo sapiens
MAWKTLPIYLLLLLSVFVIQQVSSQDLSSCAGRCGEGYSRDATCNCDYNCQHYMECCPDFKRVCTAELSCKGRCFESFERGRECDCDAQCKKYDKCCPDYESFCAEVHNPTSPPSSKKAPPPSGASQTIKSTTKRSPKPPNKKKTKKVIESEEITEVKDNKKNRTKKKPTPKPPVVDEAGSGLDNGDFKVTTPDTSTTQHNKVSTSPKITTAKPINPRPSLPPNSDTSKETSLTVNKETTVETKETTTTNKQTSTDGKEKTTSAKETQSIEKTSAKDLAPTSKVLAKPTPKAETTTKGPALTTPKEPTPTTPKEPASTTPKEPTPTTIKSAPTTPKEPAPTTTKSAPTTPKEPAPTTTKEPAPTTPKEPAPTTTKEPAPTTTKSAPTTPKEPAPTTPKKPAPTTPKEPAPTTPKEPTPTTPKEPAPTTKEPAPTTPKEPAPTAPKKPAPTTPKEPAPTTPKEPAPTTTKEPSPTTPKEPAPTTTKSAPTTTKEPAPTTTKSAPTTPKEPSPTTTKEPAPTTPKEPAPTTPKKPAPTTPKEPAPTTPKEPAPTTTKKPAPTTPKEPAPTTPKETAPTTPKKLTPTTPEKLAPTTPEKPAPTTPEELAPTTPEEPTPTTPEEPAPTTPKAAAPNTPKEPAPTTPKEPAPTTPKEPAPTTPKETAPTTPKGTAPTTLKEPAPTTPKKPAPKELAPTTTKEPTSTTCDKPAPTTPKGTAPTTPKEPAPTTPKEPAPTTPKGTAPTTLKEPAPTTPKKPAPKELAPTTTKGPTSTTSDKPAPTTPKETAPTTPKEPAPTTPKKPAPTTPETPPPTTSEVSTPTTTKEPTTIHKSPDESTPELSAEPTPKALENSPKEPGVPTTKTPAATKPEMTTTAKDKTTERDLRTTPETTTAAPKMTKETATTTEKTTESKITATTTQVTSTTTQDTTPFKITTLKTTTLAPKVTTTKKTITTTEIMNKPEETAKPKDRATNSKATTPKPQKPTKAPKKPTSTKKPKTMPRVRKPKTTPTPRKMTSTMPELNPTSRIAEAMLQTTTRPNQTPNSKLVEVNPKSEDAGGAEGETPHMLLRPHVFMPEVTPDMDYLPRVPNQGIIINPMLSDETNICNGKPVDGLTTLRNGTLVAFRGHYFWMLSPFSPPSPARRITEVWGIPSPIDTVFTRCNCEGKTFFFKDSQYWRFTNDIKDAGYPKPIFKGFGGLTGQIVAALSTAKYKNWPESVYFFKRGGSIQQYIYKQEPVQKCPGRRPALNYPVYGETTQVRRRRFERAIGPSQTHTIRIQYSPARLAYQDKGVLHNEVKVSILWRGLPNVVTSAISLPNIRKPDGYDYYAFSKDQYYNIDVPSRTARAITTRSGQTLSKVWYNCP

SEQ ID NO: 60236 - protein, 1404 aa, Homo sapiens
MAWKTLPIYLLLLLSVFVIQQVSSQDLSSCAGRCGEGYSRDATCNCDYNCQHYMECCPDFKRVCTAELSCKGRCFESFERGRECDCDAQCKKYDKCCPDYESFCAEVHNPTSPPSSKKAPPPSGASQTIKSTTKRSPKPPNKKKTKKVIESEEITEEHSVSENQESSSSSSSSSSSSTIRKIKSSKNSAANRELQKKLKVKDNKKNRTKKKPTPKPPVVDEAGSGLDNGDFKVTTPDTSTTQHNKVSTSPKITTAKPINPRPSLPPNSDTSKETSLTVNKETTVETKETTTTNKQTSTDGKEKTTSAKETQSIEKTSAKDLAPTSKVLAKPTPKAETTTKGPALTTPKEPTPTTPKEPASTTPKEPTPTTIKSAPTTPKEPAPTTTKSAPTTPKEPAPTTTKEPAPTTPKEPAPTTTKEPAPTTTKSAPTTPKEPAPTTPKKPAPTTPKEPAPTTPKEPTPTTPKEPAPTTKEPAPTTPKEPAPTAPKKPAPTTPKEPAPTTPKEPAPTTTKEPSPTTPKEPAPTTTKSAPTTTKEPAPTTTKSAPTTPKEPSPTTTKEPAPTTPKEPAPTTPKKPAPTTPKEPAPTTPKEPAPTTTKKPAPTTPKEPAPTTPKETAPTTPKKLTPTTPEKLAPTTPEKPAPTTPEELAPTTPEEPTPTTPEEPAPTTPKAAAPNTPKEPAPTTPKEPAPTTPKEPAPTTPKETAPTTPKGTAPTTLKEPAPTTPKKPAPKELAPTTTKEPTSTTCDKPAPTTPKGTAPTTPKEPAPTTPKEPAPTTPKGTAPTTLKEPAPTTPKKPAPKELAPTTTKGPTSTTSDKPAPTTPKETAPTTPKEPAPTTPKKPAPTTPETPPPTTSEVSTPTTTKEPTTIHKSPDESTPELSAEPTPKALENSPKEPGVPTTKTPAATKPEMTTTAKDKTTERDLRTTPETTTAAPKMTKETATTTEKTTESKITATTTQVTSTTTQDTTPFKITTLKTTTLAPKVTTTKKTITTTEIMNKPEETAKPKDRATNSKATTPKPQKPTKAPKKPTSTKKPKTMPRVRKPKTTPTPRKMTSTMPELNPTSRIAEAMLQTTTRPNQTPNSKLVEVNPKSEDAGGAEGETPHMLLRPHVFMPEVTPDMDYLPRVPNQGIIINPMLSDETNICNGKPVDGLTTLRNGTLVAFRGHYFWMLSPFSPPSPARRITEVWGIPSPIDTVFTRCNCEGKTFFFKDSQYWRFTNDIKDAGYPKPIFKGFGGLTGQIVAALSTAKYKNWPESVYFFKRGGSIQQYIYKQEPVQKCPGRRPALNYPVYGETTQVRRRRFERAIGPSQTHTIRIQYSPARLAYQDKGVLHNEVKVSILWRGLPNVVTSAISLPNIRKPDGYDYYAFSKDQYYNIDVPSRTARAITTRSGQTLSKVWYNCP

SEQ ID NO: 60237 - protein, 277 aa, Homo sapiens
MGLLECCARCLVGAPFASLVATGLCFFGVALFCGCGHEALTGTEKLIETYFSKNYQDYEYLINVIHAFQYVIYGTASFFFLYGALLLAEGFYTTGAVRQIFGDYKTTICGKGLSATVTGGQKGRGSRGQHQAHSLERVCHCLGKWLGHPDKFVGITYALTVVWLLVFACSAVPVYIYFNTWTTCQSIAFPSKTSASIGSLCADARMYGVLPWNAFPGKVCGSNLLSICKTAEFQMTFHLFIAAFVGAAATLVSLLTFMIAATYNFAVLKLMGRGTKF

SEQ ID NO: 60238 - protein, 242 aa, Homo sapiens
MGLLECCARCLVGAPFASLVATGLCFFGVALFCGCGHEALTGTEKLIETYFSKNYQDYEYLINVIHAFQYVIYGTASFFFLYGALLLAEGFYTTGAVRQIFGDYKTTICGKGLSATFVGITYALTVVWLLVFACSAVPVYIYFNTWTTCQSIAFPSKTSASIGSLCADARMYGVLPWNAFPGKVCGSNLLSICKTAEFQMTFHLFIAAFVGAAATLVSLLTFMIAATYNFAVLKLMGRGTKF

SEQ ID NO: 60239 - protein, 277 aa, Homo sapiens; identical to SEQ ID NO: 60237

SEQ ID NO: 60240 - protein, 127 aa, Homo sapiens
MGLLECCARCLVGAPFASLVATGLCFFGVALFCGCGHEALTGTEKLIETYFSKNYQDYEYLINVIHAFQYVIYGTASFFFLYGALLLAEGFYTTGAVRQIFGDYKTTICGKGLSATVTGGQKGRGSR

SEQ ID NO: 60241 - protein, 255 aa, Homo sapiens
MGLLECCARCLVGAPFASLVATGLCFFGVALFCGCGHEALTGTEKLIETYFSKNYQDYEYLINVIHAFQYVIYGTASFFFLYGALLLAEGFYTTGAVRQKGRGSRGQHQAHSLERVCHCLGKWLGHPDKFVGITYALTVVWLLVFACSAVPVYIYFNTWTTCQSIAFPSKTSASIGSLCADARMYGVLPWNAFPGKVCGSNLLSICKTAEFQMTFHLFIAAFVGAAATLVSLLTFMIAATYNFAVLKLMGRGTKF

SEQ ID NO: 60242 - protein, 137 aa, Homo sapiens
MGLLECCARCLVGAPFASLVATGLCFFGVALFCGCGHEALTGTEKLIETYFSKNYQDYEYLINVIHAFQYVIYGTASFFFLYGALLLAEGFYTTGAVRQIFGDYKTTICGKGLSATVTGGQKGRGSRGQHQAHSLER

SEQ ID NO: 60243 - protein, 100 aa, Homo sapiens
MGLLECCARCLVGAPFASLVATGLCFFGVALFCGCGHEALTGTEKLIETYFSKNYQDYEYLINVIHAFQYVIYGTASFFFLYGALLLAEGFYTTGAVRQI

SEQ ID NO: 60244 - protein, 123 aa, Homo sapiens
MGLLECCARCLVGAPFASLVATGLCFFGVALFCGCGHEALTGTEKLIETYFSKNYQDYEYLINVIHAFQYVIYGTASFFFLYGALLLAEGFYTTGAVRQIFGDYKTTICGKGLSATVTGGQKG

SEQ ID NO: 60245 - protein, 112 aa, Homo sapiens
MGLLECCARCLVGAPFASLVATGLCFFGVALFCGCGHEALTGTEKLIETYFSKNYQDYEYLINVIHAFQYVIYGTASFFFLYGALLLAEGFYTTGAVRQIFGDYKTTICGKG

SEQ ID NO: 60246 - protein, 136 aa, Homo sapiens
MGLLECCARCLVGAPFASLVATGLCFFGVALFCGCGHEALTGTEKLIETYFSKNYQDYEYLINVIHAFQYVIYGTASFFFLYGALLLAEGFYTTGAVRQIFGDYKTTICGKGLSATVTGGQKGRGSRGQHQAHSLE

SEQ ID NO: 60247 - protein, 145 aa, Homo sapiens
MADSERLSAPGCWAACTNFSRTRKGILLFAEIILCLVILICFSASTPGYSSLSVIEMILAAIFFVVYMCDLHTKIPFINWPWSDFFRTLIAAILYLITSIVVLVERGNHSKIVAGVKAMGAALKHRAKGLRSQGPFLPLLLAEIV

SEQ ID NO: 60248 - protein, 152 aa, Homo sapiens
MADSERLSAPGCWAACTNFSRTRKGILLFAEIILCLVILICFSASTPGYSSLSVIEMILAAIFFVVYMCDLHTKIPFINWPWSDFFRTLIAAILYLITSIVVLVERGNHSKIVAGVLGLIATCLFGYDAYVTFPVRQPRHTAAPTDPADGPV

SEQ ID NO: 60249 - protein, 111 aa, Homo sapiens
MSDAAVDTSSEITTKDLKEKKEVVEEAENGRDAPANGNAENEENGEQEADNEVDEEEEEGGEEEEEEEEGDGEEEDGDEDEEAESATGKRAAEDDEDDDVDTKKQKTDEDD

SEQ ID NO: 60250 - protein, 135 aa, Homo sapiens
MQTFGPAGVAAVGRRVESPADRRATRACHCKLCLPAGSLQGLKGEEGSVEEAENGRDAPANGNANEENGEQEADNEVDEEEEEGGEEEEEEEEGDGEEEDGDEDEEAESATGKRAAEDDEDDDVDTKKQKTDEDD

SEQ ID NO: 60251 - protein, 110 aa, Homo sapiens
MSDAAVDTSSEITTKDLKEKKEVVEEAENGRDAPANGNANEENGEQEADNEVDEEEEEGGEEEEEEEEGDGEEEDGDEDEEAESATGKRAAEDDEDDDVDTKKQKTDEDD

SEQ ID NO: 60252 - protein, 1237 aa, Homo sapiens
MDSGAGGRRCPEAALLILGPPRMEHLRHSPGPGGQRLLLPSMLLALLLLLAPSPGHATRVVYKVPEEQPPNTLIGSLAADYGFPDVGHLYKLEVGAPYLRVDGKTGDIFTTETSIDREGLRECQNQLPGDPCILEFEVSITDLVQNGSPRLLEGQIEVQDINDNTPNFASPVITLAIPENTNIGSLFPIPLASDRDAGPNGVASYELQAGPEAQELFGLQVAEDQEEKQPQLIVMGNLDRERWDSYDLTIKVQDGGSPPRASSALLRVTVLDTNDNAPKFERPSYEAELSENSPIGHSVIQVKANDSDQGANAEIEYTFHQAPEVVRRLLRLDRNTGLITVQGPVDREDLSTLRFSVLAKDRGTNPKSARAQVVVTVKDMNDNAPTIEIRGIGLVTHQDGMANISEDVAEETAVALVQVSDRDEGENAAVTCVVAGDVPFQLRQASETGSDSKKKYFLQTTTPLDYEKVKDYTIEIVAVDSGNPPLSSTNSLKVQVVDVNDNAPVFTQSVTEVAFPENNKPGEVIAEITASDADSGSNAELVYSLEPEPAAKGLFTISPETGEIQVKTSLDREQRESYELKVVAADRGSPSLQGTATVLVNVLDCNDNDPKFMLSGYNFSVMENMPALSPVGMVTVIDGDKGENAQVQLSVEQDNGDFVIQNGTGTILSSLSFDREQQSTYTFQLKAVDGGVPPRSAYVGVTINVLDENDNAPYITAPSNTSHKLLTPQTRLGETVSQVAAEDFDSGVNAELIYSIAGGNPYGLFQIGSHSGAITLEKEIERRHHGLHRLVVKVSDRGKPPRYGTALVHLYVNETLANRTLLETLLGHSLDTPLDIDIAGDPEYERSKQRGNILFGVVAGVVAVALLIALAVLVRYCRQREAKSGYQAGKKETKDLYAPKPSGKASKGNKSKGKKSKSPKPVKPVEDEDEAGLQKSLKFNLMSDAPGDSPRIHLPLNYPPGSPDLGRHYRSNSPLPSIQLQPQSPSASKKHQVVQDLPPANTFVGTGDTTSTGSEQYSDYSYRTNPPKYPSKQLPHRRVTFSATSQAQELQDPSQHSYYDSGLEESETPSSKSSSGPRLGPLALPEDHYERTTPDGSIGEMEHPENDLRPLPDVAMTGTCTRECSEFGHSDTCWMPGQSSPSRRTKSSALKLSTFVPYQDRGGQEPAGAGSPSPPEDRNTKTAPVRLLPSYSAFSHSSHDSCKDSATLEEIPLTQTSDFPPAATPASAQTAKREIYL

SEQ ID NO: 60253 - protein, 1060 aa, Homo sapiens
MDSGAGGRRCPEAALLILGPPRMEHLRHSPGPGGQRLLLPSMLLALLLLLAPSPGHATRVVYKVPEEQPPNTLIGSLAADYGFPDVGHLYKLEVGAPYLRVDGKTGDIFTTETSIDREGLRECQNQLPGDPCILEFEVSITDLVQNGSPRLLEGQIEVQDINDNTPNFASPVITLAIPENTNIGSLFPIPLASDRDAGPNGVASYELQAGPEAQELFGLQVAEDQEEKQPQLIVMGNLDRERWDSYDLTIKVQDGGSPPRASSALLRVTVLDTNDNAPKFERPSYEAELSENSPIGHSVIQVKANDSDQGANAEIEYTFHQAPEVVRRLLRLDRNTGLITVQGPVDREDLSTLRFSVLAKDRGTNPKSARAQVVVTVKDMNDNAPTIEIRGIGLVTHQDGMANISEDVAEETAVALVQVSDRDEGENAAVTCVVAGDVPFQLRQASETGSDSKKKYFLQTTTPLDYEKVKDYTIEIVAVDSGNPPLSSTNSLKVQVVDVNDNAPVFTQSVTEVAFPENNKPGEVIAEITASDADSGSNAELVYSLEPEPAAKGLFTISPETGEIQVKTSLDREQRESYELKVVAADRGSPSLQGTATVLVNVLDCNDNDPKFMLSGYNFSVMENMPALSPVGMVTVIDGDKGENAQVQLSVEQDNGDFVIQNGTGTILSSLSFDREQQSTYTFQLKAVDGGVPPRSAYVGVTINVLDENDNAPYITAPSNTSHKLLTPQTRLGETVSQVAAEDFDSGVNAELIYSIAGGNPYGLFQIGSHSGAITLEKEIERRHHGLHRLVVKVSDRGKPPRYGTALVHLYVNETLANRTLLETLLGHSLDTPLDIDIAGDPEYERSKQRGNILFGVVAGVVAVALLIALAVLVRYCRQREAKSGYQAGKKETKDLYAPKPSGKASKGNKSKGKKSKSPKPVKPVEDEDEAGLQKSLKFNLMSDAPGDSPRIHLPLNYPPGSPDLGRHYRSNSPLPSIQLQPQSPSASKKHQVVQDLPPANTFVGTGDTTSTGSEQYSDYSYRTNPPKYPSKQVGQPFQLSTPQPLPHPYHGAIWTEVWE

SEQ ID NO: 60254 - protein, 1048 aa, Homo sapiens
MDSGAGGRRCPEAALLILGPPRMEHLRHSPGPGGQRLLLPSMLLALLLLLAPSPGHATRVVYKVPEEQPPNTLIGSLAADYGFPDVGHLYKLEVGAPYLRVDGKTGDIFTTETSIDREGLRECQNQLPGDPCILEFEVSITDLVQNGSPRLLEGQIEVQDINDNTPNFASPVITLAIPENTNIGSLFPIPLASDRDAGPNGVASYELQVAEDQEEKQPQLIVMGNLDRERWDSYDLTIKVQDGGSPPRASSALLRVTVLDTNDNAPKFERPSYEAELSENSPIGHSVIQVKANDSDQGANAEIEYTFHQAPEVVRRLLRLDRNTGLITVQGPVDREDLSTLRFSVLAKDRGTNPKSARAQVVVTVKDMNDNAPTIEIRGIGLVTHQDGMANISEDVAEETAVALVQVSDRDEGENAAVTCVVAGDVPFQLRQASETGSDSKKKYFLQTTTPLDYEKVKDYTIEIVAVDSGNPPLSSTNSLKVQVVDVNDNAPVFTQSVTEVAFPENNKPGEVIAEITASDADSGSNAELVYSLEPEPAAKGLFTISPETGEIQVKTSLDREQRESYELKVVAADRGSPSLQGTATVLVNVLDCNDNDPKFMLSGYNFSVMENMPALSPVGMVTVIDGDKGENAQVQLSVEQDNGDFVIQNGTGTILSSLSFDREQQSTYTFQLKAVDGGVPPRSAYVGVTINVLDENDNAPYITAPSNTSHKLLTPQTRLGETVSQVAAEDFDSGVNAELIYSIAGGNPYGLFQIGSHSGAITLEKEIERRHHGLHRLVVKVSDRGKPPRYGTALVHLYVNETLANRTLLETLLGHSLDTPLDIDIAGDPEYERSKQRGNILFGVVAGVVAVALLIALAVLVRYCRQREAKSGYQAGKKETKDLYAPKPSGKASKGNKSKGKKSKSPKPVKPVEDEDEAGLQKSLKFNLMSDAPGDSPRIHLPLNYPPGSPDLGRHYRSNSPLPSIQLQPQSPSASKKHQVVQDLPPANTFVGTGDTTSTGSEQYSDYSYRTNPPKYPSKQVGQPFQLSTPQPLPHPYHGAIWTEVWE

SEQ ID NO: 60255 - protein, 1038 aa, Homo sapiens
MEHLRHSPGPGGQRLLLPSMLLALLLLLAPSPGHATRVVYKVPEEQPPNTLIGSLAADYGFPDVGHLYKLEVGAPYLRVDGKTGDIFTTETSIDREGLRECQNQLPGDPCILEFEVSITDLVQNGSPRLLEGQIEVQDINDNTPNFASPVITLAIPENTNIGSLFPIPLASDRDAGPNGVASYELQAGPEAQELFGLQVAEDQEEKQPQLIVMGNLDRERWDSYDLTIKVQDGGSPPRASSALLRVTVLDTNDNAPKFERPSYEAELSENSPIGHSVIQVKANDSDQGANAEIEYTFHQAPEVVRRLLRLDRNTGLITVQGPVDREDLSTLRFSVLAKDRGTNPKSARAQVVVTVKDMNDNAPTIEIRGIGLVTHQDGMANISEDVAEETAVALVQVSDRDEGENAAVTCVVAGDVPFQLRQASETGSDSKKKYFLQTTTPLDYEKVKDYTIEIVAVDSGNPPLSSTNSLKVQVVDVNDNAPVFTQSVTEVAFPENNKPGEVIAEITASDADSGSNAELVYSLEPEPAAKGLFTISPETGEIQVKTSLDREQRESYELKVVAADRGSPSLQGTATVLVNVLDCNDNDPKFMLSGYNFSVMENMPALSPVGMVTVIDGDKGENAQVQLSVEQDNGDFVIQNGTGTILSSLSFDREQQSTYTFQLKAVDGGVPPRSAYVGVTINVLDENDNAPYITAPSNTSHKLLTPQTRLGETVSQVAAEDFDSGVNAELIYSIAGGNPYGLFQIGSHSGAITLEKEIERRHHGLHRLVVKVSDRGKPPRYGTALVHLYVNETLANRTLLETLLGHSLDTPLDIDIAGDPEYERSKQRGNILFGVVAGVVAVALLIALAVLVRYCRQREAKSGYQAGKKETKDLYAPKPSGKASKGNKSKGKKSKSPKPVKPVEDEDEAGLQKSLKFNLMSDAPGDSPRIHLPLNYPPGSPDLGRHYRSNSPLPSIQLQPQSPSASKKHQVVQDLPPANTFVGTGDTTSTGSEQYSDYSYRTNPPKYPSKQVGQPFQLSTPQPLPHPYHGAIWTEVWE

SEQ ID NO: 60256 - protein, 1040 aa, Homo sapiens
MIVLLLFALLWMVEGVFSQLHYTVQEEQEHGTFVGNIAEDLGLDITKLSARGFQTVPNSRTPYLDLNLETGVLYVNEKIDREQICKQSPSCVLHLEVFLENPLELFQVEIEVLDINDNPPSFPEPDLTVEISESATPGTRFPLESAFDPDVGTNSLRDYEITPNSYFSLDVQTQGDGNRFAELVLEKPLDREQQAVHRYVLTAVDGGGGGGVGEGGGGGGGAGLPPQQQRTGTALLTIRVLDSNDNVPAFDQPVYTVSLPENSPPGTLVIQLNATDPDEGQNGEVVYSFSSHISPRARELFGLSPRTGRLEVSGELDYEESPVYQVYVQAKDLGPNAVPAHCKVLVRVLDANDNAPEISFSTVKEAVSEGAAPGTVVALFSVTDRDSEENGQVQCELLGDVPFRLKSSFKNYYTIVTEAPLDREAGDSYTLTVVARDRGEPALSTSKSIQVQVSDVNDNAPRFSQPVYDVYVTENNVPGAYIYAVSATDRDEGANAQLAYSILECQIQGMSVFTYVSINSENGYLYALRSFDYEQLKDFSFQVEARDAGSPQALAGNATVNILIVDQNDNAPAIVAPLPGRNGTPAREVLPRSAEPGYLLTRVAAVDADDGENARLTYSIVRGNEMNLFRMDWRTGELRTARRVPAKRDPQRPYELVIEVRDHGQPPLSSTATLVVQLVDGAVEPQGGGGSGGGGSGEHQRPSRSGGGETSLDLTLILIIALGSVSFIFLLAMIVLAVRCQKEKKLNIYTCLASDCCLCCCCCGGGGSTCCGRQARARKKKLSKSDIMLVQSSNVPSNPAQVPIEESGGFGSHHHNQNYCYQVCLTPESAKTDLMFLKPCSPSRSTDTEHNPCGAIVTGYTDQQPDIISNGSILSNETKHQRAELSYLVDRPRRVNSSAFQEADIVSSKDSGHGDSEQGDSDHDATNRAQSAGMDLFSNCTEECKALGHSDRCWMPSFVPSDGRQAADYRSNLHVPGMDSVPDTEVFETPEAQPGAERSFSTFGKEKALHSTLERKELDGLLTNTRAPYKPPYLTRKRIC

SEQ ID NO: 60257 - protein, 1040 aa, Homo sapiens
MIVLLLFALLWMVEGVFSQLHYTVQEEQEHGTFVGNIAEDLGLDITKLSARGFQTVPNSRTPYLDLNLETGVLYVNEKIDREQICKQSPSCVLHLEVFLENPLELFQVEIEVLDINDNPPSFPEPDLTVEISESATPGTRFPLESAFDPDVGTNSLRDYEITPNSYFSLDVQTQGDGNRFAELVLEKPLDREQQAVHRYVLTAVDGGGGGGVGEGGGGGGGAGLPPQQQRTGTALLTIRVLDSNDNVPAFDQPVYTVSLPENSPPGTLVIQLNATDPDEGQNGEVVYSFSSHISPRARELFGLSPRTGRLEVSGELDYEESPVYQVYVQAKDLGPNAVPAHCKVLVRVLDANDNAPEISFSTVKEAVSEGAAPGTVVALFSVTDRDSEENGQVQCELLGDVPFRLKSSFKNYYTIVTEAPLDREAGDSYTLTVVARDRGEPALSTSKSIQVQVSDVNDNAPRFSQPVYDVYVTENNVPGAYIYAVSATDRDEGANAQLAYSILECQIQGMSVFTYVSINSENGYLYALRSFDYEQLKDFSFQVEARDAGSPQALAGNATVNILIVDQNDNAPAIVAPLPGRNGTPAREVLPRSAEPGYLLTRVAAVDADDGENARLTYSIVRGNEMNLFRMDWRTGELRTARRVPAKRDPQRPYELVIEVRDHGQPPLSSTATLVVQLVDGAVEPQGGGGSGGGGSGEHQRPSRSGGGETSLDLTLILIIALGSVSFIFLLAMIVLAVRCQKEKKLNIYTCLASDCCLCCCCCGGGGSTCCGRQARARKKKLSKSDIMLVQSSNVPSNPAQVPIEESGGFGSHHHNQNYCYQVCLTPESAKTDLMFLKPCSPSRSTDTEHNPCGAIVTGYTDQQPDIISNGSILSNETKHQRAELSYLVDRPRRVNSSAFQEADIVSSKDSGHGDSEQGDSDHDATNRAQSAGMDLFSNCTEECKALGHSDRCWMPSFVPSDGRQAADYRSNLHVPGMDSVPDTEVFETPEAQPGAERSFSTFGKEKALHSTLERKELDGLLTNTRAPYKPPYLRKKQRC

SEQ ID NO: 60258 - protein, 1310 aa, Homo sapiens
MDLLSGTYIFAVLLACVVFHSGAQEKNYTIREEMPENVLIGDLLKDLNLSLIPNKSLTTAMQFKLVYKTGDVPLIRIEEDTGEIFTTGARIDREKLCAGIPRDEHCFYEVEVAILPDEIFRLVKIRFLIEDINDNAPLFPATVINISIPENSAINSKYTLPAAVDPDVGINGVQNYELIKSQNIFGLDVIETPEGDKMPQLIVQKELDREEKDTYVMKVKVEDGGFPQRSSTAILQVSVTDTNDNHPVFKETEIEVSIPENAPVGTSVTQLHATDADIGENAKIHFSFSNLVSNIARRLFHLNATTGLITIKEPLDREETPNHKLLVLASDGGLMPARAMVLVNVTDVNDNVPSIDIRYIVNPVNDTVVLSENIPLNTKIALITVTDKDADHNGRVTCFTDHEIPFRLRPVFSNQFLLETAAYLDYESTKEYAIKLLAADAGKPPLNQSAMLFIKVKDENDNAPVFTQSFVTVSIPENNSPGIQLTKVSAMDADSGPNAKINYLLGPDAPPEFSLDCRTGMLTVVKKLDREKEDKYLFTILAKDNGVPPLTSNVTVFVSIIDQNDNSPVFTHNEYNFYVPENLPRHGTVGLITVTDPDYGDNSAVTLSILDENDDFTIDSQTGVIRPNISFDREKQESYTFYVKAEDGGRVSRSSSAKVTINVVDVNDNKPVFIVPPSNCSYELVLPSTNPGTVVFQVIAVDNDTGMNAEVRYSIVGGNTRDLFAIDQETGNITLMEKCDVTDLGLHRVLVKANDLGQPDSLFSVVIVNLFVNESVTNATLINELVRKSTEAPVTPNTEIADVSSPTSDYVKILVAAVAGTITVVVVIFITAVVRCRQAPHLKAAQKNKQNSEWATPNPENRQMIMMKKKKKKKKHSPKNLLLNFVTIEETKADDVDSDGNRVTLDLPIDLEEQTMGKYNWVTTPTTFKPDSPDLARHYKSASPQPAFQIQPETPLNSKHHIIQELPLDNTFVACDSISKCSSSSSDPYSVSDCGYPVTTFEVPVSVHTRPSQRRVTFHLPEGSQESSSDGGLGDHDAGSLTSTSHGLPLGYPQEEYFDRATPSNRTEGDGNSDPESTFIPRSPTAAEITVQPTVEEASDNCTQECLIYGHSDACWMPASLDHSSSSQAQASALCHSPPLSQASTQHHSPRVTQTIALCHSPPVTQTIALCHSPPPIQVSALHHSPPLVQATALHHSPPSAQASALCYSPPLAQAAAISHSSPLPQVIALHRSQAQSSVSLQQGWVQGADGLCSVDQGVQGSATSQFYTMSERLHPSDDSIKVIPLTTFTPRQQARPSRGDSPIMEEHPL

SEQ ID NO: 60259 - protein, 1347 aa, Homo sapiens
MDLLSGTYIFAVLLACVVFHSGAQEKNYTIREEMPENVLIGDLLKDLNLSLIPNKSLTTAMQFKLVYKTGDVPLIRIEEDTGEIFTTGARIDREKLCAGIPRDEHCFYEVEVAILPDEIFRLVKIRFLIEDINDNAPLFPATVINISIPENSAINSKYTLPAAVDPDVGINGVQNYELIKSQNIFGLDVIETPEGDKMPQLIVQKELDREEKDTYVMKVKVEDGGFPQRSSTAILQVSVTDTNDNHPVFKETEIEVSIPENAPVGTSVTQLHATDADIGENAKIHFSFSNLVSNIARRLFHLNATTGLITIKEPLDREETPNHKLLVLASDGGLMPARAMVLVNVTDVNDNVPSIDIRYIVNPVNDTVVLSENIPLNTKIALITVTDKDADHNGRVTCFTDHEIPFRLRPVFSNQFLLETAAYLDYESTKEYAIKLLAADAGKPPLNQSAMLFIKVKDENDNAPVFTQSFVTVSIPENNSPGIQLTKVSAMDADSGPNAKINYLLGPDAPPEFSLDCRTGMLTVVKKLDREKEDKYLFTILAKDNGVPPLTSNVTVFVSIIDQNDNSPVFTHNEYNFYVPENLPRHGTVGLITVTDPDYGDNSAVTLSILDENDDFTIDSQTGVIRPNISFDREKQESYTFYVKAEDGGRVSRSSSAKVTINVVDVNDNKPVFIVPPSNCSYELVLPSTNPGTVVFQVIAVDNDTGMNAEVRYSIVGGNTRDLFAIDQETGNITLMEKCDVTDLGLHRVLVKANDLGQPDSLFSVVIVNLFVNESVTNATLINELVRKSTEAPVTPNTEIADVSSPTSDYVKILVAAVAGTITVVVVIFITAVVRCRQAPHLKAAQKNKQNSEWATPNPENRQMIMMKKKKKKKKHSPKNLLLNFVTIEETKADDVDSDGNRVTLDLPIDLEEQTMGKYNWVTTPTTFKPDSPDLARHYKSASPQPAFQIQPETPLNSKHHIIQELPLDNTFVACDSISKCSSSSSDPYSVSDCGYPVTTFEVPVSVHTRPPMKEVVRSCTPMKESTTMEIWIHPQPQRKSEGKVAGKSQRRVTFHLPEGSQESSSDGGLGDHDAGSLTSTSHGLPLGYPQEEYFDRATPSNRTEGDGNSDPESTFIPRSPTAAEITVQPTVEEASDNCTQECLIYGHSDACWMPASLDHSSSSQAQASALCHSPPLSQASTQHHSPRVTQTIALCHSPPVTQTIALCHSPPPIQVSALHHSPPLVQATALHHSPPSAQASALCYSPPLAQAAAISHSSPLPQVIALHRSQAQSSVSLQQGWVQGADGLCSVDQGVQGSATSQFYTMSERLHPSDDSIKVIPLTTFTPRQQARPSRGDSPIMEEHPL

SEQ ID NO: 60260 - protein, 1329 aa, Homo sapiens
MDLLSGTYIFAVLLACVVFHSGAQEKNYTIREEMPENVLIGDLLKDLNLSLIPNKSLTTAMQFKLVYKTGDVPLIRIEEDTGEIFTTGARIDREKLCAGIPRDEHCFYEVEVAILPDEIFRLVKIRFLIEDINDNAPLFPATVINISIPENSAINSKYTLPAAVDPDVGINGVQNYELIKSQNIFGLDVIETPEGDKMPQLIVQKELDREEKDTYVMKVKVEDGGFPQRSSTAILQVSVTDTNDNHPVFKETEIEVSIPENAPVGTSVTQLHATDADIGENAKIHFSFSNLVSNIARRLFHLNATTGLITIKEPLDREETPNHKLLVLASDGGLMPARAMVLVNVTDVNDNVPSIDIRYIVNPVNDTVVLSENIPLNTKIALITVTDKDADHNGRVTCFTDHEIPFRLRPVFSNQFLLETAAYLDYESTKEYAIKLLAADAGKPPLNQSAMLFIKVKDENDNAPVFTQSFVTVSIPENNSPGIQLTKVSAMDADSGPNAKINYLLGPDAPPEFSLDCRTGMLTVVKKLDREKEDKYLFTILAKDNGVPPLTSNVTVFVSIIDQNDNSPVFTHNEYNFYVPENLPRHGTVGLITVTDPDYGDNSAVTLSILDENDDFTIDSQTGVIRPNISFDREKQESYTFYVKAEDGGRVSRSSSAKVTINVVDVNDNKPVFIVPPSNCSYELVLPSTNPGTVVFQVIAVDNDTGMNAEVRYSIVGGNTRDLFAIDQETGNITLMEKCDVTDLGLHRVLVKANDLGQPDSLFSVVIVNLFVNESVTNATLINELVRKSTEAPVTPNTEIADVSSPTSDYVKILVAAVAGTITVVVVIFITAVVRCRQAPHLKAAQKNKQNSEWATPNPENRQMIMMKKKKKKKKHSPKNLLLNFVTIEETKADDVDSDGNRVTLDLPIDLEEQTMGKYNWVTTPTTFKPDSPDLARHYKSASPQPAFQIQPETPLNSKHHIIQELPLDNTFVACDSISKCSSSSSDPYSVSDCGYPVTTFEVPVSVHTRPPMKEVVRSCTPMKESTTMEIWIHPQPQSQRRVTFHLPEGSQESSSDGGLGDHDAGSLTSTSHGLPLGYPQEEYFDRATPSNRTEGDGNSDPESTAEITVQPTVEEASDNCTQECLIYGHSDACWMPASLDHSSSSQAQASALCHSPPLSQASTQHHSPRVTQTIALCHSPPVTQTIALCHSPPPIQVSALHHSPPLVQATALHHSPPSAQASALCYSPPLAQAAAISHSSPLPQVIALHRSQAQSSVSLQQGWVQGADGLCSVDQGVQGSATSQFYTMSERLHPSDDSIKVIPLTTFTPRQQARPSRGDSPIMEEHPL

SEQ ID NO: 60261 - protein, 1021 aa, Homo sapiens
MDLLSGTYIFAVLLACVVFHSGAQEKNYTIREEMPENVLIGDLLKDLNLSLIPNKSLTTAMQFKLVYKTGDVPLIRIEEDTGEIFTTGARIDREKLCAGIPRDEHCFYEVEVAILPDEIFRLVKIRFLIEDINDNAPLFPATVINISIPENSAINSKYTLPAAVDPDVGINGVQNYELIKSQNIFGLDVIETPEGDKMPQLIVQKELDREEKDTYVMKVKVEDGGFPQRSSTAILQVSVTDTNDNHPVFKETEIEVSIPENAPVGTSVTQLHATDADIGENAKIHFSFSNLVSNIARRLFHLNATTGLITIKEPLDREETPNHKLLVLASDGGLMPARAMVLVNVTDVNDNVPSIDIRYIVNPVNDTVVLSENIPLNTKIALITVTDKDADHNGRVTCFTDHEIPFRLRPVFSNQFLLETAAYLDYESTKEYAIKLLAADAGKPPLNQSAMLFIKVKDENDNAPVFTQSFVTVSIPENNSPGIQLTKVSAMDADSGPNAKINYLLGPDAPPEFSLDCRTGMLTVVKKLDREKEDKYLFTILAKDNGVPPLTSNVTVFVSIIDQNDNSPVFTHNEYNFYVPENLPRHGTVGLITVTDPDYGDNSAVTLSILDENDDFTIDSQTGVIRPNISFDREKQESYTFYVKAEDGGRVSRSSSAKVTINVVDVNDNKPVFIVPPSNCSYELVLPSTNPGTVVFQVIAVDNDTGMNAEVRYSIVGGNTRDLFAIDQETGNITLMEKCDVTDLGLHRVLVKANDLGQPDSLFSVVIVNLFVNESVTNATLINELVRKSTEAPVTPNTEIADVSSPTSDYVKILVAAVAGTITVVVVIFITAVVRCRQAPHLKAAQKNKQNSEWATPNPENRQMIMMKKKKKKKKHSPKNLLLNFVTIEETKADDVDSDGNRVTLDLPIDLEEQTMGKYNWVTTPTTFKPDSPDLARHYKSASPQPAFQIQPETPLNSKHHIIQELPLDNTFVACDSISKCSSSSSDPYSVSDCGYPVTTFEVPVSVHTRPVGIQVSNTTF

SEQ ID NO: 60262 - protein, 1310 aa, Homo sapiens
MDLLSGTYIFAVLLACVVFHSGAQEKNYTIREEMPENVLIGDLLKDLNLSLIPNKSLTTAMQFKLVYKTGDVPLIRIEEDTGEIFTTGARIDREKLCAGIPRDEHCFYEVEVAILPDEIFRLVKIRFLIEDINDNAPLFPATVINISIPENSAINSKYTLPAAVDPDVGINGVQNYELIKSQNIFGLDVIETPEGDKMPQLIVQKELDREEKDTYVMKVKVEDGGFPQRSSTAILQVSVTDTNDNHPVFKETEIEVSIPENAPVGTSVTQLHATDADIGENAKIHFSFSNLVSNIARRLFHLNATTGLITIKEPLDREETPNHKLLVLASDGGLMPARAMVLVNVTDVNDNVPSIDIRYIVNPVNDTVVLSENIPLNTKIALITVTDKDADHNGRVTCFTDHEIPFRLRPVFSNQFLLETAAYLDYESTKEYAIKLLAADAGKPPLNQSAMLFIKVKDENDNAPVFTQSFVTVSIPENNSPGIQLTKVSAMDADSGPNAKINYLLGPDAPPEFSLDCRTGMLTVVKKLDREKEDKYLFTILAKDNGVPPLTSNVTVFVSIIDQNDNSPVFTHNEYNFYVPENLPRHGTVGLITVTDPDYGDNSAVTLSILDENDDFTIDSQTGVIRPNISFDREKQESYTFYVKAEDGGRVSRSSSAKVTINVVDVNDNKPVFIVPPSNCSYELVLPSTNPGTVVFQVIAVDNDTGMNAEVRYSIVGGNTRDLFAIDQETGNITLMEKCDVTDLGLHRVLVKANDLGQPDSLFSVVIVNLFVNESVTNATLINELVRKSTEAPVTPNTEIADVSSPTSDYVKILVAAVAGTITVVVVIFITAVVRCRQAPHLKAAQKNKQNSEWATPNPENRQMIMMKKKKKKKKHSPKNLLLNFVTIEETKADDVDSDGNRVTLDLPIDLEEQTMGKYNWVTTPTTFKPDSPDLARHYKSASPQPAFQIQPETPLNSKHHIIQELPLDNTFVACDSISKCSSSSSDPYSVSDCGYPVTTFEVPVSVHTRPSQRRVTFHLPEGSQESSSDGGLGDHDAGSLTSTSHGLPLGYPQEEYFDRATPSNRTEGDGNSDPESTFIPGLKKAAEITVQPTVEEASDNCTQECLIYGHSDACWMPASLDHSSSSQAQASALCHSPPLSQASTQHHSPRVTQTIALCHSPPVTQTIALCHSPPPIQVSALHHSPPLVQATALHHSPPSAQASALCYSPPLAQAAAISHSSPLPQVIALHRSQAQSSVSLQQGWVQGADGLCSVDQGVQGSATSQFYTMSERLHPSDDSIKVIPLTTFTPRQQARPSRGDSPIMEEHPL

SEQ ID NO: 60263 - protein, 1347 aa, Homo sapiens
MDLLSGTYIFAVLLACVVFHSGAQEKNYTIREEMPENVLIGDLLKDLNLSLIPNKSLTTAMQFKLVYKTGDVPLIRIEEDTGEIFTTGARIDREKLCAGIPRDEHCFYEVEVAILPDEIFRLVKIRFLIEDINDNAPLFPATVINISIPENSAINSKYTLPAAVDPDVGINGVQNYELIKSQNIFGLDVIETPEGDKMPQLIVQKELDREEKDTYVMKVKVEDGGFPQRSSTAILQVSVTDTNDNHPVFKETEIEVSIPENAPVGTSVTQLHATDADIGENAKIHFSFSNLVSNIARRLFHLNATTGLITIKEPLDREETPNHKLLVLASDGGLMPARAMVLVNVTDVNDNVPSIDIRYIVNPVNDTVVLSENIPLNTKIALITVTDKDADHNGRVTCFTDHEIPFRLRPVFSNQFLLETAAYLDYESTKEYAIKLLAADAGKPPLNQSAMLFIKVKDENDNAPVFTQSFVTVSIPENNSPGIQLTKVSAMDADSGPNAKINYLLGPDAPPEFSLDCRTGMLTVVKKLDREKEDKYLFTILAKDNGVPPLTSNVTVFVSIIDQNDNSPVFTHNEYNFYVPENLPRHGTVGLITVTDPDYGDNSAVTLSILDENDDFTIDSQTGVIRPNISFDREKQESYTFYVKAEDGGRVSRSSSAKVTINVVDVNDNKPVFIVPPSNCSYELVLPSTNPGTVVFQVIAVDNDTGMNAEVRYSIVGGNTRDLFAIDQETGNITLMEKCDVTDLGLHRVLVKANDLGQPDSLFSVVIVNLFVNESVTNATLINELVRKSTEAPVTPNTEIADVSSPTSDYVKILVAAVAGTITVVVVIFITAVVRCRQAPHLKAAQKNKQNSEWATPNPENRQMIMMKKKKKKKKHSPKNLLLNFVTIEETKADDVDSDGNRVTLDLPIDLEEQTMGKYNWVTTPTTFKPDSPDLARHYKSASPQPAFQIQPETPLNSKHHIIQELPLDNTFVACDSISKCSSSSSDPYSVSDCGYPVTTFEVPVSVHTRPPMKEVVRSCTPMKESTTMEIWIHPQPQRKSEGKVAGKSQRRVTFHLPEGSQESSSDGGLGDHDAGSLTSTSHGLPLGYPQEEYFDRATPSNRTEGDGNSDPESTFIPGLKKAAEITVQPTVEEASDNCTQECLIYGHSDACWMPASLDHSSSSQAQASALCHSPPLSQASTQHHSPRVTQTIALCHSPPVTQTIALCHSPPPIQVSALHHSPPLVQATALHHSPPSAQASALCYSPPLAQAAAISHSSPLPQVIALHRSQAQSSVSLQQGWVQGADGLCSVDQGVQGSATSQFYTMSERLHPSDDSIKVIPLTTFTPRQQARPSRGDSPIMEEHPL

SEQ ID NO: 60264 - protein, 1337 aa, Homo sapiens
MDLLSGTYIFAVLLACVVFHSGAQEKNYTIREEMPENVLIGDLLKDLNLSLIPNKSLTTAMQFKLVYKTGDVPLIRIEEDTGEIFTTGARIDREKLCAGIPRDEHCFYEVEVAILPDEIFRLVKIRFLIEDINDNAPLFPATVINISIPENSAINSKYTLPAAVDPDVGINGVQNYELIKSQNIFGLDVIETPEGDKMPQLIVQKELDREEKDTYVMKVKVEDGGFPQRSSTAILQVSVTDTNDNHPVFKETEIEVSIPENAPVGTSVTQLHATDADIGENAKIHFSFSNLVSNIARRLFHLNATTGLITIKEPLDREETPNHKLLVLASDGGLMPARAMVLVNVTDVNDNVPSIDIRYIVNPVNDTVVLSENIPLNTKIALITVTDKDADHNGRVTCFTDHEIPFRLRPVFSNQFLLETAAYLDYESTKEYAIKLLAADAGKPPLNQSAMLFIKVKDENDNAPVFTQSFVTVSIPENNSPGIQLTKVSAMDADSGPNAKINYLLGPDAPPEFSLDCRTGMLTVVKKLDREKEDKYLFTILAKDNGVPPLTSNVTVFVSIIDQNDNSPVFTHNEYNFYVPENLPRHGTVGLITVTDPDYGDNSAVTLSILDENDDFTIDSQTGVIRPNISFDREKQESYTFYVKAEDGGRVSRSSSAKVTINVVDVNDNKPVFIVPPSNCSYELVLPSTNPGTVVFQVIAVDNDTGMNAEVRYSIVGGNTRDLFAIDQETGNITLMEKCDVTDLGLHRVLVKANDLGQPDSLFSVVIVNLFVNESVTNATLINELVRKSTEAPVTPNTEIADVSSPTSDYVKILVAAVAGTITVVVVIFITAVVRCRQAPHLKAAQKNKQNSEWATPNPENRQMIMMKKKKKKKKHSPKNLLLNFVTIEETKADDVDSDGNRVTLDLPIDLEEQTMGKYNWVTTPTTFKPDSPDLARHYKSASPQPAFQIQPETPLNSKHHIIQELPLDNTFVACDSISKCSSSSSDPYSVSDCGYPVTTFEVPVSVHTRPPMKEVVRSCTPMKESTTMEIWIHPQPQSQRRVTFHLPEGSQESSSDGGLGDHDAGSLTSTSHGLPLGYPQEEYFDRATPSNRTEGDGNSDPESTFIPGLKKAAEITVQPTVEEASDNCTQECLIYGHSDACWMPASLDHSSSSQAQASALCHSPPLSQASTQHHSPRVTQTIALCHSPPVTQTIALCHSPPPIQVSALHHSPPLVQATALHHSPPSAQASALCYSPPLAQAAAISHSSPLPQVIALHRSQAQSSVSLQQGWVQGADGLCSVDQGVQGSATSQFYTMSERLHPSDDSIKVIPLTTFTPRQQARPSRGDSPIMEEHPL

SEQ ID NO: 60265 - protein, 1025 aa, Homo sapiens
MDLLSGTYIFAVLLACVVFHSGAQEKNYTIREEMPENVLIGDLLKDLNLSLIPNKSLTTAMQFKLVYKTGDVPLIRIEEDTGEIFTTGARIDREKLCAGIPRDEHCFYEVEVAILPDEIFRLVKIRFLIEDINDNAPLFPATVINISIPENSAINSKYTLPAAVDPDVGINGVQNYELIKSQNIFGLDVIETPEGDKMPQLIVQKELDREEKDTYVMKVKVEDGGFPQRSSTAILQVSVTDTNDNHPVFKETEIEVSIPENAPVGTSVTQLHATDADIGENAKIHFSFSNLVSNIARRLFHLNATTGLITIKEPLDREETPNHKLLVLASDGGLMPARAMVLVNVTDVNDNVPSIDIRYIVNPVNDTVVLSENIPLNTKIALITVTDKDADHNGRVTCFTDHEIPFRLRPVFSNQFLLETAAYLDYESTKEYAIKLLAADAGKPPLNQSAMLFIKVKDENDNAPVFTQSFVTVSIPENNSPGIQLTKVSAMDADSGPNAKINYLLGPDAPPEFSLDCRTGMLTVVKKLDREKEDKYLFTILAKDNGVPPLTSNVTVFVSIIDQNDNSPVFTHNEYNFYVPENLPRHGTVGLITVTDPDYGDNSAVTLSILDENDDFTIDSQTGVIRPNISFDREKQESYTFYVKAEDGGRVSRSSSAKVTINVVDVNDNKPVFIVPPSNCSYELVLPSTNPGTVVFQVIAVDNDTGMNAEVRYSIVGGNTRDLFAIDQETGNITLMEKCDVTDLGLHRVLVKANDLGQPDSLFSVVIVNLFVNESVTNATLINELVRKSTEAPVTPNTEIADVSSPTSDYVKILVAAVAGTITVVVVIFITAVVRCRQAPHLKAAQKNKQNSEWATPNPENRQMIMMKKKKKKKKHSPKNLLLNFVTIEETKADDVDSDGNRVTLDLPIDLEEQTMGKYNWVTTPTTFKPDSPDLARHYKSASPQPAFQIQPETPLNSKHHIIQELPLDNTFVACDSISKCSSSSSDPYSVSDCGYPVTTFEVPVSVHTRPTDSRTSTIEICSEI

SEQ ID NO: 60266 - protein, 1339 aa, Homo sapiens
MDLLSGTYIFAVLLACVVFHSGAQEKNYTIREEMPENVLIGDLLKDLNLSLIPNKSLTTAMQFKLVYKTGDVPLIRIEEDTGEIFTTGARIDREKLCAGIPRDEHCFYEVEVAILPDEIFRLVKIRFLIEDINDNAPLFPATVINISIPENSAINSKYTLPAAVDPDVGINGVQNYELIKSQNIFGLDVIETPEGDKMPQLIVQKELDREEKDTYVMKVKVEDGGFPQRSSTAILQVSVTDTNDNHPVFKETEIEVSIPENAPVGTSVTQLHATDADIGENAKIHFSFSNLVSNIARRLFHLNATTGLITIKEPLDREETPNHKLLVLASDGGLMPARAMVLVNVTDVNDNVPSIDIRYIVNPVNDTVVLSENIPLNTKIALITVTDKDADHNGRVTCFTDHEIPFRLRPVFSNQFLLETAAYLDYESTKEYAIKLLAADAGKPPLNQSAMLFIKVKDENDNAPVFTQSFVTVSIPENNSPGIQLTKVSAMDADSGPNAKINYLLGPDAPPEFSLDCRTGMLTVVKKLDREKEDKYLFTILAKDNGVPPLTSNVTVFVSIIDQNDNSPVFTHNEYNFYVPENLPRHGTVGLITVTDPDYGDNSAVTLSILDENDDFTIDSQTGVIRPNISFDREKQESYTFYVKAEDGGRVSRSSSAKVTINVVDVNDNKPVFIVPPSNCSYELVLPSTNPGTVVFQVIAVDNDTGMNAEVRYSIVGGNTRDLFAIDQETGNITLMEKCDVTDLGLHRVLVKANDLGQPDSLFSVVIVNLFVNESVTNATLINELVRKSTEAPVTPNTEIADVSSPTSDYVKILVAAVAGTITVVVVIFITAVVRCRQAPHLKAAQKNKQNSEWATPNPENRQMIMMKKKKKKKKHSPKNLLLNFVTIEETKADDVDSDGNRVTLDLPIDLEEQTMGKYNWVTTPTTFKPDSPDLARHYKSASPQPAFQIQPETPLNSKHHIIQELPLDNTFVACDSISKCSSSSSDPYSVSDCGYPVTTFEVPVSVHTRPPMKEVVRSCTPMKESTTMEIWIHPQPQRKSEGKVAGKSQRRVTFHLPEGSQESSSDGGLGDHDAGSLTSTSHGLPLGYPQEEYFDRATPSNRTEGDGNSDPESTAEITVQPTVEEASDNCTQECLIYGHSDACWMPASLDHSSSSQAQASALCHSPPLSQASTQHHSPRVTQTIALCHSPPVTQTIALCHSPPPIQVSALHHSPPLVQATALHHSPPSAQASALCYSPPLAQAAAISHSSPLPQVIALHRSQAQSSVSLQQGWVQGADGLCSVDQGVQGSATSQFYTMSERLHPSDDSIKVIPLTTFTPRQQARPSRGDSPIMEEHPL

SEQ ID NO: 60267 - protein, 1065 aa, Homo sapiens
MDLLSGTYIFAVLLACVVFHSGAQEKNYTIREEMPENVLIGDLLKDLNLSLIPNKSLTTAMQFKLVYKTGDVPLIRIEEDTGEIFTTGARIDREKLCAGIPRDEHCFYEVEVAILPDEIFRLVKIRFLIEDINDNAPLFPATVINISIPENSAINSKYTLPAAVDPDVGINGVQNYELIKSQNIFGLDVIETPEGDKMPQLIVQKELDREEKDTYVMKVKVEDGGFPQRSSTAILQVSVTDTNDNHPVFKETEIEVSIPENAPVGTSVTQLHATDADIGENAKIHFSFSNLVSNIARRLFHLNATTGLITIKEPLDREETPNHKLLVLASDGGLMPARAMVLVNVTDVNDNVPSIDIRYIVNPVNDTVVLSENIPLNTKIALITVTDKDADHNGRVTCFTDHEIPFRLRPVFSNQFLLETAAYLDYESTKEYAIKLLAADAGKPPLNQSAMLFIKVKDENDNAPVFTQSFVTVSIPENNSPGIQLTKVSAMDADSGPNAKINYLLGPDAPPEFSLDCRTGMLTVVKKLDREKEDKYLFTILAKDNGVPPLTSNVTVFVSIIDQNDNSPVFTHNEYNFYVPENLPRHGTVGLITVTDPDYGDNSAVTLSILDENDDFTIDSQTGVIRPNISFDREKQESYTFYVKAEDGGRVSRSSSAKVTINVVDVNDNKPVFIVPPSNCSYELVLPSTNPGTVVFQVIAVDNDTGMNAEVRYSIVGGNTRDLFAIDQETGNITLMEKCDVTDLGLHRVLVKANDLGQPDSLFSVVIVNLFVNESVTNATLINELVRKSTEAPVTPNTEIADVSSPTSDYVKILVAAVAGTITVVVVIFITAVVRCRQAPHLKAAQKNKQNSEWATPNPENRQMIMMKKKKKKKKHSPKNLLLNFVTIEETKADDVDSDGNRVTLDLPIDLEEQTMGKYNWVTTPTTFKPDSPDLARHYKSASPQPAFQIQPETPLNSKHHIIQELPLDNTFVACDSISKCSSSSSDPYSVSDCGYPVTTFEVPVSVHTRPPMKEVVRSCTPMKESTTMEIWIHPQPQRKSEGKVAGKTVLTSSSPSAMTLSYLD

SEQ ID NO: 60268 - protein, 1340 aa, Homo sapiens
MFRVGFLIISSSSSLSPLLLVSVVRVNTTNCHKCLLSGTYIFAVLLVCVVFHSGAQEKNYTIREEIPENVLIGNLLKDLNLSLIPNKSLTTTMQFKLVYKTGDVPLIRIEEDTGEIFTTGARIDREKLCAGIPRDEHCFYEVEVAILPDEIFRLVKIRFLIEDINDNAPLFPATVINISIPENSAINSKYTLPAAVDPDVGINGVQNYELIKSQNIFGLDVIETPEGDKMPQLIVQKELDREEKDTYVMKVKVEDGGFPQRSSTAILQVSVTDTNDNHPVFKETEIEVSIPENAPVGTSVTQLHATDADIGENAKIHFSFSNLVSNIARRLFHLNATTGLITIKEPLDREETPNHKLLVLASDGGLMPARAMVLVNVTDVNDNVPSIDIRYIVNPVNDTVVLSENIPLNTKIALITVTDKDADHNGRVTCFTDHEIPFRLRPVFSNQFLLENAAYLDYESTKEYAIKLLAADAGKPPLNQSAMLFIKVKDENDNAPVFTQSFVTVSIPENNSPGIQLMKVSATDADSGPNAEINYLLGPDAPPEFSLDRRTGMLTVVKKLDREKEDKYLFTILAKDNGVPPLTSNVTVFVSIIDQNDNSPVFTHNEYKFYVPENLPRHGTVGLITVTDPDYGDNSAVTLSILDENDDFTIDSQTGVIRPNISFDREKQESYTFYVKAEDGGRVSRSSSAKVTINVVDVNDNKPVFIVPPYNYSYELVLPSTNPGTVVFQVIAVDNDTGMNAEVRYSIVGGNTRDLFAIDQETGNITLMEKCDVTDLGLHRVLVKANDLGQPDSLFSVVIVNLFVNESVTNATLINELVRKSIEAPVTPNTEIADVSSPTSDYVKILVAAVAGTITVVVVIFITAVVRCRQAPHLKAAQKNMQNSEWATPNPENRQMIMMKKKKKKKKHSPKNLLLNVVTIEETKADDVDSDGNRVTLDLPIDLEEQTMGKYNWVTTPTTFKPDSPDLARHYKSASPQPAFQIQPETPLNLKHHIIQELPLDNTFVACDSISNCSSSSSDPYSVSDCGYPVTTFEVPVSVHTRPSQRRVTFHLPEGSQESSSDGGLGDHDAGSLTSTSHGLPLGYPQEEYFDRATPSNRTEGDGNSDPESNFISGMREKITVQPTVEEASDNCTQECLIYGHSDACWMPASLDHSSSSQAQASALCHSPPLSQASTQHHSPPVTQTIVLCHSPPVTQTIALCHSPPPIQVSALHHSPPLVQGTALHHSPPSAQASALCYSPPLAQAAAISHSSSLPQVIALHRSQAQSSVSLQQGWVQGANGLCSVDQGVQGSATSQFYTMSERLHPSDDSIKVIPLTTFAPRQQARPSRGDSPIMETHPL

SEQ ID NO: 60269 - protein, 1037 aa, Homo sapiens
MTVGFNSDISSVVRVNTTNCHKCLLSGTYIFAVLLVCVVFHSGAQEKNYTIREEIPENVLIGNLLKDLNLSLIPNKSLTTTMQFKLVYKTGDVPLIRIEEDTGEIFTTGARIDREKLCAGIPRDEHCFYEVEVAILPDEIFRLVKIRFLIEDINDNAPLFPATVINISIPENSAINSKYTLPAAVDPDVGINGVQNYELIKSQNIFGLDVIETPEGDKMPQLIVQKELDREEKDTYVMKVKVEDGGFPQRSSTAILQVSVTDTNDNHPVFKETEIEVSIPENAPVGTSVTQLHATDADIGENAKIHFSFSNLVSNIARRLFHLNATTGLITIKEPLDREETPNHKLLVLASDGGLMPARAMVLVNVTDVNDNVPSIDIRYIVNPVNDTVVLSENIPLNTKIALITVTDKDADHNGRVTCFTDHEIPFRLRPVFSNQFLLENAAYLDYESTKEYAIKLLAADAGKPPLNQSAMLFIKVKDENDNAPVFTQSFVTVSIPENNSPGIQLMKVSATDADSGPNAEINYLLGPDAPPEFSLDRRTGMLTVVKKLDREKEDKYLFTILAKDNGVPPLTSNVTVFVSIIDQNDNSPVFTHNEYKFYVPENLPRHGTVGLITVTDPDYGDNSAVTLSILDENDDFTIDSQTGVIRPNISFDREKQESYTFYVKAEDGGRVSRSSSAKVTINVVDVNDNKPVFIVPPYNYSYELVLPSTNPGTVVFQVIAVDNDTGMNAEVRYSIVGGNTRDLFAIDQETGNITLMEKCDVTDLGLHRVLVKANDLGQPDSLFSVVIVNLFVNESVTNATLINELVRKSIEAPVTPNTEIADVSSPTSDYVKILVAAVAGTITVVVVIFITAVVRCRQAPHLKAAQKNMQNSEWATPNPENRQMIMMKKKKKKKKHSPKNLLLNVVTIEETKADDVDSDGNRVTLDLPIDLEEQTMGKYNWVTTPTTFKPDSPDLARHYKSASPQPAFQIQPETPLNLKHHIIQELPLDNTFVACDSISNCSSSSSDPYSVSDCGYPVTTFEVPVSVHTRPTDSRT

SEQ ID NO: 60270 - protein, 1048 aa, Homo sapiens
MFRVGFLIISSSSSLSPLLLVSVVRVNTTNCHKCLLSGTYIFAVLLVCVVFHSGAQEKNYTIREEIPENVLIGNLLKDLNLSLIPNKSLTTTMQFKLVYKTGDVPLIRIEEDTGEIFTTGARIDREKLCAGIPRDEHCFYEVEVAILPDEIFRLVKIRFLIEDINDNAPLFPATVINISIPENSAINSKYTLPAAVDPDVGINGVQNYELIKSQNIFGLDVIETPEGDKMPQLIVQKELDREEKDTYVMKVKVEDGGFPQRSSTAILQVSVTDTNDNHPVFKETEIEVSIPENAPVGTSVTQLHATDADIGENAKIHFSFSNLVSNIARRLFHLNATTGLITIKEPLDREETPNHKLLVLASDGGLMPARAMVLVNVTDVNDNVPSIDIRYIVNPVNDTVVLSENIPLNTKIALITVTDKDADHNGRVTCFTDHEIPFRLRPVFSNQFLLENAAYLDYESTKEYAIKLLAADAGKPPLNQSAMLFIKVKDENDNAPVFTQSFVTVSIPENNSPGIQLMKVSATDADSGPNAEINYLLGPDAPPEFSLDRRTGMLTVVKKLDREKEDKYLFTILAKDNGVPPLTSNVTVFVSIIDQNDNSPVFTHNEYKFYVPENLPRHGTVGLITVTDPDYGDNSAVTLSILDENDDFTIDSQTGVIRPNISFDREKQESYTFYVKAEDGGRVSRSSSAKVTINVVDVNDNKPVFIVPPYNYSYELVLPSTNPGTVVFQVIAVDNDTGMNAEVRYSIVGGNTRDLFAIDQETGNITLMEKCDVTDLGLHRVLVKANDLGQPDSLFSVVIVNLFVNESVTNATLINELVRKSIEAPVTPNTEIADVSSPTSDYVKILVAAVAGTITVVVVIFITAVVRCRQAPHLKAAQKNMQNSEWATPNPENRQMIMMKKKKKKKKHSPKNLLLNVVTIEETKADDVDSDGNRVTLDLPIDLEEQTMGKYNWVTTPTTFKPDSPDLARHYKSASPQPAFQIQPETPLNLKHHIIQELPLDNTFVACDSISNCSSSSSDPYSVSDCGYPVTTFEVPVSVHTRPTDSRT

SEQ ID NO: 60271 - protein, 1319 aa, Homo sapiens
  VARIANT 1: note = MOD_RES - Any amino acid
XVVRVNTTNCHKCLLSGTYIFAVLLVCVVFHSGAQEKNYTIREEIPENVLIGNLLKDLNLSLIPNKSLTTTMQFKLVYKTGDVPLIRIEEDTGEIFTTGARIDREKLCAGIPRDEHCFYEVEVAILPDEIFRLVKIRFLIEDINDNAPLFPATVINISIPENSAINSKYTLPAAVDPDVGINGVQNYELIKSQNIFGLDVIETPEGDKMPQLIVQKELDREEKDTYVMKVKVEDGGFPQRSSTAILQVSVTDTNDNHPVFKETEIEVSIPENAPVGTSVTQLHATDADIGENAKIHFSFSNLVSNIARRLFHLNATTGLITIKEPLDREETPNHKLLVLASDGGLMPARAMVLVNVTDVNDNVPSIDIRYIVNPVNDTVVLSENIPLNTKIALITVTDKDADHNGRVTCFTDHEIPFRLRPVFSNQFLLENAAYLDYESTKEYAIKLLAADAGKPPLNQSAMLFIKVKDENDNAPVFTQSFVTVSIPENNSPGIQLMKVSATDADSGPNAEINYLLGPDAPPEFSLDRRTGMLTVVKKLDREKEDKYLFTILAKDNGVPPLTSNVTVFVSIIDQNDNSPVFTHNEYKFYVPENLPRHGTVGLITVTDPDYGDNSAVTLSILDENDDFTIDSQTGVIRPNISFDREKQESYTFYVKAEDGGRVSRSSSAKVTINVVDVNDNKPVFIVPPYNYSYELVLPSTNPGTVVFQVIAVDNDTGMNAEVRYSIVGGNTRDLFAIDQETGNITLMEKCDVTDLGLHRVLVKANDLGQPDSLFSVVIVNLFVNESVTNATLINELVRKSIEAPVTPNTEIADVSSPTSDYVKILVAAVAGTITVVVVIFITAVVRCRQAPHLKAAQKNMQNSEWATPNPENRQMIMMKKKKKKKKHSPKNLLLNVVTIEETKADDVDSDGNRVTLDLPIDLEEQTMGKYNWVTTPTTFKPDSPDLARHYKSASPQPAFQIQPETPLNLKHHIIQELPLDNTFVACDSISNCSSSSSDPYSVSDCGYPVTTFEVPVSVHTRPSQRRVTFHLPEGSQESSSDGGLGDHDAGSLTSTSHGLPLGYPQEEYFDRATPSNRTEGDGNSDPESTFIPGLKKEITVQPTVEEASDNCTQECLIYGHSDACWMPASLDHSSSSQAQASALCHSPPLSQASTQHHSPPVTQTIVLCHSPPVTQTIALCHSPPPIQVSALHHSPPLVQGTALHHSPPSAQASALCYSPPLAQAAAISHSSSLPQVIALHRSQAQSSVSLQQGWVQGANGLCSVDQGVQGSATSQFYTMSERLHPSDDSIKVIPLTTFAPRQQARPSRGDSPIMETHPL

SEQ ID NO: 60272 - protein, 1184 aa, Homo sapiens
MMQLLQLLLGLLGPGGYLFLLGDCQEVTTLTVKYQVSEEVPSGTVIGKLSQELGREERRRQAGAAFQVLQLPQALPIQVDSEEGLLSTGRRLDREQLCRQWDPCLVSFDVLATGDLALIHVEIQVLDINDHQPRFPKGEQELEISESASLRTRIPLDRALDPDTGPNTLHTYTLSPSEHFALDVIVGPDETKHAELIVVKELDREIHSFFDLVLTAYDNGNPPKSGTSLVKVNVLDSNDNSPAFAESSLALEIQEDAAPGTLLIKLTATDPDQGPNGEVEFFLSKHMPPEVLDTFSIDAKTGQVILRRPLDYEKNPAYEVDVQARDLGPNPIPAHCKVLIKVLDVNDNIPSIHVTWASQPSLVSEALPKDSFIALVMADDLDSGHNGLVHCWLSQELGHFRLKRTNGNTYMLLTNATLDREQWPKYTLTLLAQDQGLQPLSAKKQLSIQISDINDNAPVFEKSRYEVSTRENNLPSLHLITIKAHDADLGINGKVSYRIQDSPVAHLVAIDSNTGEVTAQRSLNYEEMAGFEFQVIAEDSGQPMLASSVSVWVSLLDANDNAPEVVQPVLSDGKASLSVLVNASTGHLLVPIETPNGLGPAGTDTPPLATHSSRPFLLTTIVARDADSGANGEPLYSIRSGNEAHLFILNPHTGQLFVNVTNASSLIGSEWELEIVVEDQGSPPLQTRALLRVMFVTSVDHLRDSARKPGALSMSMLTVICLAVLLGIFGLILALFMSICRTEKKDNRAYNCREAESTYRQQPKRPQKHIQKADIHLVPVLRGQAGEPCEVGQSHKDVDKEAMMEAGWDPCLQAPFHLTPTLYRTLRNQGNQGAPAESREVLQDTVNLLFNHPRQRNASRENLNLPEPQPATGQPRSRPLKVAGSPTGRLAGDQGSEEAPQRPPASSATLRRQRHLNGKVSPEKESGPRQILRSLVRLSVAAFAERNPVEELTVDSPPVQQISQLLSLLHQGQFQPKPNHRGNKYLAKPGGSRSAIPDTDGPSARAGGQTDPEQEEGPLDPEEDLSVKQLLEEELSSLLDPSTGLALDRLSAPDPAWMARLSLPLTTNYRDNVISPDAAATEEPRTFQTFGKAEAPELSPTGTRLASTFVSEMSSLLEMLLEQRSSMPVEAASEALRRLSVCGRTLSLDLATSAASGMKVQGDPGGKTGTEGKSRGSSSSSRCL

SEQ ID NO: 60273 - protein, 23 aa, Homo sapiens
MMQLLQLLLGLLGPGGYLFLLGD

SEQ ID NO: 60274 - protein, 1159 aa, Homo sapiens
MYLSICCCFLLWAPALTLKNLNYSVPEEQGAGTVIGNIGRDARLQPGLPPAERGGGGRSKSGSYRVLENSAPHLLDVDADSGLLYTKQRIDRESLCRHNAKCQLSLEVFANDKEICMIKVEIQDINDNAPSFSSDQIEMDISENAAPGTRFPLTSAHDPDAGENGLRTYLLTRDDHGLFGLDVKSRGDGTKFPELVIQKALDREQQNHHTLVLTALDGGEPPRSATVQINVKVIDSNDNSPVFEAPSYLVELPENAPLGTVVIDLNATDADEGPNGEVLYSFSSYVPDRVRELFSIDPKTGLIRVKGNLDYEENGMLEIDVQARDLGPNPIPAHCKVTVKLIDRNDNAPSIGFVSVRQGALSEAAPPGTVIALVRVTDRDSGKNGQLQCRVLGGGGTGGGGGLGGPGGSVPFKLEENYDNFYTVVTDRPLDRETQDEYNVTIVARDGGSPPLNSTKSFAIKILDENDNPPRFTKGLYVLQVHENNIPGEYLGSVLAQDPDLGQNGTVSYSILPSHIGDVSIYTYVSVNPTNGAIYALRSFNFEQTKAFEFKVLAKDSGAPAHLESNATVRVTVLDVNDNAPVIVLPTLQNDTAELQVPRNAGLGYLVSTVRALDSDFGESGRLTYEIVDGNDDHLFEIDPSSGEIRTLHPFWEDVTPVVELVVKVTDHGKPTLSAVAKLIIRSVSGSLPEGVPRVNGEQHHWDMSLPLIVTLSTISIILLAAMITIAVKCKRENKEIRTYNCRIAEYSHPQLGGGKGKKKKINKNDIMLVQSEVEERNAMNVMNVVSSPSLATSPMYFDYQTRLPLSSPRSEVMYLKPASNNLTVPQGHAGCHTSFTGQGTNASETPATRMSIIQTDNFPAEPNYMGSRQQFVQSSSTFKDPERASLRDSGHGDSDQADSDQDTNKGSCCDMSVREALKMKTTSTKSQPLEQEPEECVNCTDECRVLGHSDRCWMPQFPAANQAENADYRTNLFVPTVEANVETETYETVNPTGKKTFCTFGKDKREHTILIANVKPYLKAKRALSPLLQEVPSASSSPTKACIEPCTSTKGSLDGCEAKPGALAEASSQYLPTDSQYLSPSKQPRDPPFMASDQMARVFADVHSRASRDSSEMGAVLEQLDHPNRDLGRESVDAEEVVREIDKLLQDCRGNDPVAVRK

SEQ ID NO: 60275 - protein, 1135 aa, Homo sapiens
MHQMNAKMHFRFVFALLIVSFNHDVLGKNLKYRIYEEQRVGSVIARLSEDVADVLLKLPNPSTVRFRAMQRGNSPLLVVNEDNGEISIGATIDREQLCQKNLNCSIEFDVITLPTEHLQLFHIEVEVLDINDNSPQFSRSLIPIEISESAAVGTRIPLDSAFDPDVGENSLHTYSLSANDFFNIEVRTRTDGAKYAELIVVRELDRELKSSYELQLTASDMGVPQRSGSSILKISISDSNDNSPAFEQQSYIIQLLENSPVGTLLLDLNATDPDEGANGKIVYSFSSHVSPKIMETFKIDSERGHLTLFKQVDYEITKSYEIDVQAQDLGPNSIPAHCKIIIKVVDVNDNKPEININLMSPGKEEISYIFEGDPIDTFVALVRVQDKDSGLNGEIVCKLHGHGHFKLQKTYENNYLILTNATLDREKRSEYSLTVIAEDRGTPSLSTVKHFTVQINDINDNPPHFQRSRYEFVISENNSPGAYITTVTATDPDLGENGQVTYTILESFILGSSITTYVTIDPSNGAIYALRIFDHEEVSQITFVVEARDGGSPKQLVSNTTVVLTIIDENDNVPVVIGPALRNNTAEITIPKGAESGFHVTRIRAIDRDSGVNAELSCAIVAGNEENIFIIDPRSCDIHTNVSMDSVPYTEWELSVIIQDKGNPQLHTKVLLKCMIFEYAESVTSTAMTSVSQASLDVSMIIIISLGAICAVLLVIMVLFATRCNREKKDTRSYNCRVAESTYQHHPKRPSRQIHKGDITLVPTINGTLPIRSHHRSSPSSSPTLERGQMGSRQSHNSHQSLNSLVTISSNHVPENFSLELTHATPAVEQVSQLLSMLHQGQYQPRPSFRGNKYSRSYRYALQDMDKFSLKDSGRGDSEAGDSDYDLGRDSPIDRLLGEGFSDLFLTDGRIPAAMRLCTEECRVLGHSDQCWMPPLPSPSSDYRSNMFIPGEEFPTQPQQQHPHQSLEDDAQPADSGEKKKSFSTFGKDSPNDEDTGDTSTSSLLSEMSSVFQRLLPPSLDTYSECSEVDRSNSLERRKGPLPAKTVGYPQGVAAWAASTHFQNPTTNCGPPLGTHSSVQPSSKWLPAMEEIPENYEEDDFDNVLNHLNDGKHELMDASELVAEINKLLQDVRQS

SEQ ID NO: 60276 - protein, 1134 aa, Homo sapiens
MHQMNAKMHFRFVFALLIVSFNHDVLGKNLKYRIYEEQRVGSVIARLSEDVADVLLKLPNPSTVRFRAMQRGNSPLLVVNEDNGEISIGATIDREQLCQKNLNCSIEFDVITLPTEHLQLFHIEVEVLDINDNSPQFSRSLIPIEISESAAVGTRIPLDSAFDPDVGENSLHTYSLSANDFFNIEVRTRTDGAKYAELIVVRELDRELKSSYELQLTASDMGVPQRSGSSILKISISDSNDNSPAFEQQSYIIQLLENSPVGTLLLDLNATDPDEGANGKIVYSFSSHVSPKIMETFKIDSERGHLTLFKQVDYEITKSYEIDVQAQDLGPNSIPAHCKIIIKVVDVNDNKPEININLMSPGKEEISYIFEGDPIDTFVALVRVQDKDSGLNGEIVCKLHGHGHFKLQKTYENNYLILTNATLDREKRSEYSLTVIAEDRGTPSLSTVKHFTVQINDINDNPPHFQRSRYEFVISENNSPGAYITTVTATDPDLGENGQVTYTILESFILGSSITTYVTIDPSNGAIYALRIFDHEEVSQITFVVEARDGGSPKQLVSNTTVVLTIIDENDNVPVVIGPALRNNTAEITIPKGAESGFHVTRIRAIDRDSGVNAELSCAIVAGNEENIFIIDPRSCDIHTNVSMDSVPYTEWELSVIIQDKGNPQLHTKVLLKCMIFEYAESVTSTAMTSVSQASLDVSMIIIISLGAICAVLLVIMVLFATRCNREKKDTRSYNCRVAESTYQHHPKRPSRQIHKGDITLVPTINGTLPIRSHHRSSPSSSPTLERGQMGSRQSHNSHQSLNSLVTISSNHVPENFSLELTHATPAVEVSQLLSMLHQGQYQPRPSFRGNKYSRSYRYALQDMDKFSLKDSGRGDSEAGDSDYDLGRDSPIDRLLGEGFSDLFLTDGRIPAAMRLCTEECRVLGHSDQCWMPPLPSPSSDYRSNMFIPGEEFPTQPQQQHPHQSLEDDAQPADSGEKKKSFSTFGKDSPNDEDTGDTSTSSLLSEMSSVFQRLLPPSLDTYSECSEVDRSNSLERRKGPLPAKTVGYPQGVAAWAASTHFQNPTTNCGPPLGTHSSVQPSSKWLPAMEEIPENYEEDDFDNVLNHLNDGKHELMDASELVAEINKLLQDVRQS

SEQ ID NO: 60277 - protein, 1101 aa, Homo sapiens
MESLLLPVLLLLAILWTQAAALINLKYSVEEEQRAGTVIANVAKDAREAGFALDPRQASAFRVVSNSAPHLVDINPSSGLLVTKQKIDRDLLCRQSPKCIISLEVMSSSMEICVIKVEIKDLNDNAPSFPAAQIELEISEAASPGTRIPLDSAYDPDSGSFGVQTYELTPNELFGLEIKTRGDGSRFAELVVEKSLDRETQSHYSFRITALDGGDPPRLGTVGLSIKVTDSNDNNPVFSESTYAVSVPENSPPNTPVIRLNASDPDEGTNGQVVYSFYGYVNDRTRELFQIDPHSGLVTVTGALDYEEGHVYELDVQAKDLGPNSIPAHCKVTVSVLDTNDNPPVINLLSVNSELVEVSESAPPGYVIALVRVSDRDSGLNGRVQCRLLGNVPFRLQEYESFSTILVDGRLDREQHDQYNLTIQARDGGVPMLQSAKSFTVLITDENDNHPHFSKPYYQVIVQENNTPGAYLLSVSARDPDLGLNGSVSYQIVPSQVRDMPVFTYVSINPNSGDIYALRSFNHEQTKAFEFKVLAKDGGLPSLQSNATVRVIILDVNDNTPVITAPPLINGTAEVYIPRNSGIGYLVTVVKAEDYDEGENGRVTYDMTEGDRGFFEIDQVNGEVRTTRTFGESSKSSYELIVVAHDHGKTSLSASALVLIYLSPALDAQESMGSVNLSLIFIIALGSIAGILFVTMIFVAIKCKRDNKEIRTYNCRIAEYSYGHQKKSSKKKKISKNDIRLVPRDVEETDKMNVVSCSSLTSSLNYFDYHQQTLPLGCRRSESTFLNVENQNTRNTSANHIYHHSFNSQGPQQPDLIINGVPLPETENYSFDSNYVNSRAHLIKSSSTFKDLEGNSLKDSGHEESDQTDSEHDVQRSLYCDTAVNDVLNTSVTSMGSQMPDHDQNEGFHCREECRILGHSDRCWMPRNPMPIRSKSPEHVRNIIALSIEATAADVEAYDDCGPTKRTFATFGKDVSDHPAEERPTLKGKRTVDVTICSPKVNSVIREAGNGCEAISPVTSPLHLKSSLPTKPSVSYTIALAPPARDLEQYVNNVNNGPTRPSEAEPRGADSEKVMHEVSPILKEGRNKESPGVKRLKDIVL

SEQ ID NO: 60278 - protein, 1148 aa, Homo sapiens
MESLLLPVLLLLAILWTQAAALINLKYSVEEEQRAGTVIANVAKDAREAGFALDPRQASAFRVVSNSAPHLVDINPSSGLLVTKQKIDRDLLCRQSPKCIISLEVMSSSMEICVIKVEIKDLNDNAPSFPAAQIELEISEAASPGTRIPLDSAYDPDSGSFGVQTYELTPNELFGLEIKTRGDGSRFAELVVEKSLDRETQSHYSFRITALDGGDPPRLGTVGLSIKVTDSNDNNPVFSESTYAVSVPENSPPNTPVIRLNASDPDEGTNGQVVYSFYGYVNDRTRELFQIDPHSGLVTVTGALDYEEGHVYELDVQAKDLGPNSIPAHCKVTVSVLDTNDNPPVINLLSVNSELVEVSESAPPGYVIALVRVSDRDSGLNGRVQCRLLGNVPFRLQEYESFSTILVDGRLDREQHDQYNLTIQARDGGVPMLQSAKSFTVLITDENDNHPHFSKPYYQVIVQENNTPGAYLLSVSARDPDLGLNGSVSYQIVPSQVRDMPVFTYVSINPNSGDIYALRSFNHEQTKAFEFKVLAKDGGLPSLQSNATVRVIILDVNDNTPVITAPPLINGTAEVYIPRNSGIGYLVTVVKAEDYDEGENGRVTYDMTEGDRGFFEIDQVNGEVRTTRTFGESSKSSYELIVVAHDHGKTSLSASALVLIYLSPALDAQESMGSVNLSLIFIIALGSIAGILFVTMIFVAIKCKRDNKEIRTYNCSNCLTITCLLGCFIKGQNSKCLHCISVSPISEEQDKKTEEKVSLRGKRIAEYSYGHQKKSSKKKKISKNDIRLVPRDVEETDKMNVVSCSSLTSSLNYFDYHQQTLPLGCRRSESTFLNVENQNTRNTSANHIYHHSFNSQGPQQPDLIINGVPLPETENYSFDSNYVNSRAHLIKSSSTFKDLEGNSLKDSGHEESDQTDSEHDVQRSLYCDTAVNDVLNTSVTSMGSQMPDHDQNEGFHCREECRILGHSDRCWMPRNPMPIRSKSPEHVRNIIALSIEATAADVEAYDDCGPTKRTFATFGKDVSDHPAEERPTLKGKRTVDVTICSPKVNSVIREAGNGCEAISPVTSPLHLKSSLPTKPSVSYTIALAPPARDLEQYVNNVNNGPTRPSEAEPRGADSEKVMHEVSPILKEGRNKESPGVKRLKDIVL

SEQ ID NO: 60279 - protein, 1100 aa, Homo sapiens
MESLLLPVLLLLAILWTQAAALINLKYSVEEEQRAGTVIANVAKDAREAGFALDPRQASAFRVVSNSAPHLVDINPSSGLLVTKQKIDRDLLCRQSPKCIISLEVMSSSMEICVIKVEIKDLNDNAPSFPAAQIELEISEAASPGTRIPLDSAYDPDSGSFGVQTYELTPNELFGLEIKTRGDGSRFAELVVEKSLDRETQSHYSFRITALDGGDPPRLGTVGLSIKVTDSNDNNPVFSESTYAVSVPENSPPNTPVIRLNASDPDEGTNGQVVYSFYGYVNDRTRELFQIDPHSGLVTVTGALDYEEGHVYELDVQAKDLGPNSIPAHCKVTVSVLDTNDNPPVINLLSVNSELVEVSESAPPGYVIALVRVSDRDSGLNGRVQCRLLGNVPFRLQEYESFSTILVDGRLDREQHDQYNLTIQARDGGVPMLQSAKSFTVLITDENDNHPHFSKPYYQVIVQENNTPGAYLLSVSARDPDLGLNGSVSYQIVPSQVRDMPVFTYVSINPNSGDIYALRSFNHEQTKAFEFKVLAKDGGLPSLQSNATVRVIILDVNDNTPVITAPPLINGTAEVYIPRNSGIGYLVTVVKAEDYDEGENGRVTYDMTEGDRGFFEIDQVNGEVRTTRTFGESSKSSYELIVVAHDHGKTSLSASALVLIYLSPALDAQESMGSVNLSLIFIIALGSIAGILFVTMIFVAIKCKRDNKEIRTYNCRIAEYSYGHQKKSSKKKKISKNDIRLVPRDVEETDKMNVVSCSSLTSSLNYFDYHQQTLPLGCRRSESTFLNVENQNTRNTSANHIYHHSFNSQGPQQPDLIINGVPLPETENYSFDSNYVNSRAHLIKSSTFKDLEGNSLKDSGHEESDQTDSEHDVQRSLYCDTAVNDVLNTSVTSMGSQMPDHDQNEGFHCREECRILGHSDRCWMPRNPMPIRSKSPEHVRNIIALSIEATAADVEAYDDCGPTKRTFATFGKDVSDHPAEERPTLKGKRTVDVTICSPKVNSVIREAGNGCEAISPVTSPLHLKSSLPTKPSVSYTIALAPPARDLEQYVNNVNNGPTRPSEAEPRGADSEKVMHEVSPILKEGRNKESPGVKRLKDIVL

SEQ ID NO: 60280 - protein, 697 aa, Homo sapiens
MFTLDVEENENGERTPYLIVMGALDRETQDQYVSIIIAEDGGSPPLLGSATLTIGISDINDNCPLFTDSQINVTVYGNATVGTPIAAVQAVDKDLGTNAQITYSYSQKVPQASKDLFHLDENTGVIKLFSKIGGSVLESHKLTILANGPGCIPAVITALVSIIKVIFRPPEIVPRYIANEIDGVVYLKELEPVNTPIAFFTIRDPEGKYKVNCYLDGEGPFRLSPYKPYNNEYLLETTKPMDYELQQFYEVAVVAWNSEGFHVKRVIKVQLLDDNDNAPIFLQPLIELTIEENNSPNAFLTKLYATDADSEERGQVSYFLGPDAPSYFSLDSVTGILTVSTQLDREEKEKYRYTVRAVDCGKPPRESVATVALTVLDKNDNSPRFINKDFSFFVPENFPGYGEIGVISVTDADAGRNGWVALSVVNQSDIFVIDTGKGMLRAKVSLDREQQSSYTLWVEAVDGGEPALSSTAKITILLLDINDNPPLVLFPQSNMSYLLVLPSTLPGSPVTEVYAVDKDTGMNAVIAYSIIGRRGPRPESFRIDPKTGNITLEEALLQTDYGLHRLLVKVSDHGYPEPLHSTVMVNLFVNDTVSNESYIESLLRKEPEINIEEKEPQISIEPTHRKVESVSCMPTLVALSVISLGSITLVTGMGIYICLRKGEKHPREDENLEVQIPLKGKIDLHMRERKPMDISNI

SEQ ID NO: 60281 - protein, 951 aa, Homo sapiens
MRGRGNARSSQALGVSWCPATWHPRLDMGRLHRPRSSTSYRNLPHLFLFFLFVGPFSCLGSYSRATELLYSLNEGLPAGVLIGSLAEDLRLLPRSAGRPDPQSQLPERTGAEWNPPLSFSLASRGLSGQYVTLDNRSGELHTSAQEIDREALCVEGGGGTAWSGSVSISSSPSDSCLLLLDVLVLPQEYFRFVKVKIAIRDINDNAPQFPVSQISVWVPENAPVNTRLAIEHPAVDPDVGINGVQTYRLLDYHGMFTLDVEENENGERTPYLIVMGALDRETQDQYVSIIIAEDGGSPPLLGSATLTIGISDINDNCPLFTDSQINVTVYGNATVGTPIAAVQAVDKDLGTNAQITYSYSQKVPQASKDLFHLDENTGVIKLFSKIGGSVLESHKLTILANGPGCIPAVITALVSIIKVIFRPPEIVPRYIANEIDGVVYLKELEPVNTPIAFFTIRDPEGKYKVNCYLDGEGPFRLSPYKPYNNEYLLETTKPMDYELQQFYEVAVVAWNSEGFHVKRVIKVQLLDDNDNAPIFLQPLIELTIEENNSPNAFLTKLYATDADSEERGQVSYFLGPDAPSYFSLDSVTGILTVSTQLDREEKEKYRYTVRAVDCGKPPRESVATVALTVLDKNDNSPRFINKDFSFFVPENFPGYGEIGVISVTDADAGRNGWVALSVVNQSDIFVIDTGKGMLRAKVSLDREQQSSYTLWVEAVDGGEPALSSTAKITILLLDINDNPPLVLFPQSNMSYLLVLPSTLPGSPVTEVYAVDKDTGMNAVIAYSIIGRRGPRPESFRIDPKTGNITLEEALLQTDYGLHRLLVKVSDHGYPEPLHSTVMVNLFVNDTVSNESYIESLLRKEPEINIEEKEPQISIEPTHRKVESVSCMPTLVALSVISLGSITLVTGMGIYICLRKGEKHPREDENLEVQIPLKGKIDLHMRERKPMDISNI

SEQ ID NO: 60282 - protein, 951 aa, Homo sapiens; identical to SEQ ID NO: 60281

SEQ ID NO: 60283 - protein, 1200 aa, Homo sapiens
MLRMRTAGWARGWCLGCCLLLPLSLSLAAAKQLLRYRLAEEGPADVRIGNVASDLGIVTGSGEVTFSLESGSEYLKIDNLTGELSTSERRIDREKLPQCQMIFDENECFLDFEVSVIGPSQSWVDLFEGQVIVLDINDNTPTFPSPVLTLTVEENRPVGTLYLLPTATDRDFGRNGIERYELLQEPGGGGSGGESRRAGAADSAPYPGGGGNGASGGGSGGSKRRLDASEGGGGTNPGGRSSVFELQVADTPDGEKQPQLIVKGVYEADLAENSAPGTPILQLRAADLDVGVNGQIEYVFGAATESVRRLLRLDETSGWLSVLHRIDREEVNQLRFTVMARDRGQPPKTDKATVVLNIKDENDNVPSIEIRKIGRIPLKDGVANVAEDVLVDTPIALVQVSDRDQGENGVVTCTVVGDVPFQLKPASDTEGDQNKKKYFLHTSTPLDYEATREFNVVIVAVDSGSPSLSSNNSLIVKVGDTNDNPPMFGQSVVEVYFPENNIPGERVATVLATDADSGKNAEIAYSLDSSVMGIFAIDPDSGDILVNTVLDREQTDRYEFKVNAKDKGIPVLQGSTTVIVQVADKNDNDPKFMQDVFTFYVKENLQPNSPVGMVTVMDADKGRNAEMSLYIEENNNIFSIENDTGTIYSTMSFDREHQTTYTFRVKAVDGGDPPRSATATVSLFVMDENDNAPTVTLPKNISYTLLPPSSNVRTVVATVLATDSDDGINADLNYSIVGGNPFKLFEIDPTSGVVSLVGKLTQKHYGLHRLVVQVNDSGQPSQSTTTLVHVFVNESVSNATAIDSQIARSLHIPLTQDIAGDPSYEISKQRLSIVIGVVAGIMTVILIILIVVMARYCRSKNKNGYEAGKKDHEDFFTPQQHDKSKKPKKDKKNKKSKQPLYSSIVTVEASKPNGQRYDSVNEKLSDSPSMGRYRSVNGGPGSPDLARHYKSSSPLPTVQLHPQSPTAGKKHQAVQDLPPANTFVGAGDNISIGSDHCSEYSCQTNNKYSKQPFRRVTFSVVSQPQDPHQGSLQSCYDSGLEESETPSSKSSSGPRLGALPLPEDNYERTTPDGSVDSRPLPDVALTGKCTRECDEYGHSDSCWMPVRTSPERKKSQPKLSTFMPVDERGSQEKLANGEAAIMGDRNRNLLNKKLTSSYETFSAASFSKNEEANPEDIPLTKTGEYKPSPVNTLTRREVYL
